United States Patent Application Publication US 2007/0214517 A1 - sequence listing, part 19

SEQ ID NO: 23920 - protein, 277 aa, Arabidopsis thaliana
  peptide (1)..(277): Ceres Seq. ID no. 12339507
  misc_feature (11)..(268): Homolog of NCBI NO: 32421789 NR Description: hypothetical protein [Neurospora crassa]
  misc_feature (7)..(269): Homolog of NCBI NO: 40746306 NR Description: conserved hypothetical protein [Aspergillus
  misc_feature (1)..(276): Homolog of NCBI NO: 38567717 NR Description: B1358B12.15 [Oryza sativa (japonica
  misc_feature (2)..(276): Homolog of NCBI NO: 7716460 NR Description: prohibitin [Zea mays]
  misc_feature (1)..(276): Homolog of NCBI NO: 7716458 NR Description: prohibitin [Zea mays]
  misc_feature (1)..(276): Homolog of NCBI NO: 7489185 NR Description: prohibitin - common tobacco
  misc_feature (1)..(276): Homolog of NCBI NO: 27765032 NR Description: At3g27280 [Arabidopsis thaliana]
  misc_feature (1)..(276): Homolog of NCBI NO: 15232129 NR Description: prohibitin, putative
  misc_feature (1)..(276): Homolog of NCBI NO: 21592895 NR Description: prohibitin, putative [Arabidopsis thaliana]
  misc_feature (1)..(277): Homolog of NCBI NO: 15237488 NR Description: prohibitin (gb|AAC49691.1)
MGSQQAAVSFLSNLAKAAFGLGTAATVLNTSLFTVDGGERAVIFDRFRGVMDQTVGEGTHFLIPILQRPHIFDIRTKPHTFSSISGTKDLQMVNLTLRVLSRPEVSRLPYIFQTLGLEYDEKVLPSIGNEVLKAVVAQFNADQLLTERPHVSALVRESLITRAKDFNIVLDDVAITHLSYGVEFSRAVEQKQVAQQEAERSKFVVMKADQERRAAVIRAEGESEAAQLISDATAKAGMGLIELRRIEASREIASTLARSPNVAYLPGGQSMLFALNR

SEQ ID NO: 23921 - protein, 227 aa, Arabidopsis thaliana
  peptide (1)..(227): Ceres Seq. ID no. 12339508
  misc_feature (1)..(218): Homolog of NCBI NO: 32421789 NR Description: hypothetical protein [Neurospora crassa]
  misc_feature (1)..(219): Homolog of NCBI NO: 40746306 NR Description: conserved hypothetical protein [Aspergillus
  misc_feature (1)..(226): Homolog of NCBI NO: 38567717 NR Description: B1358B12.15 [Oryza sativa (japonica
  misc_feature (1)..(226): Homolog of NCBI NO: 7716460 NR Description: prohibitin [Zea mays]
  misc_feature (1)..(226): Homolog of NCBI NO: 7716458 NR Description: prohibitin [Zea mays]
  misc_feature (1)..(226): Homolog of NCBI NO: 7489185 NR Description: prohibitin - common tobacco
  misc_feature (1)..(226): Homolog of NCBI NO: 27765032 NR Description: At3g27280 [Arabidopsis thaliana]
  misc_feature (1)..(226): Homolog of NCBI NO: 15232129 NR Description: prohibitin, putative
  misc_feature (1)..(226): Homolog of NCBI NO: 21592895 NR Description: prohibitin, putative [Arabidopsis thaliana]
  misc_feature (1)..(227): Homolog of NCBI NO: 15237488 NR Description: prohibitin (gb|AAC49691.1)
MDQTVGEGTHFLIPILQRPHIFDIRTKPHTFSSISGTKDLQMVNLTLRVLSRPEVSRLPYIFQTLGLEYDEKVLPSIGNEVLKAVVAQFNADQLLTERPHVSALVRESLITRAKDFNIVLDDVAITHLSYGVEFSRAVEQKQVAQQEAERSKFVVMKADQERRAAVIRAEGESEAAQLISDATAKAGMGLIELRRIEASREIASTLARSPNVAYLPGGQSMLFALNR

SEQ ID NO: 23922 - DNA, 1414 bp, Arabidopsis thaliana
  misc_feature (1)..(1414): Ceres Seq. ID no. 13500085
  misc_feature: MA Experiment ID: 108434 Result: Down-regulated in Transcription
  misc_feature: MA Experiment 108434 PARAMETER Experiment Name: At_Root_Tips_cDNA_P Parameter: Tissue Value: Root Tips
  misc_feature: MA Experiment ID: 108435 Result: Down-regulated in Transcription
  misc_feature: MA Experiment 108435 PARAMETER Experiment Name: At_stm_Mutants_cDNA_P Parameter: Plant Line Value: wt Landsburg vs stm
  misc_feature: MA Experiment 108435 PARAMETER Experiment Name: At_stm_Mutants_cDNA_P Parameter: Tissue Value: Shoot Apical Meristem Region
  misc_feature: MA Experiment ID: 108473 Result: Down-regulated in Transcription
  misc_feature: MA Experiment 108473 PARAMETER Experiment Name: At_Drought_Flowers_cDNA_P Parameter: Timepoint (hr) Value: 7 d
  misc_feature: MA Experiment 108473 PARAMETER Experiment Name: At_Drought_Flowers_cDNA_P Parameter: Tissue Value: Flower
  misc_feature: MA Experiment 108473 PARAMETER Experiment Name: At_Drought_Flowers_cDNA_P Parameter: Treatment Value: Drought vs. No Drought
  misc_feature: MA Experiment ID: 108488 Result: Down-regulated in Transcription
  misc_feature: MA Experiment ID: 108569 Result: Up-regulated in Transcription
  misc_feature: MA Experiment 108569 PARAMETER Experiment Name: At_0.001%_MeJA__cDNA_P Parameter: Timepoint (hr) Value: 6
  misc_feature: MA Experiment 108569 PARAMETER Experiment Name: At_0.001%_MeJA__cDNA_P Parameter: Tissue Value: Aerial
  misc_feature: MA Experiment 108569 PARAMETER Experiment Name: At_0.001%_MeJA__cDNA_P Parameter: Treatment Value: 0.001% MeJA vs. No Treatment
  misc_feature: MA Experiment ID: 108576 Result: Down-regulated in Transcription
  misc_feature: MA Experiment 108576 PARAMETER Experiment Name: At_42deg_Heat_cDNA_P Parameter: Temperature (deg C) Value: 42 vs. 22
  misc_feature: MA Experiment 108576 PARAMETER Experiment Name: At_42deg_Heat_cDNA_P Parameter: Timepoint (hr) Value: 1
  misc_feature: MA Experiment 108576 PARAMETER Experiment Name: At_42deg_Heat_cDNA_P Parameter: Tissue Value: Aerial
  misc_feature: MA Experiment ID: 108579 Result: Up-regulated in Transcription
  misc_feature: MA Experiment 108579 PARAMETER Experiment Name: At_4deg_Cold_cDNA_P Parameter: Temperature (deg C) Value: 4 vs. 22
  misc_feature: MA Experiment 108579 PARAMETER Experiment Name: At_4deg_Cold_cDNA_P Parameter: Timepoint (hr) Value: 6
  misc_feature: MA Experiment 108579 PARAMETER Experiment Name: At_4deg_Cold_cDNA_P Parameter: Tissue Value: Aerial
  misc_feature: MA Experiment ID: 108595 Result: Down-regulated in Transcription
  misc_feature: MA Experiment 108595 PARAMETER Experiment Name: At_Ler-pi_Ovule_cDNA_P Parameter: Plant Line Value: null
  misc_feature: MA Experiment ID: 108667 Result: Up-regulated in Transcription
  misc_feature: MA Experiment 108667 PARAMETER Experiment Name: At_2mM_SA_cDNA_P Parameter: Plant Line Value: WS
  misc_feature: MA Experiment 108667 PARAMETER Experiment Name: At_2mM_SA_cDNA_P Parameter: Timepoint (hr) Value: 1
  misc_feature: MA Experiment 108667 PARAMETER Experiment Name: At_2mM_SA_cDNA_P Parameter: Treatment Value: 2mM SA vs. No Treatment
  misc_feature: MA Experiment ID: 20000070 Result: Up-regulated in Transcription
  misc_feature: MA Experiment 20000070 PARAMETER Experiment Name: At_100uM_ABA_Mutants_cDNA_P Parameter: Plant Line Value: CS24
  misc_feature: MA Experiment 20000070 PARAMETER Experiment Name: At_100uM_ABA_Mutants_cDNA_P Parameter: Timepoint (hr) Value: 6
  misc_feature: MA Experiment 20000070 PARAMETER Experiment Name: At_100uM_ABA_Mutants_cDNA_P Parameter: Tissue Value: Aerial
  misc_feature: MA Experiment 20000070 PARAMETER Experiment Name: At_100uM_ABA_Mutants_cDNA_P Parameter: Treatment Value: 100uM ABA vs. No Treatment
  misc_feature: MA Experiment ID: 20000088 Result: Up-regulated in Transcription
  misc_feature: MA Experiment 20000088 PARAMETER Experiment Name: At_100uM_ABA_Mutants_cDNA_P Parameter: Plant Line Value: Landsberg
  misc_feature: MA Experiment 20000088 PARAMETER Experiment Name: At_100uM_ABA_Mutants_cDNA_P Parameter: Timepoint (hr) Value: 6
  misc_feature: MA Experiment 20000088 PARAMETER Experiment Name: At_100uM_ABA_Mutants_cDNA_P Parameter: Tissue Value: Aerial
  misc_feature: MA Experiment 20000088 PARAMETER Experiment Name: At_100uM_ABA_Mutants_cDNA_P Parameter: Treatment Value: 100uM ABA vs. No Treatment
  misc_feature: MA Experiment ID: 20000093 Result: Down-regulated in Transcription
  misc_feature: MA Experiment 20000093 PARAMETER Experiment Name: At_42deg_Heat_cDNA_P Parameter: Temperature (deg C) Value: 42 vs. 22
  misc_feature: MA Experiment 20000093 PARAMETER Experiment Name: At_42deg_Heat_cDNA_P Parameter: Timepoint (hr) Value: 0.5
  misc_feature: MA Experiment 20000093 PARAMETER Experiment Name: At_42deg_Heat_cDNA_P Parameter: Tissue Value: Aerial
  misc_feature: MA Experiment ID: 20000111 Result: Down-regulated in Transcription
  misc_feature: MA Experiment 20000111 PARAMETER Experiment Name: At_42deg_Heat_cDNA_P Parameter: Temperature (deg C) Value: 42 vs. 22
  misc_feature: MA Experiment 20000111 PARAMETER Experiment Name: At_42deg_Heat_cDNA_P Parameter: Timepoint (hr) Value: 6
  misc_feature: MA Experiment 20000111 PARAMETER Experiment Name: At_42deg_Heat_cDNA_P Parameter: Tissue Value: Aerial
  misc_feature: MA Experiment ID: 20000112 Result: Down-regulated in Transcription
  misc_feature: MA Experiment 20000112 PARAMETER Experiment Name: At_42deg_Heat_cDNA_P Parameter: Temperature (deg C) Value: 42 vs. 22
  misc_feature: MA Experiment 20000112 PARAMETER Experiment Name: At_42deg_Heat_cDNA_P Parameter: Timepoint (hr) Value: 2
  misc_feature: MA Experiment 20000112 PARAMETER Experiment Name: At_42deg_Heat_cDNA_P Parameter: Tissue Value: Aerial
  misc_feature: MA Experiment ID: 20000113 Result: Down-regulated in Transcription
  misc_feature: MA Experiment 20000113 PARAMETER Experiment Name: At_42deg_Heat_cDNA_P Parameter: Temperature (deg C) Value: 42 vs. 22
  misc_feature: MA Experiment 20000113 PARAMETER Experiment Name: At_42deg_Heat_cDNA_P Parameter: Timepoint (hr) Value: 8
  misc_feature: MA Experiment 20000113 PARAMETER Experiment Name: At_42deg_Heat_cDNA_P Parameter: Tissue Value: Aerial
  misc_feature: MA Experiment ID: 20000144 Result: Down-regulated in Transcription
  misc_feature: MA Experiment 20000144 PARAMETER Experiment Name: At_42deg_Heat_cDNA_P Parameter: Temperature (deg C) Value: 42 vs. 22
  misc_feature: MA Experiment 20000144 PARAMETER Experiment Name: At_42deg_Heat_cDNA_P Parameter: Timepoint (hr) Value: 1
  misc_feature: MA Experiment 20000144 PARAMETER Experiment Name: At_42deg_Heat_cDNA_P Parameter: Tissue Value: Aerial
  misc_feature: MA Experiment ID: 20000171 Result: Down-regulated in Transcription
  misc_feature: MA Experiment 20000171 PARAMETER Experiment Name: At_42deg_Heat_P Parameter: Age (day) Value: 14
  misc_feature: MA Experiment 20000171 PARAMETER Experiment Name: At_42deg_Heat_P Parameter: Organism Value: A. thaliana
  misc_feature: MA Experiment 20000171 PARAMETER Experiment Name: At_42deg_Heat_P Parameter: Plant Line Value: WS
  misc_feature: MA Experiment 20000171 PARAMETER Experiment Name: At_42deg_Heat_P Parameter: Temperature (deg C) Value: 42 vs. 22
  misc_feature: MA Experiment 20000171 PARAMETER Experiment Name: At_42deg_Heat_P Parameter: Timepoint (hr) Value: 1
  misc_feature: MA Experiment 20000171 PARAMETER Experiment Name: At_42deg_Heat_P Parameter: Tissue Value: Aerial
  misc_feature: MA Experiment ID: 20000173 Result: Down-regulated in Transcription
  misc_feature: MA Experiment 20000173 PARAMETER Experiment Name: At_42deg_Heat_P Parameter: Age (day) Value: 14
  misc_feature: MA Experiment 20000173 PARAMETER Experiment Name: At_42deg_Heat_P Parameter: Organism Value: A. thaliana
  misc_feature: MA Experiment 20000173 PARAMETER Experiment Name: At_42deg_Heat_P Parameter: Plant Line Value: WS
  misc_feature: MA Experiment 20000173 PARAMETER Experiment Name: At_42deg_Heat_P Parameter: Temperature (deg C) Value: 42 vs. 22
  misc_feature: MA Experiment 20000173 PARAMETER Experiment Name: At_42deg_Heat_P Parameter: Timepoint (hr) Value: 6
  misc_feature: MA Experiment 20000173 PARAMETER Experiment Name: At_42deg_Heat_P Parameter: Tissue Value: Aerial
  misc_feature: MA Experiment ID: 20000185 Result: Down-regulated in Transcription
  misc_feature: MA Experiment 20000185 PARAMETER Experiment Name: At_Roots__P Parameter: Age (day) Value: 7 vs. 21
  misc_feature: MA Experiment 20000185 PARAMETER Experiment Name: At_Roots__P Parameter: Organism Value: A. thaliana
  misc_feature: MA Experiment 20000185 PARAMETER Experiment Name: At_Roots__P Parameter: Tissue Value: Roots vs. Whole Plant
  misc_feature: MA Experiment ID: 20000213 Result: Up-regulated in Transcription
  misc_feature: MA Experiment 20000213 PARAMETER Experiment Name: At_4deg_Cold_P Parameter: Timepoint (hr) Value: 2
  misc_feature: MA Experiment ID: 20000224 Result: Up-regulated in Transcription
  misc_feature: MA Experiment ID: 20000234 Result: Down-regulated in Transcription
  misc_feature: MA Experiment 20000234 PARAMETER Experiment Name: At_Siliques_P Parameter: Age (day) Value: 21
  misc_feature: MA Experiment 20000234 PARAMETER Experiment Name: At_Siliques_P Parameter: Organism Value: A. thaliana
  misc_feature: MA Experiment 20000234 PARAMETER Experiment Name: At_Siliques_P Parameter: Plant Line Value: WS
  misc_feature: MA Experiment 20000234 PARAMETER Experiment Name: At_Siliques_P Parameter: Tissue Value: Less Than 5mm Siliques vs. Whole Plant
  misc_feature: MA Experiment ID: 20000235 Result: Down-regulated in Transcription
  misc_feature: MA Experiment 20000235 PARAMETER Experiment Name: At_Siliques_P Parameter: Age (day) Value: 21
  misc_feature: MA Experiment 20000235 PARAMETER Experiment Name: At_Siliques_P Parameter: Organism Value: A. thaliana
  misc_feature: MA Experiment 20000235 PARAMETER Experiment Name: At_Siliques_P Parameter: Plant Line Value: WS
  misc_feature: MA Experiment 20000235 PARAMETER Experiment Name: At_Siliques_P Parameter: Tissue Value: 5-10mm Siliques vs. Whole Plant
  misc_feature: MA Experiment ID: 20000439 Result: Down-regulated in Transcription
  misc_feature: MA Experiment 20000439 PARAMETER Experiment Name: At_Roots__P Parameter: Age (day) Value: 14 vs. 21
  misc_feature: MA Experiment 20000439 PARAMETER Experiment Name: At_Roots__P Parameter: Organism Value: A. thaliana
  misc_feature: MA Experiment 20000439 PARAMETER Experiment Name: At_Roots__P Parameter: Tissue Value: Roots vs. Whole Plant
  misc_feature: MA Experiment ID: 20000495 Result: Down-regulated in Transcription
  misc_feature: MA Experiment 20000495 PARAMETER Experiment Name: At_Guard_Cells_P Parameter: Harvest Date Value: 8/2/2002
  misc_feature: MA Experiment 20000495 PARAMETER Experiment Name: At_Guard_Cells_P Parameter: Organism Value: A. thaliana
  misc_feature: MA Experiment 20000495 PARAMETER Experiment Name: At_Guard_Cells_P Parameter: Tissue Value: Guard Cells vs. Leaves
  misc_feature: MA Experiment ID: 20001248 Result: Down-regulated in Transcription
  misc_feature: MA Experiment 20001248 PARAMETER Experiment Name: At_Far-red-induction_P Parameter: Age (day) Value: 7
  misc_feature: MA Experiment 20001248 PARAMETER Experiment Name: At_Far-red-induction_P Parameter: Light Value: Far-red vs. White
  misc_feature: MA Experiment 20001248 PARAMETER Experiment Name: At_Far-red-induction_P Parameter: Organism Value: A. thaliana
  misc_feature: MA Experiment 20001248 PARAMETER Experiment Name: At_Far-red-induction_P Parameter: Plant Line Value: Columbia
  misc_feature: MA Experiment 20001248 PARAMETER Experiment Name: At_Far-red-induction_P Parameter: Timepoint (hr) Value: 4
  misc_feature: MA Experiment 20001248 PARAMETER Experiment Name: At_Far-red-induction_P Parameter: Tissue Value: Whole Plant
  misc_feature: MA Experiment ID: 20001450 Result: Down-regulated in Transcription
  misc_feature: MA Experiment 20001450 PARAMETER Experiment Name: At_Far-red-induction_P Parameter: Age (day) Value: 7
  misc_feature: MA Experiment 20001450 PARAMETER Experiment Name: At_Far-red-induction_P Parameter: Light Value: Far-red vs. White
  misc_feature: MA Experiment 20001450 PARAMETER Experiment Name: At_Far-red-induction_P Parameter: Organism Value: A. thaliana
  misc_feature: MA Experiment 20001450 PARAMETER Experiment Name: At_Far-red-induction_P Parameter: Plant Line Value: Columbia
  misc_feature: MA Experiment 20001450 PARAMETER Experiment Name: At_Far-red-induction_P Parameter: Timepoint (hr) Value: 8
  misc_feature: MA Experiment 20001450 PARAMETER Experiment Name: At_Far-red-induction_P Parameter: Tissue Value: Whole Plant
  misc_feature: MA Experiment ID: 20001451 Result: Down-regulated in Transcription
  misc_feature: MA Experiment 20001451 PARAMETER Experiment Name: At_Far-red-induction_P Parameter: Age (day) Value: 7
  misc_feature: MA Experiment 20001451 PARAMETER Experiment Name: At_Far-red-induction_P Parameter: Light Value: Far-red vs. White
  misc_feature: MA Experiment 20001451 PARAMETER Experiment Name: At_Far-red-induction_P Parameter: Organism Value: A. thaliana
  misc_feature: MA Experiment 20001451 PARAMETER Experiment Name: At_Far-red-induction_P Parameter: Plant Line Value: Columbia
  misc_feature: MA Experiment 20001451 PARAMETER Experiment Name: At_Far-red-induction_P Parameter: Timepoint (hr) Value: 24
  misc_feature: MA Experiment 20001451 PARAMETER Experiment Name: At_Far-red-induction_P Parameter: Tissue Value: Whole Plant
  misc_feature: MA Experiment ID: 20001558 Result: Up-regulated in Transcription
  misc_feature: MA Experiment 20001558 PARAMETER Experiment Name: At_Drought_Soil_Dry_P Parameter: Age (day) Value: 27
  misc_feature: MA Experiment 20001558 PARAMETER Experiment Name: At_Drought_Soil_Dry_P Parameter: Organism Value: A. thaliana
  misc_feature: MA Experiment 20001558 PARAMETER Experiment Name: At_Drought_Soil_Dry_P Parameter: Plant Line Value: WS
  misc_feature: MA Experiment 20001558 PARAMETER Experiment Name: At_Drought_Soil_Dry_P Parameter: Post Timepoint (hr) Value: 6
  misc_feature: MA Experiment 20001558 PARAMETER Experiment Name: At_Drought_Soil_Dry_P Parameter: Post-Treatment Value: Re-Water vs. No Drought
  misc_feature: MA Experiment 20001558 PARAMETER Experiment Name: At_Drought_Soil_Dry_P Parameter: Timepoint (day) Value: 13
  misc_feature: MA Experiment 20001558 PARAMETER Experiment Name: At_Drought_Soil_Dry_P Parameter: Treatment Value: Drought vs. No Drought
  misc_feature: MA Experiment ID: 20001757 Result: Down-regulated in Transcription
  misc_feature: MA Experiment 20001757 PARAMETER Experiment Name: At_50mM_NH4NO3_L-to-H_P Parameter: Timepoint (hr) Value: 6
  misc_feature: MA Experiment 20001757 PARAMETER Experiment Name: At_50mM_NH4NO3_L-to-H_P Parameter: Tissue Value: Leaf
  misc_feature: MA Experiment 20001757 PARAMETER Experiment Name: At_50mM_NH4NO3_L-to-H_P Parameter: Treatment Value: 50mM NH4NO3 vs 100mM Mannitol
  misc_feature: MA Experiment ID: 20001761 Result: Down-regulated in Transcription
  misc_feature: MA Experiment 20001761 PARAMETER Experiment Name: At_50mM_NH4NO3_L-to-H_P Parameter: Timepoint (hr) Value: 4
  misc_feature: MA Experiment 20001761 PARAMETER Experiment Name: At_50mM_NH4NO3_L-to-H_P Parameter: Tissue Value: Siliques
  misc_feature: MA Experiment 20001761 PARAMETER Experiment Name: At_50mM_NH4NO3_L-to-H_P Parameter: Treatment Value: 50mM NH4NO3 vs 100mM Mannitol
aaaaaaaaaaaaaaaaataagatagaaactcactcctgacctctcgcatggcgtctctagactctctagtcatctttcttttttctactctttttgtcactatcgtgagctcggaaacgccgtgcccgaatttcaagtcgatcatcagtttcggcgattcgattgcggacacgggaaacttggttggtctctctgatcgtaaccagcttcctgtgactgcgtttccaccgtacggagaaaccttcttccaccacccaaccggtcgttcctgcgatggccgcatcatcatggactttatcgctgaatttgtggggcttccttatgtgcctccgtactttggatctaaaaatagaaactttgataagggtgttaatttcgcggtagccggagcaacggcactgaaaagttcctttcttaagaagagaggaattcaaccacacaccaacgttagtttaggagttcagctaaagagcttcaaaaagagtttaccaaatttatgcggctcaccatcagactgtagagatatgattggaaatgctttgattctcatgggagagattggagggaatgattataatttcccattcttcaaccgcaaacccgttaaggaagttgaagagctggttccatttgtaatcgcttctatttcttctacaataacggagttgattggtatggggggtaaaacctttctagtgcccggagagttccctatcggatgctcagtagtctatttgacattatacaaaacatcaaacaaggacgaatacgatccttcaacaggatgtttgaaatggttgaacaagtttggcgaataccatagcgagaaacttaaggtggaactcaacagacttaggaagctctaccctcatgtcaacatcatatacgctgactactacaactctctcttgcgcatttttaaagaaccagccaaattcgggttcatggaaagacccttccctgcttgttgcggtataggaggaccgtacaacttcaacttcactaggaaatgtgggagtgtaggagtgaaatcttgtaaggatccttcaaagtatgtgggctgggatggcgttcatatgactgaggctgcatacaaatggatagctgatggaatactcaatggaccatatgcgaatcctccttttgatcggtcctgcctcagatctgagattaagaaggagtcattgtacaatcaaagtactctgacacaagcttgtgtgaaactttgacagacaaaagtgatgataagaatattccctctattccttattaatccaaattcaagcaaacaaatttgttgcaaaaaagatatgtttctaggtttctatgtatttttttattacttattgatgatgaattgtagaccttaattttctttttcttttttacttttattggtttaaatttgttaacc

SEQ ID NO: 23923 - protein, 393 aa, Arabidopsis thaliana
  peptide (1)..(393): Ceres Seq. ID no. 13500086
  misc_feature (32)..(356): Pfam Name: GDSL-like Lipase/Acylhydrolase Pfam Description: GDSL-like Lipase/Acylhydrolase
  misc_feature (4)..(376): Homolog of NCBI NO: 15218725 NR Description: lipase, putative [Arabidopsis thaliana]
  misc_feature (1)..(380): Homolog of NCBI NO: 12597843 NR Description: lipase, putative [Arabidopsis thaliana]
  misc_feature (1)..(380): Homolog of NCBI NO: 30692564 NR Description: lipase, putative [Arabidopsis thaliana]
  misc_feature (1)..(380): Homolog of NCBI NO: 12322540 NR Description: unknown protein [Arabidopsis thaliana]
  misc_feature (1)..(393): Homolog of NCBI NO: 15218728 NR Description: lipase, putative [Arabidopsis thaliana]
  misc_feature (1)..(393): Homolog of NCBI NO: 10764858 NR Description: F1K23.17 [Arabidopsis thaliana]
  misc_feature (1)..(380): Homolog of NCBI NO: 25336243 NR Description: pnrotein F1K23.16 [imported] - Arabidopsis
  misc_feature (1)..(385): Homolog of NCBI NO: 10764858 NR Description: F1K23.17 [Arabidopsis thaliana]
  misc_feature (1)..(393): Homolog of NCBI NO: 21593234 NR Description: lipase, putative [Arabidopsis thaliana]
  misc_feature (1)..(393): Homolog of NCBI NO: 15218731 NR Description: lipase, putative [Arabidopsis thaliana]
MASLDSLVIFLFSTLFVTIVSSETPCPNFKSIISFGDSIADTGNLVGLSDRNQLPVTAFPPYGETFFHHPTGRSCDGRIIMDFIAEFVGLPYVPPYFGSKNRNFDKGVNFAVAGATALKSSFLKKRGIQPHTNVSLGVQLKSFKKSLPNLCGSPSDCRDMIGNALILMGEIGGNDYNFPFFNRKPVKEVEELVPFVIASISSTITELIGMGGKTFLVPGEFPIGCSVVYLTLYKTSNKDEYDPSTGCLKWLNKFGEYHSEKLKVELNRLRKLYPHVNIIYADYYNSLLRIFKEPAKFGFMERPFPACCGIGGPYNFNFTRKCGSVGVKSCKDPSKYVGWDGVHMTEAAYKWIADGILNGPYANPPFDRSCLRSEIKKESLYNQSTLTQACVKL

SEQ ID NO: 23924 - protein, 313 aa, Arabidopsis thaliana
  peptide (1)..(313): Ceres Seq. ID no. 13500087
  misc_feature (1)..(276): Pfam Name: GDSL-like Lipase/Acylhydrolase Pfam Description: GDSL-like Lipase/Acylhydrolase
  misc_feature (1)..(296): Homolog of NCBI NO: 15218725 NR Description: lipase, putative [Arabidopsis thaliana]
  misc_feature (1)..(300): Homolog of NCBI NO: 12597843 NR Description: lipase, putative [Arabidopsis thaliana]
  misc_feature (1)..(300): Homolog of NCBI NO: 30692564 NR Description: lipase, putative [Arabidopsis thaliana]
  misc_feature (1)..(300): Homolog of NCBI NO: 12322540 NR Description: unknown protein [Arabidopsis thaliana]
  misc_feature (1)..(313): Homolog of NCBI NO: 15218728 NR Description: lipase, putative [Arabidopsis thaliana]
  misc_feature (1)..(313): Homolog of NCBI NO: 10764858 NR Description: F1K23.17 [Arabidopsis thaliana]
  misc_feature (1)..(300): Homolog of NCBI NO: 25336243 NR Description: pnrotein F1K23.16 [imported] - Arabidopsis
  misc_feature (1)..(305): Homolog of NCBI NO: 10764858 NR Description: F1K23.17 [Arabidopsis thaliana]
  misc_feature (1)..(313): Homolog of NCBI NO: 21593234 NR Description: lipase, putative [Arabidopsis thaliana]
  misc_feature (1)..(313): Homolog of NCBI NO: 15218731 NR Description: lipase, putative [Arabidopsis thaliana]
MDFIAEFVGLPYVPPYFGSKNRNFDKGVNFAVAGATALKSSFLKKRGIQPHTNVSLGVQLKSFKKSLPNLCGSPSDCRDMIGNALILMGEIGGNDYNFPFFNRKPVKEVEELVPFVIASISSTITELIGMGGKTFLVPGEFPIGCSVVYLTLYKTSNKDEYDPSTGCLKWLNKFGEYHSEKLKVELNRLRKLYPHVNIIYADYYNSLLRIFKEPAKFGFMERPFPACCGIGGPYNFNFTRKCGSVGVKSCKDPSKYVGWDGVHMTEAAYKWIADGILNGPYANPPFDRSCLRSEIKKESLYNQSTLTQACVKL

SEQ ID NO: 23925 - protein, 234 aa, Arabidopsis thaliana
  peptide (1)..(234): Ceres Seq. ID no. 13500088
  misc_feature (1)..(197): Pfam Name: GDSL-like Lipase/Acylhydrolase Pfam Description: GDSL-like Lipase/Acylhydrolase
  misc_feature (1)..(221): Homolog of NCBI NO: 12597843 NR Description: lipase, putative [Arabidopsis thaliana]
  misc_feature (1)..(221): Homolog of NCBI NO: 30692564 NR Description: lipase, putative [Arabidopsis thaliana]
  misc_feature (1)..(221): Homolog of NCBI NO: 12322540 NR Description: unknown protein [Arabidopsis thaliana]
  misc_feature (1)..(234): Homolog of NCBI NO: 15218728 NR Description: lipase, putative [Arabidopsis thaliana]
  misc_feature (1)..(234): Homolog of NCBI NO: 10764858 NR Description: F1K23.17 [Arabidopsis thaliana]
  misc_feature (1)..(217): Homolog of NCBI NO: 15218725 NR Description: lipase, putative [Arabidopsis thaliana]
  misc_feature (1)..(221): Homolog of NCBI NO: 25336243 NR Description: pnrotein F1K23.16 [imported] - Arabidopsis
  misc_feature (1)..(226): Homolog of NCBI NO: 10764858 NR Description: F1K23.17 [Arabidopsis thaliana]
  misc_feature (1)..(234): Homolog of NCBI NO: 21593234 NR Description: lipase, putative [Arabidopsis thaliana]
  misc_feature (1)..(234): Homolog of NCBI NO: 15218731 NR Description: lipase, putative [Arabidopsis thaliana]
MIGNALILMGEIGGNDYNFPFFNRKPVKEVEELVPFVIASISSTITELIGMGGKTFLVPGEFPIGCSVVYLTLYKTSNKDEYDPSTGCLKWLNKFGEYHSEKLKVELNRLRKLYPHVNIIYADYYNSLLRIFKEPAKFGFMERPFPACCGIGGPYNFNFTRKCGSVGVKSCKDPSKYVGWDGVHMTEAAYKWIADGILNGPYANPPFDRSCLRSEIKKESLYNQSTLTQACVKL

SEQ ID NO: 23926 - DNA, 1399 bp, Arabidopsis thaliana
  misc_feature (1)..(1399): Ceres Seq. ID no. 12335393
  misc_feature: MA Experiment ID: 108462 Result: Down-regulated in Transcription
  misc_feature: MA Experiment 108462 PARAMETER Experiment Name: At_Germinating_Seeds_cDNA_P Parameter: Age (day) Value: 2 vs. 0
  misc_feature: MA Experiment 108462 PARAMETER Experiment Name: At_Germinating_Seeds_cDNA_P Parameter: Tissue Value: Germinating Seeds
  misc_feature: MA Experiment ID: 108463 Result: Down-regulated in Transcription
  misc_feature: MA Experiment 108463 PARAMETER Experiment Name: At_Germinating_Seeds_cDNA_P Parameter: Age (day) Value: 3 vs. 0
  misc_feature: MA Experiment 108463 PARAMETER Experiment Name: At_Germinating_Seeds_cDNA_P Parameter: Tissue Value: Germinating Seeds
  misc_feature: MA Experiment ID: 108464 Result: Down-regulated in Transcription
  misc_feature: MA Experiment 108464 PARAMETER Experiment Name: At_Germinating_Seeds_cDNA_P Parameter: Age (day) Value: 4 vs. 0
  misc_feature: MA Experiment 108464 PARAMETER Experiment Name: At_Germinating_Seeds_cDNA_P Parameter: Tissue Value: Germinating Seeds
  misc_feature: MA Experiment ID: 108474 Result: Down-regulated in Transcription
  misc_feature: MA Experiment 108474 PARAMETER Experiment Name: At_Drought_Flowers_cDNA_P Parameter: Timepoint (hr) Value: null
  misc_feature: MA Experiment 108474 PARAMETER Experiment Name: At_Drought_Flowers_cDNA_P Parameter: Treatment Value: Drought vs. No Drought
  misc_feature: MA Experiment ID: 108579 Result: Down-regulated in Transcription
  misc_feature: MA Experiment 108579 PARAMETER Experiment Name: At_4deg_Cold_cDNA_P Parameter: Temperature (deg C) Value: 4 vs. 22
  misc_feature: MA Experiment 108579 PARAMETER Experiment Name: At_4deg_Cold_cDNA_P Parameter: Timepoint (hr) Value: 6
  misc_feature: MA Experiment 108579 PARAMETER Experiment Name: At_4deg_Cold_cDNA_P Parameter: Tissue Value: Aerial
  misc_feature: MA Experiment ID: 108594 Result: Down-regulated in Transcription
  misc_feature: MA Experiment 108594 PARAMETER Experiment Name: At_Ler-rhl_Root_cDNA_P Parameter: Plant Line Value: null
  misc_feature: MA Experiment ID: 108595 Result: Up-regulated in Transcription
  misc_feature: MA Experiment 108595 PARAMETER Experiment Name: At_Ler-pi_Ovule_cDNA_P Parameter: Plant Line Value: null
  misc_feature: MA Experiment ID: 20000166 Result: Up-regulated in Transcription
  misc_feature: MA Experiment 20000166 PARAMETER Experiment Name: At_100uM_ABA_P Parameter: Age (day) Value: 14
  misc_feature: MA Experiment 20000166 PARAMETER Experiment Name: At_100uM_ABA_P Parameter: Organism Value: A. thaliana
  misc_feature: MA Experiment 20000166 PARAMETER Experiment Name: At_100uM_ABA_P Parameter: Plant Line Value: WS
  misc_feature: MA Experiment 20000166 PARAMETER Experiment Name: At_100uM_ABA_P Parameter: Timepoint (hr) Value: 1
  misc_feature: MA Experiment 20000166 PARAMETER Experiment Name: At_100uM_ABA_P Parameter: Tissue Value: Aerial
  misc_feature: MA Experiment 20000166 PARAMETER Experiment Name: At_100uM_ABA_P Parameter: Treatment Value: 100uM ABA vs. No Treatment
  misc_feature: MA Experiment ID: 20000182 Result: Up-regulated in Transcription
  misc_feature: MA Experiment 20000182 PARAMETER Experiment Name: At_2mM_SA_P Parameter: Age (day) Value: 14
  misc_feature: MA Experiment 20000182 PARAMETER Experiment Name: At_2mM_SA_P Parameter: Organism Value: A. thaliana
  misc_feature: MA Experiment 20000182 PARAMETER Experiment Name: At_2mM_SA_P Parameter: Plant Line Value: WS
  misc_feature: MA Experiment 20000182 PARAMETER Experiment Name: At_2mM_SA_P Parameter: Timepoint (hr) Value: 6
  misc_feature: MA Experiment 20000182 PARAMETER Experiment Name: At_2mM_SA_P Parameter: Tissue Value: Aerial
  misc_feature: MA Experiment 20000182 PARAMETER Experiment Name: At_2mM_SA_P Parameter: Treatment Value: 2mM SA vs. No Treatment
  misc_feature: MA Experiment ID: 20000185 Result: Up-regulated in Transcription
  misc_feature: MA Experiment 20000185 PARAMETER Experiment Name: At_Roots__P Parameter: Age (day) Value: 7 vs. 21
  misc_feature: MA Experiment 20000185 PARAMETER Experiment Name: At_Roots__P Parameter: Organism Value: A. thaliana
  misc_feature: MA Experiment 20000185 PARAMETER Experiment Name: At_Roots__P Parameter: Tissue Value: Roots vs. Whole Plant
  misc_feature: MA Experiment ID: 20000227 Result: Down-regulated in Transcription
  misc_feature: MA Experiment 20000227 PARAMETER Experiment Name: At_Root-Tips-vs-Tops_P Parameter: Tissue Value: Root Tips vs. Root Tops
  misc_feature: MA Experiment ID: 20000234 Result: Down-regulated in Transcription
  misc_feature: MA Experiment 20000234 PARAMETER Experiment Name: At_Siliques_P Parameter: Age (day) Value: 21
  misc_feature: MA Experiment 20000234 PARAMETER Experiment Name: At_Siliques_P Parameter: Organism Value: A. thaliana
  misc_feature: MA Experiment 20000234 PARAMETER Experiment Name: At_Siliques_P Parameter: Plant Line Value: WS
  misc_feature: MA Experiment 20000234 PARAMETER Experiment Name: At_Siliques_P Parameter: Tissue Value: Less Than 5mm Siliques vs. Whole Plant
  misc_feature: MA Experiment ID: 20000235 Result: Down-regulated in Transcription
  misc_feature: MA Experiment 20000235 PARAMETER Experiment Name: At_Siliques_P Parameter: Age (day) Value: 21
  misc_feature: MA Experiment 20000235 PARAMETER Experiment Name: At_Siliques_P Parameter: Organism Value: A. thaliana
  misc_feature: MA Experiment 20000235 PARAMETER Experiment Name: At_Siliques_P Parameter: Plant Line Value: WS
  misc_feature: MA Experiment 20000235 PARAMETER Experiment Name: At_Siliques_P Parameter: Tissue Value: 5-10mm Siliques vs. Whole Plant
  misc_feature: MA Experiment ID: 20000264 Result: Up-regulated in Transcription
  misc_feature: MA Experiment 20000264 PARAMETER Experiment Name: At_Open_Flower_P Parameter: Age (day) Value: 21
  misc_feature: MA Experiment 20000264 PARAMETER Experiment Name: At_Open_Flower_P Parameter: Plant Line Value: WS
  misc_feature: MA Experiment 20000264 PARAMETER Experiment Name: At_Open_Flower_P Parameter: Tissue Value: Open Flower vs. Whole Plant
  misc_feature: MA Experiment ID: 20000265 Result: Up-regulated in Transcription
  misc_feature: MA Experiment 20000265 PARAMETER Experiment Name: At_Open_Flower_P Parameter: Age (day) Value: 21
  misc_feature: MA Experiment 20000265 PARAMETER Experiment Name: At_Open_Flower_P Parameter: Plant Line Value: WS
  misc_feature: MA Experiment 20000265 PARAMETER Experiment Name: At_Open_Flower_P Parameter: Tissue Value: Closed Flower vs. Whole Plant
  misc_feature: MA Experiment ID: 20000286 Result: Up-regulated in Transcription
  misc_feature: MA Experiment 20000286 PARAMETER Experiment Name: At_Open_Flower_P Parameter: Age (day) Value: 21
  misc_feature: MA Experiment 20000286 PARAMETER Experiment Name: At_Open_Flower_P Parameter: Plant Line Value: WS
  misc_feature: MA Experiment 20000286 PARAMETER Experiment Name: At_Open_Flower_P Parameter: Tissue Value: Half Open vs. Whole Plant
  misc_feature: MA Experiment ID: 20000439 Result: Up-regulated in Transcription
  misc_feature: MA Experiment 20000439 PARAMETER Experiment Name: At_Roots__P Parameter: Age (day) Value: 14 vs. 21
  misc_feature: MA Experiment 20000439 PARAMETER Experiment Name: At_Roots__P Parameter: Organism Value: A. thaliana
  misc_feature: MA Experiment 20000439 PARAMETER Experiment Name: At_Roots__P Parameter: Tissue Value: Roots vs. Whole Plant
  misc_feature: MA Experiment ID: 20000453 Result: Up-regulated in Transcription
  misc_feature: MA Experiment 20000453 PARAMETER Experiment Name: At_100uM_ABA_P Parameter: Age (day) Value: 15
  misc_feature: MA Experiment 20000453 PARAMETER Experiment Name: At_100uM_ABA_P Parameter: Organism Value: A. thaliana
  misc_feature: MA Experiment 20000453 PARAMETER Experiment Name: At_100uM_ABA_P Parameter: Plant Line Value: WS
  misc_feature: MA Experiment 20000453 PARAMETER Experiment Name: At_100uM_ABA_P Parameter: Timepoint (hr) Value: 24
  misc_feature: MA Experiment 20000453 PARAMETER Experiment Name: At_100uM_ABA_P Parameter: Tissue Value: Aerial
  misc_feature: MA Experiment 20000453 PARAMETER Experiment Name: At_100uM_ABA_P Parameter: Treatment Value: 100uM ABA vs. No Treatment
  misc_feature: MA Experiment ID: 20000574 Result: Up-regulated in Transcription
  misc_feature: MA Experiment 20000574 PARAMETER Experiment Name: At_100uM_ABA_Mutants__P Parameter: Organism Value: A. thaliana
  misc_feature: MA Experiment 20000574 PARAMETER Experiment Name: At_100uM_ABA_Mutants__P Parameter: Plant Line Value: CS23 vs. Ler wt
  misc_feature: MA Experiment 20000574 PARAMETER Experiment Name: At_100uM_ABA_Mutants__P Parameter: Timepoint (hr) Value: N/A
  misc_feature: MA Experiment 20000574 PARAMETER Experiment Name: At_100uM_ABA_Mutants__P Parameter: Tissue Value: Whole Plant
  misc_feature: MA Experiment 20000574 PARAMETER Experiment Name: At_100uM_ABA_Mutants__P Parameter: Treatment Value: None
  misc_feature: MA Experiment ID: 20000794 Result: Up-regulated in Transcription
  misc_feature: MA Experiment 20000794 PARAMETER Experiment Name: At_Petals_P Parameter: Age (day) Value: 23-25 days
  misc_feature: MA Experiment 20000794 PARAMETER Experiment Name: At_Petals_P Parameter: Plant Line Value: WS
  misc_feature: MA Experiment 20000794 PARAMETER Experiment Name: At_Petals_P Parameter: Tissue Value: Petals vs. Whole plant
  misc_feature: MA Experiment ID: 20001904 Result: Up-regulated in Transcription
  misc_feature: MA Experiment 20001904 PARAMETER Experiment Name: At_Drought_Reproduction_P Parameter: Age (day) Value: 37
  misc_feature: MA Experiment 20001904 PARAMETER Experiment Name: At_Drought_Reproduction_P Parameter: Organism Value: A. thaliana
  misc_feature: MA Experiment 20001904 PARAMETER Experiment Name: At_Drought_Reproduction_P Parameter: Plant Line Value: WS
  misc_feature: MA Experiment 20001904 PARAMETER Experiment Name: At_Drought_Reproduction_P Parameter: Timepoint (day) Value: 7
  misc_feature: MA Experiment 20001904 PARAMETER Experiment Name: At_Drought_Reproduction_P Parameter: Tissue Value: Rosettes
  misc_feature: MA Experiment 20001904 PARAMETER Experiment Name: At_Drought_Reproduction_P Parameter: Treatment Value: Drought vs. No Drought
  misc_feature: MA Experiment ID: 20001905 Result: Up-regulated in Transcription
  misc_feature: MA Experiment 20001905 PARAMETER Experiment Name: At_Drought_Reproduction_P Parameter: Age (day) Value: 40
  misc_feature: MA Experiment 20001905 PARAMETER Experiment Name: At_Drought_Reproduction_P Parameter: Organism Value: A. thaliana
  misc_feature: MA Experiment 20001905 PARAMETER Experiment Name: At_Drought_Reproduction_P Parameter: Plant Line Value: WS
  misc_feature: MA Experiment 20001905 PARAMETER Experiment Name: At_Drought_Reproduction_P Parameter: Timepoint (day) Value: 10
  misc_feature: MA Experiment 20001905 PARAMETER Experiment Name: At_Drought_Reproduction_P Parameter: Tissue Value: Rosettes
  misc_feature: MA Experiment 20001905 PARAMETER Experiment Name: At_Drought_Reproduction_P Parameter: Treatment Value: Drought vs. No Drought
  misc_feature: MA Experiment ID: 20001906 Result: Up-regulated in Transcription
  misc_feature: MA Experiment 20001906 PARAMETER Experiment Name: At_Drought_Reproduction_P Parameter: Age (day) Value: 35
  misc_feature: MA Experiment 20001906 PARAMETER Experiment Name: At_Drought_Reproduction_P Parameter: Organism Value: A. thaliana
  misc_feature: MA Experiment 20001906 PARAMETER Experiment Name: At_Drought_Reproduction_P Parameter: Plant Line Value: WS
  misc_feature: MA Experiment 20001906 PARAMETER Experiment Name: At_Drought_Reproduction_P Parameter: Timepoint (day) Value: 5
  misc_feature: MA Experiment 20001906 PARAMETER Experiment Name: At_Drought_Reproduction_P Parameter: Tissue Value: Siliques
  misc_feature: MA Experiment 20001906 PARAMETER Experiment Name: At_Drought_Reproduction_P Parameter: Treatment Value: Drought vs. No Drought
  misc_feature: MA Experiment ID: 20001908 Result: Up-regulated in Transcription
  misc_feature: MA Experiment 20001908 PARAMETER Experiment Name: At_Drought_Reproduction_P Parameter: Age (day) Value: 40
  misc_feature: MA Experiment 20001908 PARAMETER Experiment Name: At_Drought_Reproduction_P Parameter: Organism Value: A. thaliana
  misc_feature: MA Experiment 20001908 PARAMETER Experiment Name: At_Drought_Reproduction_P Parameter: Plant Line Value: WS
  misc_feature: MA Experiment 20001908 PARAMETER Experiment Name: At_Drought_Reproduction_P Parameter: Timepoint (day) Value: 10
  misc_feature: MA Experiment 20001908 PARAMETER Experiment Name: At_Drought_Reproduction_P Parameter: Tissue Value: Siliques
  misc_feature: MA Experiment 20001908 PARAMETER Experiment Name: At_Drought_Reproduction_P Parameter: Treatment Value: Drought vs. No Drought
acctttctagttcctctgcgtctccttaatctctctccctaacttctctttcacctttactctctctatctctcttacatatatctatatatattccctgaacccatctcttgaaaacattcaagatcaaatctttctcgatctattcaaagaaaaactatttaagaaacatatgttttggatcaagtaagggtttgatcttgtaccggaatcaggtttttgcttttcttctagggtttaaggttatttaaaaacagatggaaactttcggtgtgtttcacaaggaagatgatgagcagatggatttgcctcctggttttaggtttcatccaacagacgaagaactcataacccactatctccacaagaaggttcttgaccttggtttctcggctaaagctattggtgaggttgatttgaacaaagctgagccatgggagttgccatataaagcaaaaattggtgagaaagaatggtactttttctgtgtgagggatagaaagtatccgactggtctgaggactaaccgagcaactcaagccggttattggaaggcgacagggaaggataaagaaatcttccgaggtaaatcgcttgttggtatgaagaaaacacttgttttctacagaggaagagctcctaaaggccagaaaacaaattgggtgatgcatgagtataggctagatggaaaactctctgctcacaacttgcctaaaaccgctaagaatgaatgggtgatctgcagggtatttcataaaactgctggaggtaagaagatcccgatttcgacgttaatccgaatcggttcttacggaaccgggtctagtttaccacctttaactgattcttcaccatacaacgacaaaaccaagaccgaaccagtttacgtgccctgcttctccaaccaagctgaaactagaggaacaatactcaattgcttcagcaacccttcccttagctccatccaaccagattttctccagatgattccactctaccaacctcaatctctcaacatttccgagagttccaatccggttcttacgcaagaacaatcagttttacaagcgatgatggaaaacaacagaaggcagaacttcaaaacattgagcatctcgcaagaaaccggggtttcgaacaccgataactcatcggtttttgaatttgggaggaagcgatttgatcatcaagaagttccatctccctcttccggtccggttgatcttgaacctttctggaattactgaagattcagaacctgaaaagtctattaatttaggtcacaagtaagaaaatctttgcaaagttttatccttttagcgtggtgtgctaagcttgtatagattattgacactacttcctgtattagtgttttatattattatattcaactaaagtt

SEQ ID NO: 23927 - protein, 329 aa, Arabidopsis thaliana
  peptide (1)..(329): Ceres Seq. ID no. 12335394
  misc_feature (17)..(143): Pfam Name: No apical meristem (NAM) protein Pfam Description: No apical meristem (NAM) protein
  misc_feature (15)..(329): Homolog of NCBI NO: 21537315 NR Description: NAM, no apical meristem,-like protein
  misc_feature (1)..(329): Homolog of NCBI NO: 15240252 NR Description: NAM, no apical meristem, - like protein
  misc_feature (15)..(329): Homolog of NCBI NO: 30682054 NR Description: NAM (no apical meristem)-related protein
  misc_feature (1)..(329): Homolog of NCBI NO: 30682048 NR Description: NAM (no apical meristem)-related protein
METFGVFHKEDDEQMDLPPGFRFHPTDEELITHYLHKKVLDLGFSAKAIGEVDLNKAEPWELPYKAKIGEKEWYFFCVRDRKYPTGLRTNRATQAGYWKATGKDKEIFRGKSLVGMKKTLVFYRGRAPKGQKTNWVMHEYRLDGKLSAHNLPKTAKNEWVICRVFHKTAGGKKIPISTLIRIGSYGTGSSLPPLTDSSPYNDKTKTEPVYVPCFSNQAETRGTILNCFSNPSLSSIQPDFLQMIPLYQPQSLNISESSNPVLTQEQSVLQAMMENNRRQNFKTLSISQETGVSNTDNSSVFEFGRKRFDHQEVPSPSSGPVDLEPFWNY

SEQ ID NO: 23928 - protein, 315 aa, Arabidopsis thaliana
  peptide (1)..(315): Ceres Seq. ID no. 12335395
  misc_feature (3)..(129): Pfam Name: No apical meristem (NAM) protein Pfam Description: No apical meristem (NAM) protein
  misc_feature (1)..(315): Homolog of NCBI NO: 21537315 NR Description: NAM, no apical meristem,-like protein
  misc_feature (1)..(315): Homolog of NCBI NO: 15240252 NR Description: NAM, no apical meristem, - like protein
  misc_feature (1)..(315): Homolog of NCBI NO: 30682054 NR Description: NAM (no apical meristem)-related protein
  misc_feature (1)..(315): Homolog of NCBI NO: 30682048 NR Description: NAM (no apical meristem)-related protein
MDLPPGFRFHPTDEELITHYLHKKVLDLGFSAKAIGEVDLNKAEPWELPYKAKIGEKEWYFFCVRDRKYPTGLRTNRATQAGYWKATGKDKEIFRGKSLVGMKKTLVFYRGRAPKGQKTNWVMHEYRLDGKLSAHNLPKTAKNEWVICRVFHKTAGGKKIPISTLIRIGSYGTGSSLPPLTDSSPYNDKTKTEPVYVPCFSNQAETRGTILNCFSNPSLSSIQPDFLQMIPLYQPQSLNISESSNPVLTQEQSVLQAMMENNRRQNFKTLSISQETGVSNTDNSSVFEFGRKRFDHQEVPSPSSGPVDLEPFWNY

SEQ ID NO: 23929 - protein, 214 aa, Arabidopsis thaliana
  peptide (1)..(214): Ceres Seq. ID no. 12335396
  misc_feature (1)..(214): Homolog of NCBI NO: 21537315 NR Description: NAM, no apical meristem,-like protein
  misc_feature (1)..(214): Homolog of NCBI NO: 15240252 NR Description: NAM, no apical meristem, - like protein
  misc_feature (1)..(214): Homolog of NCBI NO: 30682054 NR Description: NAM (no apical meristem)-related protein
  misc_feature (1)..(214): Homolog of NCBI NO: 30682048 NR Description: NAM (no apical meristem)-related protein
MKKTLVFYRGRAPKGQKTNWVMHEYRLDGKLSAHNLPKTAKNEWVICRVFHKTAGGKKIPISTLIRIGSYGTGSSLPPLTDSSPYNDKTKTEPVYVPCFSNQAETRGTILNCFSNPSLSSIQPDFLQMIPLYQPQSLNISESSNPVLTQEQSVLQAMMENNRRQNFKTLSISQETGVSNTDNSSVFEFGRKRFDHQEVPSPSSGPVDLEPFWNY

SEQ ID NO: 23930 - DNA, 1152 bp, Arabidopsis thaliana
  misc_feature (1)..(1152): Ceres Seq. ID no. 12337900
  misc_feature: MA Experiment ID: 20000180 Result: Up-regulated in Transcription
  misc_feature: MA Experiment 20000180 PARAMETER Experiment Name: At_Germinating_Seeds_P Parameter: Age (hr) Value: 24 vs. 0
  misc_feature: MA Experiment 20000180 PARAMETER Experiment Name: At_Germinating_Seeds_P Parameter: Tissue Value: Germinating Seeds
  misc_feature: MA Experiment ID: 20000185 Result: Down-regulated in Transcription
  misc_feature: MA Experiment 20000185 PARAMETER Experiment Name: At_Roots__P Parameter: Age (day) Value: 7 vs. 21
  misc_feature: MA Experiment 20000185 PARAMETER Experiment Name: At_Roots__P Parameter: Organism Value: A. thaliana
  misc_feature: MA Experiment 20000185 PARAMETER Experiment Name: At_Roots__P Parameter: Tissue Value: Roots vs. Whole Plant
  misc_feature: MA Experiment ID: 20000234 Result: Up-regulated in Transcription
  misc_feature: MA Experiment 20000234 PARAMETER Experiment Name: At_Siliques_P Parameter: Age (day) Value: 21
  misc_feature: MA Experiment 20000234 PARAMETER Experiment Name: At_Siliques_P Parameter: Organism Value: A. thaliana
  misc_feature: MA Experiment 20000234 PARAMETER Experiment Name: At_Siliques_P Parameter: Plant Line Value: WS
  misc_feature: MA Experiment 20000234 PARAMETER Experiment Name: At_Siliques_P Parameter: Tissue Value: Less Than 5mm Siliques vs. Whole Plant
  misc_feature: MA Experiment ID: 20000265 Result: Up-regulated in Transcription
  misc_feature: MA Experiment 20000265 PARAMETER Experiment Name: At_Open_Flower_P Parameter: Age (day) Value: 21
  misc_feature: MA Experiment 20000265 PARAMETER Experiment Name: At_Open_Flower_P Parameter: Plant Line Value: WS
  misc_feature: MA Experiment 20000265 PARAMETER Experiment Name: At_Open_Flower_P Parameter: Tissue Value: Closed Flower vs. Whole Plant
  misc_feature: MA Experiment ID: 20000286 Result: Up-regulated in Transcription
  misc_feature: MA Experiment 20000286 PARAMETER Experiment Name: At_Open_Flower_P Parameter: Age (day) Value: 21
  misc_feature: MA Experiment 20000286 PARAMETER Experiment Name: At_Open_Flower_P Parameter: Plant Line Value: WS
  misc_feature: MA Experiment 20000286 PARAMETER Experiment Name: At_Open_Flower_P Parameter: Tissue Value: Half Open vs. Whole Plant
  misc_feature: MA Experiment ID: 20000437 Result: Down-regulated in Transcription
  misc_feature: MA Experiment 20000437 PARAMETER Experiment Name: At_Drought_P Parameter: Age (day) Value: 8
  misc_feature: MA Experiment 20000437 PARAMETER Experiment Name: At_Drought_P Parameter: Organism Value: A. thaliana
  misc_feature: MA Experiment 20000437 PARAMETER Experiment Name: At_Drought_P Parameter: Plant Line Value: WS
  misc_feature: MA Experiment 20000437 PARAMETER Experiment Name: At_Drought_P Parameter: Timepoint (hr) Value: 24
  misc_feature: MA Experiment 20000437 PARAMETER Experiment Name: At_Drought_P Parameter: Tissue Value: Whole Plant
  misc_feature: MA Experiment 20000437 PARAMETER Experiment Name: At_Drought_P Parameter: Treatment Value: Drought vs. No Drought
  misc_feature: MA Experiment ID: 20000439 Result: Down-regulated in Transcription
  misc_feature: MA Experiment 20000439 PARAMETER Experiment Name: At_Roots__P Parameter: Age (day) Value: 14 vs. 21
  misc_feature: MA Experiment 20000439 PARAMETER Experiment Name: At_Roots__P Parameter: Organism Value: A. thaliana
  misc_feature: MA Experiment 20000439 PARAMETER Experiment Name: At_Roots__P Parameter: Tissue Value: Roots vs. Whole Plant
  misc_feature: MA Experiment ID: 20000495 Result: Up-regulated in Transcription
  misc_feature: MA Experiment 20000495 PARAMETER Experiment Name: At_Guard_Cells_P Parameter: Harvest Date Value: 8/2/2002
  misc_feature: MA Experiment 20000495 PARAMETER Experiment Name: At_Guard_Cells_P Parameter: Organism Value: A. thaliana
  misc_feature: MA Experiment 20000495 PARAMETER Experiment Name: At_Guard_Cells_P Parameter: Tissue Value: Guard Cells vs. Leaves
  misc_feature: MA Experiment ID: 20001248 Result: Down-regulated in Transcription
  misc_feature: MA Experiment 20001248 PARAMETER Experiment Name: At_Far-red-induction_P Parameter: Age (day) Value: 7
  misc_feature: MA Experiment 20001248 PARAMETER Experiment Name: At_Far-red-induction_P Parameter: Light Value: Far-red vs. White
  misc_feature: MA Experiment 20001248 PARAMETER Experiment Name: At_Far-red-induction_P Parameter: Organism Value: A. thaliana
  misc_feature: MA Experiment 20001248 PARAMETER Experiment Name: At_Far-red-induction_P Parameter: Plant Line Value: Columbia
  misc_feature: MA Experiment 20001248 PARAMETER Experiment Name: At_Far-red-induction_P Parameter: Timepoint (hr) Value: 4
  misc_feature: MA Experiment 20001248 PARAMETER Experiment Name: At_Far-red-induction_P Parameter: Tissue Value: Whole Plant
  misc_feature: MA Experiment ID: 20001555 Result: Down-regulated in Transcription
  misc_feature: MA Experiment 20001555 PARAMETER Experiment Name: At_Drought_Soil_Dry_P Parameter: Age (day) Value: 24
  misc_feature: MA Experiment 20001555 PARAMETER Experiment Name: At_Drought_Soil_Dry_P Parameter: Organism Value: A. thaliana
  misc_feature: MA Experiment 20001555 PARAMETER Experiment Name: At_Drought_Soil_Dry_P Parameter: Plant Line Value: WS
  misc_feature: MA Experiment 20001555 PARAMETER Experiment Name: At_Drought_Soil_Dry_P Parameter: Post Timepoint (hr) Value: None
  misc_feature: MA Experiment 20001555 PARAMETER Experiment Name: At_Drought_Soil_Dry_P Parameter: Post-Treatment Value: None
  misc_feature: MA Experiment 20001555 PARAMETER Experiment Name: At_Drought_Soil_Dry_P Parameter: Timepoint (day) Value: 10
  misc_feature: MA Experiment 20001555 PARAMETER Experiment Name: At_Drought_Soil_Dry_P Parameter: Treatment Value: Drought vs. No Drought
atcttaaaaagtaaaaacacattcatctatccaacaaaaaaaaaaaaaaaaaggagaaatggaaggaatcgatcatagaatggtgagtgtcaatggcataactatgcacattgccgagaaaggtcccaaagaaggacctgtggtgcttctcctccatggattccctgatctcgtacacgtggcgtcaccagattagtgggttatcatctctaggttaccgcgctgtagctccagacctccgaggctacggagactctgattcgccagagtctttctccgagtacacgtgtcttaacgtcgttggggacctcgtagctcttctggacagtgttgctggaaatcagagaaggtgtttctggtcggtcatgattggggagccattatcggatggtttctctgtttgtttcgacctgaaaagattaacggctttgtgtgtttgagtgtgccgtatagatcaaggaaaccctaaagtcaagcccgttcaagggttcaaggctgtatttggagatgattactacatttgtagatttcaggaaccggggaagattgaaggagagattgcaagtgcagatccaagaatatttctgaggaacctcttcacagggaggacactcggtccgccgattttacctaaggataatccctttggggaaaaacctaaccctaatagcgaaaacattgaattgcctgaatggttttctaagaaagatctcgatttctatgtctccaaattcgagaaggcaggatttaccggtggattgaactactacagagccatggatctgaattgggagctcactgcaccatggaccggagctaagattcaagttccagtgaagttcatgacaggtgacttcaacatggtttacaccacaccagggatgaaagagtacattcacggtggtggatttgctgcagatgttccaactcttcaagagatagtggtgattgaagatgctggtcacttcgttaaccaagagaaacctcaagaggtcactgctcacatcaatgacttcttcaccaatcttcgggacaacaacaaaagcttttagagttctcgtttggttctattatgttggctctcaaaacaagttggttcttgcatgtgttgtttcgacaagattttgaataagacttggcattatgaagccc

SEQ ID NO: 23931 - protein, 94 aa, Arabidopsis thaliana
  peptide (1)..(94): Ceres Seq. ID no. 12337901
  misc_feature (21)..(94): Pfam Name: alpha/beta hydrolase fold Pfam Description: alpha/beta hydrolase fold
  misc_feature (7)..(94): Homolog of NCBI NO: 15230018 NR Description: putative epoxide hydrolase
MDSLISYTWRHQISGLSSLGYRAVAPDLRGYGDSDSPESFSEYTCLNVVGDLVALLDSVAGNQRRCFWSVMIGEPLSDGFSVCFDLKRLTALCV

SEQ ID NO: 23932 - protein, 91 aa, Arabidopsis thaliana
  peptide (1)..(91): Ceres Seq. ID no. 12337902
  misc_feature (1)..(79): Pfam Name: alpha/beta hydrolase fold Pfam Description: alpha/beta hydrolase fold
  misc_feature (1)..(91): Homolog of NCBI NO: 15230018 NR Description: putative epoxide hydrolase
MDLNWELTAPWTGAKIQVPVKFMTGDFNMVYTTPGMKEYIHGGGFAADVPTLQEIVVIEDAGHFVNQEKPQEVTAHINDFFTNLRDNNKSF

SEQ ID NO: 23933 - protein, 69 aa, Arabidopsis thaliana
  peptide (1)..(69): Ceres Seq. ID no. 12337903
  misc_feature (1)..(57): Pfam Name: alpha/beta hydrolase fold Pfam Description: alpha/beta hydrolase fold
  misc_feature (1)..(69): Homolog of NCBI NO: 15230018 NR Description: putative epoxide hydrolase
MTGDFNMVYTTPGMKEYIHGGGFAADVPTLQEIVVIEDAGHFVNQEKPQEVTAHINDFFTNLRDNNKSF

SEQ ID NO: 23934 - DNA, 1236 bp, Arabidopsis thaliana
  misc_feature (1)..(1236): Ceres Seq. ID no. 12384820
  misc_feature: MA Experiment ID: 108434 Result: Up-regulated in Transcription
  misc_feature: MA Experiment 108434 PARAMETER Experiment Name: At_Root_Tips_cDNA_P Parameter: Tissue Value: Root Tips
  misc_feature: MA Experiment ID: 108573 Result: Up-regulated in Transcription
  misc_feature: MA Experiment 108573 PARAMETER Experiment Name: At_Drought_cDNA_P Parameter: Timepoint (hr) Value: 6
  misc_feature: MA Experiment 108573 PARAMETER Experiment Name: At_Drought_cDNA_P Parameter: Tissue Value: Aerial
  misc_feature: MA Experiment 108573 PARAMETER Experiment Name: At_Drought_cDNA_P Parameter: Treatment Value: Drought vs. No Drought
  misc_feature: MA Experiment ID: 108579 Result: Down-regulated in Transcription
  misc_feature: MA Experiment 108579 PARAMETER Experiment Name: At_4deg_Cold_cDNA_P Parameter: Temperature (deg C) Value: 4 vs. 22
  misc_feature: MA Experiment 108579 PARAMETER Experiment Name: At_4deg_Cold_cDNA_P Parameter: Timepoint (hr) Value: 6
  misc_feature: MA Experiment 108579 PARAMETER Experiment Name: At_4deg_Cold_cDNA_P Parameter: Tissue Value: Aerial
  misc_feature: MA Experiment ID: 20000224 Result: Down-regulated in Transcription
acaacttttatattttactctgctgcttcgagatcaacgcattaaaagtaatggggtacattaagaatatttcgattttaaggggttgaagttgtaattttgaagaagtggaagatcaatcaaaaataatagaagaacagagacgacgaaacctgccggagaactgaggagagaaaaaaccccggcgaaaaagggaaattcgaattcgtcttctgttgatcattgcttcacttctgcttccagagcttttactcagaagaagctcgctgatctcaaatctctctttgtttccctcgcttccaagtctcagagcaatgaccaatacgtctcgtaccctgttttccaggagtattttggtctgagtggttctttaggagaaaggatctttgatatggttactcaacacaggaaagatgataaaatgacttttgaagatcttgttattgctaaggcaacatacgagaaaggaactgatgatgagattgctgagtttatttaccagactttggatgttaatggcaatggggtcttgagaaggtctgatttagagtcgttcctggtggtgattttgaagagtgtgttctccactgagagttctgatgcggaatcaagtgattacaaggagatggtagatgcgctactcgatgccgctactttctcaaaatctgatgatggttctgaaaaaggaatgtcttttgaagacttcagaagctggtgcccactcgttccaactatcagaaagttcctcggcagcttgcttattcccccgggtccagtgagacctggatatcaagtcccggatctgctatatgaagatagtgtgagttcagataggctactattaaagaaggaatacgcttggcatattggaggagctcttcctcaccacgagcttgtagagtggaagctgttgtatcgcagttccttacacggtcaaagcttcaacacattcctcggacacacatcggggatggagggatcgaacatggcctgatggatggactgcagttaccgcagatggaaaacgcagcgctcagtttgagcataccctattggtaactgagactggtgttgaggttttaacagcgaggcttccttcatcgcctgacgtatacccttggcttaccaagtgattaagtgtttggttcctttttggttgtgattcattgggtttgattcttaaacttgggaataatagtgtcatctttttgccattatagaccatttgatgttgtt

SEQ ID NO: 23935 - protein, 200 aa, Arabidopsis thaliana
  peptide (1)..(200): Ceres Seq. ID no. 12384821
  misc_feature (1)..(24): Homolog of NCBI NO: 25408950 NR Description: hypothetical protein At2g45380 [imported] -
  misc_feature (1)..(24): Homolog of NCBI NO: 30690004 NR Description: hypothetical protein [Arabidopsis thaliana]
  misc_feature (79)..(200): Homolog of NCBI NO: 17065420 NR Description: Unknown protein [Arabidopsis thaliana]
  misc_feature (1)..(128): Homolog of NCBI NO: 7486284 NR Description: hypothetical protein F28A23.170 - Arabidopsis
  misc_feature (1)..(197): Homolog of NCBI NO: 15239986 NR Description: putative protein
  misc_feature (1)..(200): Homolog of NCBI NO: 22329148 NR Description: putative protein; protein id: At4g34070.1
MVTQHRKDDKMTFEDLVIAKATYEKGTDDEIAEFIYQTLDVNGNGVLRRSDLESFLVVILKSVFSTESSDAESSDYKEMVDALLDAATFSKSDDGSEKGMSFEDFRSWCPLVPTIRKFLGSLLIPPGPVRPGYQVPDLLYEDSVSSDRLLLKKEYAWHIGGALPHHELVEWKLLYRSSLHGQSFNTFLGHTSGMEGSNMA

SEQ ID NO: 23936 - protein, 190 aa, Arabidopsis thaliana
  peptide (1)..(190): Ceres Seq. ID no. 12384822
  misc_feature (1)..(14): Homolog of NCBI NO: 25408950 NR Description: hypothetical protein At2g45380 [imported] -
  misc_feature (1)..(14): Homolog of NCBI NO: 30690004 NR Description: hypothetical protein [Arabidopsis thaliana]
  misc_feature (69)..(190): Homolog of NCBI NO: 17065420 NR Description: Unknown protein [Arabidopsis thaliana]
  misc_feature (1)..(118): Homolog of NCBI NO: 7486284 NR Description: hypothetical protein F28A23.170 - Arabidopsis
  misc_feature (1)..(187): Homolog of NCBI NO: 15239986 NR Description: putative protein
  misc_feature (1)..(190): Homolog of NCBI NO: 22329148 NR Description: putative protein; protein id: At4g34070.1
MTFEDLVIAKATYEKGTDDEIAEFIYQTLDVNGNGVLRRSDLESFLVVILKSVFSTESSDAESSDYKEMVDALLDAATFSKSDDGSEKGMSFEDFRSWCPLVPTIRKFLGSLLIPPGPVRPGYQVPDLLYEDSVSSDRLLLKKEYAWHIGGALPHHELVEWKLLYRSSLHGQSFNTFLGHTSGMEGSNMA

SEQ ID NO: 23937 - protein, 122 aa, Arabidopsis thaliana
  peptide (1)..(122): Ceres Seq. ID no. 12384823
  misc_feature (1)..(122): Homolog of NCBI NO: 17065420 NR Description: Unknown protein [Arabidopsis thaliana]
  misc_feature (1)..(50): Homolog of NCBI NO: 7486284 NR Description: hypothetical protein F28A23.170 - Arabidopsis
  misc_feature (1)..(119): Homolog of NCBI NO: 15239986 NR Description: putative protein
  misc_feature (1)..(122): Homolog of NCBI NO: 22329148 NR Description: putative protein; protein id: At4g34070.1
MVDALLDAATFSKSDDGSEKGMSFEDFRSWCPLVPTIRKFLGSLLIPPGPVRPGYQVPDLLYEDSVSSDRLLLKKEYAWHIGGALPHHELVEWKLLYRSSLHGQSFNTFLGHTSGMEGSNMA

SEQ ID NO: 23938 - DNA, 2217 bp, Arabidopsis thaliana
  misc_feature (1)..(2217): Ceres Seq. ID no. 13497123
  misc_feature: MA Experiment ID: 108595 Result: Up-regulated in Transcription
  misc_feature: MA Experiment 108595 PARAMETER Experiment Name: At_Ler-pi_Ovule_cDNA_P Parameter: Plant Line Value: null
gcaaccccataaacaattcctcaagagccgttgacaaaccaaaaaacttgttaattaaaagtcaatatttgctctagaccctccaattttccgtaaaaatctccataaaagtctctgtccctccttgccaaccaaaaactacaaacacacatcatccttcgactatcttattcatagctatcaccacccaaaaaagaaatcaccctaatcaaaaaaaaaaaggcaaggagagattttatcattattctattttcatattttttgaaaaaactcaagcaattgacttttgtgataaagatttgaagaaagagatgaggaacgaaacgggtggtaccatggtcgttgatctccaaaccgatccatataacaacattcacagtcgccataatctgagctacgaccttagcgagggtcccaaacctaggcctaaatttggtaatatctcgaaaactgaccacgacgagatattccctcccgacgatcccatcattatcaacagcaacgtgactcaccagcggtttagcagcgtctcggcctcgaccatgagcagcggtccggccagcggagaaggttctccttgcgtaatgtcgccttgggcccgcgtgtcgcctccttggggtgcagatttcaacgaagacaatgtcctcgagaccaacggtctcattggatctattgttagaaaagaagggcatatatactcgctagccgcttctggtgaccttctctacacgggctcggattcgaagaacattagggtttggaagaatttgaaggaacacgctgggtttaaatccagtagtgggctaatcaaggccattgtgatattcggagaccgaatctttaccggccatcaagacgggaagatccggatttggaaggtttcgaagagaaaaccaggaaaacataagcgggttggaacattgccaacatttaaatcaatggtcaagagctccgtcaaccctaagcatttcatggaggtacgccgcaacagaaactctgtgaagacgaagcataacgacgcagtgtctagtcttagcttggacgtggagcttggattgttgtactcgagttcttgggacacgacaatcaaagtgtggagaatcgcggattcaaaatgtttggaatcgatacatgcacacgatgacgcgataaactctgtaatgtccggttttgatgacttggtgttcacgggatccgcagatggtactgttaaagtgtggaaacgtgagttgcaaggcaaaggaacaaaacatacgttagctcaagttttgctcaagcaagaaaatgcggtcacggcgttggccgtaaaatcacaatcttccatcgtatattgcggttcttcggacgggctagtgaactattgggagcgttcaaagcggtcattcacaggcggaatactcaaaggccacaaatccgcagtgctttgtctaggtatagcggggaacttgctgttgagtggttccgccgacaagaacatatgcgtatggaggcgggacccgtctgacaagtcccatcagtgtctctctgttttgacgggacacatggggccggtcaagtgcctagccgtggaggaggaacgggcttgtcatcagggagcaaaagcctcagtggccgagggagaccggaagtggattatatacagcggaagtttggacaagtcggtgaaagtgtggcgcgtgtcggagagaatggccacgtggaaggagatggacgagccagcagcatcttcagagcggaagagctcttcgtctccgcatgaaggaagtggcgcgtggagttcacgcaatgtggaaaaataagagtggaggagcatagtgtgattatttacgagagtgtcacgtcgtcacgagagccatattcacgccgggaaagagacagaggattgatttcatttttatgactaagtcaacggagaggtttgtgccacgctagctggtgtgagaatcaaagtcgggttaatggttttcacgtaatgagttttttggttatttttttctttaaaaaaaatgtttgaaacgaaattgaattatttatttattttccataaatttgtaagataacaagaacaaagaccgaatcaaacatatatatttgttttctttagtggtctatgtcgtggttgcaactttataacttgggaattttggatgagtcgttttcctcttcattagaattagtctttctatattattataatataggatgttgatatttttc

SEQ ID NO: 23939 - protein, 495 aa, Arabidopsis thaliana
  peptide (1)..(495): Ceres Seq. ID no. 13497124
  misc_feature (71)..(459): Homolog of NCBI NO: 15231088 NR Description: transducin / WD-40 repeat protein family
  misc_feature (118)..(457): Homolog of NCBI NO: 15221675 NR Description: transducin / WD-40 repeat protein family
  misc_feature (115)..(456): Homolog of NCBI NO: 15220271 NR Description: transducin / WD-40 repeat protein family
  misc_feature (57)..(458): Homolog of NCBI NO: 15229740 NR Description: transducin / WD-40 repeat protein family
  misc_feature (117)..(458): Homolog of NCBI NO: 31126785 NR Description: putative WD repeat-protein
  misc_feature (37)..(490): Homolog of NCBI NO: 15225317 NR Description: transducin / WD-40 repeat protein family
  misc_feature (7)..(458): Homolog of NCBI NO: 17979259 NR Description: At1g49450/F13F21_11 [Arabidopsis thaliana]
  misc_feature (7)..(458): Homolog of NCBI NO: 15222143 NR Description: transducin / WD-40 repeat protein family
  misc_feature (16)..(462): Homolog of NCBI NO: 15230244 NR Description: transducin / WD-40 repeat protein family
  misc_feature (1)..(495): Homolog of NCBI NO: 15235354 NR Description: transducin / WD-40 repeat protein family
MRNETGGTMVVDLQTDPYNNIHSRHNLSYDLSEGPKPRPKFGNISKTDHDEIFPPDDPIIINSNVTHQRFSSVSASTMSSGPASGEGSPCVMSPWARVSPPWGADFNEDNVLETNGLIGSIVRKEGHIYSLAASGDLLYTGSDSKNIRVWKNLKEHAGFKSSSGLIKAIVIFGDRIFTGHQDGKIRIWKVSKRKPGKHKRVGTLPTFKSMVKSSVNPKHFMEVRRNRNSVKTKHNDAVSSLSLDVELGLLYSSSWDTTIKVWRIADSKCLESIHAHDDAINSVMSGFDDLVFTGSADGTVKVWKRELQGKGTKHTLAQVLLKQENAVTALAVKSQSSIVYCGSSDGLVNYWERSKRSFTGGILKGHKSAVLCLGIAGNLLLSGSADKNICVWRRDPSDKSHQCLSVLTGHMGPVKCLAVEEERACHQGAKASVAEGDRKWIIYSGSLDKSVKVWRVSERMATWKEMDEPAASSERKSSSSPHEGSGAWSSRNVEK

SEQ ID NO: 23940 - protein, 487 aa, Arabidopsis thaliana
  peptide (1)..(487): Ceres Seq. ID no. 13497125
  misc_feature (63)..(451): Homolog of NCBI NO: 15231088 NR Description: transducin / WD-40 repeat protein family
  misc_feature (110)..(449): Homolog of NCBI NO: 15221675 NR Description: transducin / WD-40 repeat protein family
  misc_feature (107)..(448): Homolog of NCBI NO: 15220271 NR Description: transducin / WD-40 repeat protein family
  misc_feature (49)..(450): Homolog of NCBI NO: 15229740 NR Description: transducin / WD-40 repeat protein family
  misc_feature (109)..(450): Homolog of NCBI NO: 31126785 NR Description: putative WD repeat-protein
  misc_feature (29)..(482): Homolog of NCBI NO: 15225317 NR Description: transducin / WD-40 repeat protein family
  misc_feature (1)..(450): Homolog of NCBI NO: 17979259 NR Description: At1g49450/F13F21_11 [Arabidopsis thaliana]
  misc_feature (1)..(450): Homolog of NCBI NO: 15222143 NR Description: transducin / WD-40 repeat protein family
  misc_feature (8)..(454): Homolog of NCBI NO: 15230244 NR Description: transducin / WD-40 repeat protein family
  misc_feature (1)..(487): Homolog of NCBI NO: 15235354 NR Description: transducin / WD-40 repeat protein family
MVVDLQTDPYNNIHSRHNLSYDLSEGPKPRPKFGNISKTDHDEIFPPDDPIIINSNVTHQRFSSVSASTMSSGPASGEGSPCVMSPWARVSPPWGADFNEDNVLETNGLIGSIVRKEGHIYSLAASGDLLYTGSDSKNIRVWKNLKEHAGFKSSSGLIKAIVIFGDRIFTGHQDGKIRIWKVSKRKPGKHKRVGTLPTFKSMVKSSVNPKHFMEVRRNRNSVKTKHNDAVSSLSLDVELGLLYSSSWDTTIKVWRIADSKCLESIHAHDDAINSVMSGFDDLVFTGSADGTVKVWKRELQGKGTKHTLAQVLLKQENAVTALAVKSQSSIVYCGSSDGLVNYWERSKRSFTGGILKGHKSAVLCLGIAGNLLLSGSADKNICVWRRDPSDKSHQCLSVLTGHMGPVKCLAVEEERACHQGAKASVAEGDRKWIIYSGSLDKSVKVWRVSERMATWKEMDEPAASSERKSSSSPHEGSGAWSSRNVEK

SEQ ID NO: 23941 - protein, 418 aa, Arabidopsis thaliana
  peptide (1)..(418): Ceres Seq. ID no. 13497126
  misc_feature (1)..(382): Homolog of NCBI NO: 15231088 NR Description: transducin / WD-40 repeat protein family
  misc_feature (41)..(380): Homolog of NCBI NO: 15221675 NR Description: transducin / WD-40 repeat protein family
  misc_feature (38)..(379): Homolog of NCBI NO: 15220271 NR Description: transducin / WD-40 repeat protein family
  misc_feature (1)..(381): Homolog of NCBI NO: 15229740 NR Description: transducin / WD-40 repeat protein family
  misc_feature (40)..(381): Homolog of NCBI NO: 31126785 NR Description: putative WD repeat-protein
  misc_feature (1)..(413): Homolog of NCBI NO: 15225317 NR Description: transducin / WD-40 repeat protein family
  misc_feature (1)..(381): Homolog of NCBI NO: 17979259 NR Description: At1g49450/F13F21_11 [Arabidopsis thaliana]
  misc_feature (1)..(381): Homolog of NCBI NO: 15222143 NR Description: transducin / WD-40 repeat protein family
  misc_feature (1)..(385): Homolog of NCBI NO: 15230244 NR Description: transducin / WD-40 repeat protein family
  misc_feature (1)..(418): Homolog of NCBI NO: 15235354 NR Description: transducin / WD-40 repeat protein family
MSSGPASGEGSPCVMSPWARVSPPWGADFNEDNVLETNGLIGSIVRKEGHIYSLAASGDLLYTGSDSKNIRVWKNLKEHAGFKSSSGLIKAIVIFGDRIFTGHQDGKIRIWKVSKRKPGKHKRVGTLPTFKSMVKSSVNPKHFMEVRRNRNSVKTKHNDAVSSLSLDVELGLLYSSSWDTTIKVWRIADSKCLESIHAHDDAINSVMSGFDDLVFTGSADGTVKVWKRELQGKGTKHTLAQVLLKQENAVTALAVKSQSSIVYCGSSDGLVNYWERSKRSFTGGILKGHKSAVLCLGIAGNLLLSGSADKNICVWRRDPSDKSHQCLSVLTGHMGPVKCLAVEEERACHQGAKASVAEGDRKWIIYSGSLDKSVKVWRVSERMATWKEMDEPAASSERKSSSSPHEGSGAWSSRNVEK

SEQ ID NO: 23942 - DNA, 1182 bp, Arabidopsis thaliana
  misc_feature (1)..(1182): Ceres Seq. ID no. 12738321
  misc_feature: MA Experiment ID: 108573 Result: Up-regulated in Transcription
  misc_feature: MA Experiment 108573 PARAMETER Experiment Name: At_Drought_cDNA_P Parameter: Timepoint (hr) Value: 6
  misc_feature: MA Experiment 108573 PARAMETER Experiment Name: At_Drought_cDNA_P Parameter: Tissue Value: Aerial
  misc_feature: MA Experiment 108573 PARAMETER Experiment Name: At_Drought_cDNA_P Parameter: Treatment Value: Drought vs. No Drought
  misc_feature: MA Experiment ID: 108595 Result: Down-regulated in Transcription
  misc_feature: MA Experiment 108595 PARAMETER Experiment Name: At_Ler-pi_Ovule_cDNA_P Parameter: Plant Line Value: null
  misc_feature: MA Experiment ID: 20000224 Result: Down-regulated in Transcription
ctcgtctctaagcagtagcagatctgagttttggagagttcaaaggaagaagataactccaataccagagtgaaagcattcaggaaacatgcctcctcagaagattgaaactggtcatagcgacactattcatgatgtggtcatggattactatggaaagcgagtagcaactgcctcgtctgactgcacgatcaagataaccggagtaagcaacagcggtggatctcagcatctagctaccttaaccggtcatcgaggtcctgtctggcaagtcgcttgggcgcacccaaagtttggttcacttctcgcttcatgttcctatgatgggcaaattatattatggaaagaaggtaaccaaaaccaatggacacaagctcatgtcttcacagaccacaaagtatctgtcaactctatcgcttgggctcctcatgaacttggactctccttagcttgcggagcatctgatggaaacatatcagttttctcggctcgagctgatggcggttgggacacgacaaagatagaccaagcacaccctgttggtgtcacttcagtgtcgtgggcaccggccacagaaccaggcgcactcgttagctctggtatgatcgatccggtctacaaactagcatccggcgggtgtgatagcacggtgaaagtgtggaagttctcgaacgggtcatggaaaatggattgtttcccggctctcaacaagcacacggattgggtccgtgatgtggcttgggcaccgaacttgggtctcccaaagtcaaccatagccagtggttcagaagatgggaaagtgatcatatggaccatagggaaaggtgagcaatgggaaggtactgttttgaaagatttcaaaacaccagtgtggcgggtctcgtggtcgttgaccgctaatttgttggctgtttccgatgggaacaataacgttacagtgtggaaagagtctgttgatggagagtgggaacaagtgactgttgttgagccatagattgttgtttgtttgtttggttatcttttgttttgtggtaatatcaaaatgtggtgtgttctgtatacaatttctagggacctgtttctctctatacgtttctcaggaaagtatattcttatgtattttaatcagacaacagagattgcaaaagaaatgtatttttcataaaactttttaattccgat

SEQ ID NO: 23943 - protein, 301 aa, Arabidopsis thaliana
  peptide (1)..(301): Ceres Seq. ID no. 12738322
  misc_feature (6)..(299): Homolog of NCBI NO: 38174439 NR Description: Unknown (protein for MGC:76017) [Silurana
  misc_feature (1)..(301): Homolog of NCBI NO: 34897242 NR Description: putative coat protein complex II (COPII)
  misc_feature (1)..(301): Homolog of NCBI NO: 34393220 NR Description: putative Sec13p [Oryza sativa (japonica
  misc_feature (1)..(300): Homolog of NCBI NO: 18147582 NR Description: Sec13p [Oryza sativa]
  misc_feature (1)..(301): Homolog of NCBI NO: 21593146 NR Description: putative protein transport protein SEC13
  misc_feature (1)..(301): Homolog of NCBI NO: 15227692 NR Description: G-protein beta family
  misc_feature (1)..(301): Homolog of NCBI NO: 15232095 NR Description: transport protein SEC13, putative
  misc_feature (1)..(301): Homolog of NCBI NO: 21593236 NR Description: transport protein SEC13, putative [Arabidopsis
  misc_feature (6)..(293): Homolog of NCBI NO: 29150272 NR Description: SEC13 related gene [Mus musculus]
  misc_feature (6)..(293): Homolog of NCBI NO: 12805321 NR Description: Unknown (protein for MGC:6737) [Mus musculus]
MPPQKIETGHSDTIHDVVMDYYGKRVATASSDCTIKITGVSNSGGSQHLATLTGHRGPVWQVAWAHPKFGSLLASCSYDGQIILWKEGNQNQWTQAHVFTDHKVSVNSIAWAPHELGLSLACGASDGNISVFSARADGGWDTTKIDQAHPVGVTSVSWAPATEPGALVSSGMIDPVYKLASGGCDSTVKVWKFSNGSWKMDCFPALNKHTDWVRDVAWAPNLGLPKSTIASGSEDGKVIIWTIGKGEQWEGTVLKDFKTPVWRVSWSLTANLLAVSDGNNNVTVWKESVDGEWEQVTVVEP

SEQ ID NO: 23944 - protein, 283 aa, Arabidopsis thaliana
  peptide (1)..(283): Ceres Seq. ID no. 12738323
  misc_feature (1)..(275): Homolog of NCBI NO: 27712890 NR Description: similar to SEC13 (S. cerevisiae)-like 1;
  misc_feature (1)..(275): Homolog of NCBI NO: 12805321 NR Description: Unknown (protein for MGC:6737) [Mus musculus]
  misc_feature (1)..(281): Homolog of NCBI NO: 38174439 NR Description: Unknown (protein for MGC:76017) [Silurana
  misc_feature (1)..(283): Homolog of NCBI NO: 34897242 NR Description: putative coat protein complex II (COPII)
  misc_feature (1)..(283): Homolog of NCBI NO: 34393220 NR Description: putative Sec13p [Oryza sativa (japonica
  misc_feature (1)..(282): Homolog of NCBI NO: 18147582 NR Description: Sec13p [Oryza sativa]
  misc_feature (1)..(283): Homolog of NCBI NO: 21593146 NR Description: putative protein transport protein SEC13
  misc_feature (1)..(283): Homolog of NCBI NO: 15227692 NR Description: G-protein beta family
  misc_feature (1)..(283): Homolog of NCBI NO: 15232095 NR Description: transport protein SEC13, putative
  misc_feature (1)..(283): Homolog of NCBI NO: 21593236 NR Description: transport protein SEC13, putative [Arabidopsis
MDYYGKRVATASSDCTIKITGVSNSGGSQHLATLTGHRGPVWQVAWAHPKFGSLLASCSYDGQIILWKEGNQNQWTQAHVFTDHKVSVNSIAWAPHELGLSLACGASDGNISVFSARADGGWDTTKIDQAHPVGVTSVSWAPATEPGALVSSGMIDPVYKLASGGCDSTVKVWKFSNGSWKMDCFPALNKHTDWVRDVAWAPNLGLPKSTIASGSEDGKVIIWTIGKGEQWEGTVLKDFKTPVWRVSWSLTANLLAVSDGNNNVTVWKESVDGEWEQVTVVEP

SEQ ID NO: 23945 - DNA, 1916 bp, Arabidopsis thaliana
  misc_feature (1)..(1916): Ceres Seq. ID no. 12385354
  misc_feature: MA Experiment ID: 108434 Result: Down-regulated in Transcription
  misc_feature: MA Experiment 108434 PARAMETER Experiment Name: At_Root_Tips_cDNA_P Parameter: Tissue Value: Root Tips
  misc_feature: MA Experiment ID: 108577 Result: Down-regulated in Transcription
  misc_feature: MA Experiment 108577 PARAMETER Experiment Name: At_42deg_Heat_cDNA_P Parameter: Temperature (deg C) Value: 42 vs. 22
  misc_feature: MA Experiment 108577 PARAMETER Experiment Name: At_42deg_Heat_cDNA_P Parameter: Timepoint (hr) Value: 6
  misc_feature: MA Experiment 108577 PARAMETER Experiment Name: At_42deg_Heat_cDNA_P Parameter: Tissue Value: Aerial
  misc_feature: MA Experiment ID: 20000070 Result: Up-regulated in Transcription
  misc_feature: MA Experiment 20000070 PARAMETER Experiment Name: At_100uM_ABA_Mutants_cDNA_P Parameter: Plant Line Value: CS24
  misc_feature: MA Experiment 20000070 PARAMETER Experiment Name: At_100uM_ABA_Mutants_cDNA_P Parameter: Timepoint (hr) Value: 6
  misc_feature: MA Experiment 20000070 PARAMETER Experiment Name: At_100uM_ABA_Mutants_cDNA_P Parameter: Tissue Value: Aerial
  misc_feature: MA Experiment 20000070 PARAMETER Experiment Name: At_100uM_ABA_Mutants_cDNA_P Parameter: Treatment Value: 100uM ABA vs. No Treatment
  misc_feature: MA Experiment ID: 20000086 Result: Up-regulated in Transcription
  misc_feature: MA Experiment 20000086 PARAMETER Experiment Name: At_100uM_ABA_Mutants_cDNA_P Parameter: Plant Line Value: CS22
  misc_feature: MA Experiment 20000086 PARAMETER Experiment Name: At_100uM_ABA_Mutants_cDNA_P Parameter: Timepoint (hr) Value: 6
  misc_feature: MA Experiment 20000086 PARAMETER Experiment Name: At_100uM_ABA_Mutants_cDNA_P Parameter: Tissue Value: Aerial
  misc_feature: MA Experiment 20000086 PARAMETER Experiment Name: At_100uM_ABA_Mutants_cDNA_P Parameter: Treatment Value: 100uM ABA vs. No Treatment
  misc_feature: MA Experiment ID: 20000089 Result: Up-regulated in Transcription
  misc_feature: MA Experiment ID: 20000117 Result: Up-regulated in Transcription
  misc_feature: MA Experiment 20000117 PARAMETER Experiment Name: At_100uM_ABA_Mutants_cDNA_P Parameter: Plant Line Value: Columbia
  misc_feature: MA Experiment 20000117 PARAMETER Experiment Name: At_100uM_ABA_Mutants_cDNA_P Parameter: Timepoint (hr) Value: 6
  misc_feature: MA Experiment 20000117 PARAMETER Experiment Name: At_100uM_ABA_Mutants_cDNA_P Parameter: Tissue Value: Aerial
  misc_feature: MA Experiment 20000117 PARAMETER Experiment Name: At_100uM_ABA_Mutants_cDNA_P Parameter: Treatment Value: 100uM ABA vs. No Treatment
  misc_feature: MA Experiment ID: 20001247 Result: Down-regulated in Transcription
  misc_feature: MA Experiment 20001247 PARAMETER Experiment Name: At_Far-red-induction_P Parameter: Age (day) Value: 7
  misc_feature: MA Experiment 20001247 PARAMETER Experiment Name: At_Far-red-induction_P Parameter: Light Value: Far-red vs. White
  misc_feature: MA Experiment 20001247 PARAMETER Experiment Name: At_Far-red-induction_P Parameter: Organism Value: A. thaliana
  misc_feature: MA Experiment 20001247 PARAMETER Experiment Name: At_Far-red-induction_P Parameter: Plant Line Value: Columbia
  misc_feature: MA Experiment 20001247 PARAMETER Experiment Name: At_Far-red-induction_P Parameter: Timepoint (hr) Value: 1
  misc_feature: MA Experiment 20001247 PARAMETER Experiment Name: At_Far-red-induction_P Parameter: Tissue Value: Whole Plant
aataaaaattcgaactatcaaactccaccccataacaaaattctccaaactagtgaaaattttgtcgccaccgtcgcagagtgttaaaaaactattggaagatgggttctggtcaatggcatatggagaagaggtctactttaaagaatgattcgtttgtacaagaatacaatccagtcactgaaactgggagtctctctatcattgttcttggtgcttctggtgatcttgctaagaagaagacttttcctgcacttttcaatctatttcatcagggatttcttaatccagatgaagttcatatatttggatatgcaaggagtaagattactgatgaggagcttagagataaaatccgcggatatcttgttgatgagaagaatgcatctaagaaaacagaagctttgtccaagtttctaaagctgattaagtatgtgagtggaccttatgattctgaggaagggtttaagagattagacaaggcgatttcggagcacgagatatctaaaaagactgctgaaggatcttctaggagattgttttatcttgcacttcctccgtctgtataccctcctgtaagcaagatgatcaaggcatggtgcactaacaaatctgatcttggtggatggactaggattgttgttgagaaaccatttggaaaggatttggaatctgcagagcagctgagttctcagattggagccttgtttgaagaaccacagatttatcgtattgatcactatctgggaaaagagttagttcaaaacatgttggttcttcggtttgccaatcgcttgtttttgccactatggaaccgcgacaatattgcaaacgtacagatcgttttcagagaagattttggaactgaaggtcgcggtggatattttgatgaatacggaatcattcgtgatattattcaaaaccacttgctccaggttctttgccttgtcgccatggagaaaccaatctctcttaaacccgagcacatccgggatgagaaagtgaaggttcttcaatctgtgattcccataaaagatgaagaggtggttcttggacaatatgaaggatatagagatgatccaactgttccaaatgactcaaacactccaacgtttgccacaacaattcttcgcattaacaatgaaagatgggaaggtgttccttttatactgaaggccggaaaggcaatgagttcaaagaaggcagatattcgcattcagtttaaagatgttcctggcgacatattcaaatgtcaaaaccaagggaggaacgagtttgttatacgcttgcagccttcagaggccatgtacatgaagctaactgtgaagcaaccgggtctggagatgcaaaccgtgcagagtgaactagacctatcgtacaagcagcgttaccaagatgtctcgattccagaggcttacgaacgccttattcttgacacaatcagaggcgaccaacaacactttgttcgcagagacgaattaaaggcagcttgggaaatcttcactccactgcttcacaggatcgacggagaagtgaaatcggtcccatacaaacaaggtagccgtggcccagcggaagcagatcagctacttaagaaagctggttatatgcagactcatggctacatttggatccctcctacattgtaaatggtataatcatagagatgatgatgatgagtacacacaaaataagagggttttttttttcttttttttccttgcttgctgaataaaaactcttcaccagtttggagtttgtttaagtgaatcttatgtatactagtgatcttcactaggacattgtttgtttatgccttgtagtttttgttgtactagtcccttgttttctttttttacataatgcaaaacagctttgtggaaaagctaattaaattaagagatcttattctgctc

SEQ ID NO: 23946 - protein, 515 aa, Arabidopsis thaliana
  peptide (1)..(515): Ceres Seq. ID no. 12385355
  misc_feature (224)..(507): Pfam Name: Glucose-6-phosphate dehydrogenase, C-terminal domain Pfam Description: Glucose-6-phosphate dehydrogenase, C-terminal
  misc_feature (3)..(515): Homolog of NCBI NO: 3021510 NR Description: glucose-6-phosphate dehydrogenase [Nicotiana
  misc_feature (3)..(515): Homolog of NCBI NO: 3021508 NR Description: glucose-6-phosphate dehydrogenase [Nicotiana
  misc_feature (1)..(515): Homolog of NCBI NO: 7431269 NR Description: glucose-6-phosphate 1-dehydrogenase (EC 1.1.1.49)
  misc_feature (1)..(515): Homolog of NCBI NO: 3023815 NR Description: Glucose-6-phosphate 1-dehydrogenase, cytoplasmic
  misc_feature (3)..(515): Homolog of NCBI NO: 585165 NR Description: Glucose-6-phosphate 1-dehydrogenase, cytoplasmic
  misc_feature (1)..(515): Homolog of NCBI NO: 25283727 NR Description: glucose-6-phosphate 1-dehydrogenase (EC 1.1.1.49)
  misc_feature (1)..(515): Homolog of NCBI NO: 15237485 NR Description: glucose-6-phosphate dehydrogenase; protein id:
  misc_feature (1)..(515): Homolog of NCBI NO: 18086470 NR Description: AT3g27300/K17E12_12 [Arabidopsis thaliana]
  misc_feature (1)..(515): Homolog of NCBI NO: 25283728 NR Description: glucose-6-phosphate 1-dehydrogenase (EC 1.1.1.49)
  misc_feature (1)..(515): Homolog of NCBI NO: 15232132 NR Description: glucose-6-phosphate 1-dehydrogenase, putative
MGSGQWHMEKRSTLKNDSFVQEYNPVTETGSLSIIVLGASGDLAKKKTFPALFNLFHQGFLNPDEVHIFGYARSKITDEELRDKIRGYLVDEKNASKKTEALSKFLKLIKYVSGPYDSEEGFKRLDKAISEHEISKKTAEGSSRRLFYLALPPSVYPPVSKMIKAWCTNKSDLGGWTRIVVEKPFGKDLESAEQLSSQIGALFEEPQIYRIDHYLGKELVQNMLVLRFANRLFLPLWNRDNIANVQIVFREDFGTEGRGGYFDEYGIIRDIIQNHLLQVLCLVAMEKPISLKPEHIRDEKVKVLQSVIPIKDEEVVLGQYEGYRDDPTVPNDSNTPTFATTILRINNERWEGVPFILKAGKAMSSKKADIRIQFKDVPGDIFKCQNQGRNEFVIRLQPSEAMYMKLTVKQPGLEMQTVQSELDLSYKQRYQDVSIPEAYERLILDTIRGDQQHFVRRDELKAAWEIFTPLLHRIDGEVKSVPYKQGSRGPAEADQLLKKAGYMQTHGYIWIPPTL

SEQ ID NO: 23947 - protein, 508 aa, Arabidopsis thaliana
  peptide (1)..(508): Ceres Seq. ID no. 12385356
  misc_feature (217)..(500): Pfam Name: Glucose-6-phosphate dehydrogenase, C-terminal domain Pfam Description: Glucose-6-phosphate dehydrogenase, C-terminal
  misc_feature (1)..(508): Homolog of NCBI NO: 3021510 NR Description: glucose-6-phosphate dehydrogenase [Nicotiana
  misc_feature (1)..(508): Homolog of NCBI NO: 3021508 NR Description: glucose-6-phosphate dehydrogenase [Nicotiana
  misc_feature (1)..(508): Homolog of NCBI NO: 7431269 NR Description: glucose-6-phosphate 1-dehydrogenase (EC 1.1.1.49)
  misc_feature (1)..(508): Homolog of NCBI NO: 3023815 NR Description: Glucose-6-phosphate 1-dehydrogenase, cytoplasmic
  misc_feature (1)..(508): Homolog of NCBI NO: 585165 NR Description: Glucose-6-phosphate 1-dehydrogenase, cytoplasmic
  misc_feature (1)..(508): Homolog of NCBI NO: 25283727 NR Description: glucose-6-phosphate 1-dehydrogenase (EC 1.1.1.49)
  misc_feature (1)..(508): Homolog of NCBI NO: 15237485 NR Description: glucose-6-phosphate dehydrogenase; protein id:
  misc_feature (1)..(508): Homolog of NCBI NO: 18086470 NR Description: AT3g27300/K17E12_12 [Arabidopsis thaliana]
  misc_feature (1)..(508): Homolog of NCBI NO: 25283728 NR Description: glucose-6-phosphate 1-dehydrogenase (EC 1.1.1.49)
  misc_feature (1)..(508): Homolog of NCBI NO: 15232132 NR Description: glucose-6-phosphate 1-dehydrogenase, putative
MEKRSTLKNDSFVQEYNPVTETGSLSIIVLGASGDLAKKKTFPALFNLFHQGFLNPDEVHIFGYARSKITDEELRDKIRGYLVDEKNASKKTEALSKFLKLIKYVSGPYDSEEGFKRLDKAISEHEISKKTAEGSSRRLFYLALPPSVYPPVSKMIKAWCTNKSDLGGWTRIVVEKPFGKDLESAEQLSSQIGALFEEPQIYRIDHYLGKELVQNMLVLRFANRLFLPLWNRDNIANVQIVFREDFGTEGRGGYFDEYGIIRDIIQNHLLQVLCLVAMEKPISLKPEHIRDEKVKVLQSVIPIKDEEVVLGQYEGYRDDPTVPNDSNTPTFATTILRINNERWEGVPFILKAGKAMSSKKADIRIQFKDVPGDIFKCQNQGRNEFVIRLQPSEAMYMKLTVKQPGLEMQTVQSELDLSYKQRYQDVSIPEAYERLILDTIRGDQQHFVRRDELKAAWEIFTPLLHRIDGEVKSVPYKQGSRGPAEADQLLKKAGYMQTHGYIWIPPTL

SEQ ID NO: 23948 - protein, 354 aa, Arabidopsis thaliana
  peptide (1)..(354): Ceres Seq. ID no. 12385357
  misc_feature (63)..(346): Pfam Name: Glucose-6-phosphate dehydrogenase, C-terminal domain Pfam Description: Glucose-6-phosphate dehydrogenase, C-terminal
  misc_feature (1)..(354): Homolog of NCBI NO: 3021510 NR Description: glucose-6-phosphate dehydrogenase [Nicotiana
  misc_feature (1)..(354): Homolog of NCBI NO: 3021508 NR Description: glucose-6-phosphate dehydrogenase [Nicotiana
  misc_feature (1)..(354): Homolog of NCBI NO: 7431269 NR Description: glucose-6-phosphate 1-dehydrogenase (EC 1.1.1.49)
  misc_feature (1)..(354): Homolog of NCBI NO: 3023815 NR Description: Glucose-6-phosphate 1-dehydrogenase, cytoplasmic
  misc_feature (1)..(354): Homolog of NCBI NO: 585165 NR Description: Glucose-6-phosphate 1-dehydrogenase, cytoplasmic
  misc_feature (1)..(354): Homolog of NCBI NO: 25283727 NR Description: glucose-6-phosphate 1-dehydrogenase (EC 1.1.1.49)
  misc_feature (1)..(354): Homolog of NCBI NO: 15237485 NR Description: glucose-6-phosphate dehydrogenase; protein id:
  misc_feature (1)..(354): Homolog of NCBI NO: 18086470 NR Description: AT3g27300/K17E12_12 [Arabidopsis thaliana]
  misc_feature (1)..(354): Homolog of NCBI NO: 25283728 NR Description: glucose-6-phosphate 1-dehydrogenase (EC 1.1.1.49)
  misc_feature (1)..(354): Homolog of NCBI NO: 15232132 NR Description: glucose-6-phosphate 1-dehydrogenase, putative
MIKAWCTNKSDLGGWTRIVVEKPFGKDLESAEQLSSQIGALFEEPQIYRIDHYLGKELVQNMLVLRFANRLFLPLWNRDNIANVQIVFREDFGTEGRGGYFDEYGIIRDIIQNHLLQVLCLVAMEKPISLKPEHIRDEKVKVLQSVIPIKDEEVVLGQYEGYRDDPTVPNDSNTPTFATTILRINNERWEGVPFILKAGKAMSSKKADIRIQFKDVPGDIFKCQNQGRNEFVIRLQPSEAMYMKLTVKQPGLEMQTVQSELDLSYKQRYQDVSIPEAYERLILDTIRGDQQHFVRRDELKAAWEIFTPLLHRIDGEVKSVPYKQGSRGPAEADQLLKKAGYMQTHGYIWIPPTL

SEQ ID NO: 23949 - DNA, 1222 bp, Arabidopsis thaliana
  misc_feature (1)..(1222): Ceres Seq. ID no. 12335796
  misc_feature: MA Experiment ID: 108434 Result: Up-regulated in Transcription
  misc_feature: MA Experiment 108434 PARAMETER Experiment Name: At_Root_Tips_cDNA_P Parameter: Tissue Value: Root Tips
  misc_feature: MA Experiment ID: 108461 Result: Down-regulated in Transcription
  misc_feature: MA Experiment 108461 PARAMETER Experiment Name: At_Germinating_Seeds_cDNA_P Parameter: Age (day) Value: 1 vs. 0
  misc_feature: MA Experiment 108461 PARAMETER Experiment Name: At_Germinating_Seeds_cDNA_P Parameter: Tissue Value: Germinating Seeds
  misc_feature: MA Experiment ID: 108462 Result: Down-regulated in Transcription
  misc_feature: MA Experiment 108462 PARAMETER Experiment Name: At_Germinating_Seeds_cDNA_P Parameter: Age (day) Value: 2 vs. 0
  misc_feature: MA Experiment 108462 PARAMETER Experiment Name: At_Germinating_Seeds_cDNA_P Parameter: Tissue Value: Germinating Seeds
  misc_feature: MA Experiment ID: 108463 Result: Down-regulated in Transcription
  misc_feature: MA Experiment 108463 PARAMETER Experiment Name: At_Germinating_Seeds_cDNA_P Parameter: Age (day) Value: 3 vs. 0
  misc_feature: MA Experiment 108463 PARAMETER Experiment Name: At_Germinating_Seeds_cDNA_P Parameter: Tissue Value: Germinating Seeds
  misc_feature: MA Experiment ID: 108464 Result: Down-regulated in Transcription
  misc_feature: MA Experiment 108464 PARAMETER Experiment Name: At_Germinating_Seeds_cDNA_P Parameter: Age (day) Value: 4 vs. 0
  misc_feature: MA Experiment 108464 PARAMETER Experiment Name: At_Germinating_Seeds_cDNA_P Parameter: Tissue Value: Germinating Seeds
gaacttacttgagtacttcttcttcttttgaccagagctctcacacatacgagtcactataatggaaggcgatcaagagacgaatgtttatactttggtggcaaggaagccttccttcgatctcccaacagcttgccctaattgtcttcctgcttatatatacctgaaattagcccagctaccttttgaacttgcgttcaattcaaccttccctgattcagatgaactgccgtactttgaaagtgatacatatgttgcatataacaatgaagatggaggagtaattgaaaaactgaagaaagatgggattgttaatctggactctcagctacagtctctttcggattatttatctttgaaggctcttattgtgtcttggctagaagaagcgcttacctatgagatatgggttggtaccgaggggatatctacatcgaaaatctactattcagatcttccttgggtgatcagcaaggtcctgttttataagcagacatacttggcaaagaaccgtttaggaatcaccaaagagaacgcagagcaaagagaaaaacagatatacaagagagcaagtgaggcatatgaagctttgtcgactaggttaggtgagcagaagtttctctttgaagacaggccatcgagtttggatgctttcttactctcgcacatactttttataatccaagcgttaccagttacatcagtgcttcggtgcaaacttctggaacatagtaatcttgtgcgatatgctgagaaacttaagtcagagttccttgaagcctcttcttcatctccttcacctccacttcactcattcccttcctcatttccaagaaagagttcgaagccaaagagcaaaccaaaggtagaaaagaccgaagaggagaaaaaatttaagaaaagagcaaggttctttctagctgctcagtttctagctgtcgtcatttacgtatcagtgatgggaggaggtagttctgatgaactggagtatgaagatgaagatgactaaactaaagcttttcttattaaatggaccggtaactctcaggcgaactctctgagactaagataaaaacataaccagtaatctctacgcttttttcttcttgaactcttagttatggagaggatacagatgtgagatttagtcacattataatggttttcgacttttcgttctgaaggagagcttttggcttttatataaatttcattggttttt

SEQ ID NO: 23950 - protein, 315 aa, Arabidopsis thaliana
  peptide (1)..(315): Ceres Seq. ID no. 12335797
  misc_feature (27)..(239): Homolog of NCBI NO: 630753 NR Description: ZC97.1 protein - Caenorhabditis elegans
  misc_feature (27)..(239): Homolog of NCBI NO: 17556801 NR Description: Putative cytoplasmic protein of ancient origin
  misc_feature (92)..(263): Homolog of NCBI NO: 30585259 NR Description: Homo sapiens metaxin 1 [synthetic construct]
  misc_feature (92)..(263): Homolog of NCBI NO: 12804907 NR Description: Similar to metaxin 1 [Homo sapiens]
  misc_feature (74)..(263): Homolog of NCBI NO: 38569475 NR Description: metaxin 1 isoform 1 [Homo sapiens]
  misc_feature (74)..(263): Homolog of NCBI NO: 3024205 NR Description: Metaxin 1
  misc_feature (113)..(302): Homolog of NCBI NO: 3695053 NR Description: metaxin [Mus musculus]
  misc_feature (74)..(302): Homolog of NCBI NO: 18606009 NR Description: metaxin [Mus musculus]
  misc_feature (21)..(302): Homolog of NCBI NO: 7305291 NR Description: metaxin 1; metaxin [Mus musculus]
  misc_feature (1)..(315): Homolog of NCBI NO: 18398935 NR Description: expressed protein
MEGDQETNVYTLVARKPSFDLPTACPNCLPAYIYLKLAQLPFELAFNSTFPDSDELPYFESDTYVAYNNEDGGVIEKLKKDGIVNLDSQLQSLSDYLSLKALIVSWLEEALTYEIWVGTEGISTSKIYYSDLPWVISKVLFYKQTYLAKNRLGITKENAEQREKQIYKRASEAYEALSTRLGEQKFLFEDRPSSLDAFLLSHILFIIQALPVTSVLRCKLLEHSNLVRYAEKLKSEFLEASSSSPSPPLHSFPSSFPRKSSKPKSKPKVEKTEEEKKFKKRARFFLAAQFLAVVIYVSVMGGGSSDELEYEDEDD

SEQ ID NO: 23951 - DNA, 1961 bp, Arabidopsis thaliana
  misc_feature (1)..(1961): Ceres Seq. ID no. 12370944
  misc_feature: MA Experiment ID: 20000171 Result: Down-regulated in Transcription
  misc_feature: MA Experiment 20000171 PARAMETER Experiment Name: At_42deg_Heat_P Parameter: Age (day) Value: 14
  misc_feature: MA Experiment 20000171 PARAMETER Experiment Name: At_42deg_Heat_P Parameter: Organism Value: A. thaliana
  misc_feature: MA Experiment 20000171 PARAMETER Experiment Name: At_42deg_Heat_P Parameter: Plant Line Value: WS
  misc_feature: MA Experiment 20000171 PARAMETER Experiment Name: At_42deg_Heat_P Parameter: Temperature (deg C) Value: 42 vs. 22
  misc_feature: MA Experiment 20000171 PARAMETER Experiment Name: At_42deg_Heat_P Parameter: Timepoint (hr) Value: 1
  misc_feature: MA Experiment 20000171 PARAMETER Experiment Name: At_42deg_Heat_P Parameter: Tissue Value: Aerial
  misc_feature: MA Experiment ID: 20000173 Result: Down-regulated in Transcription
  misc_feature: MA Experiment 20000173 PARAMETER Experiment Name: At_42deg_Heat_P Parameter: Age (day) Value: 14
  misc_feature: MA Experiment 20000173 PARAMETER Experiment Name: At_42deg_Heat_P Parameter: Organism Value: A. thaliana
  misc_feature: MA Experiment 20000173 PARAMETER Experiment Name: At_42deg_Heat_P Parameter: Plant Line Value: WS
  misc_feature: MA Experiment 20000173 PARAMETER Experiment Name: At_42deg_Heat_P Parameter: Temperature (deg C) Value: 42 vs. 22
  misc_feature: MA Experiment 20000173 PARAMETER Experiment Name: At_42deg_Heat_P Parameter: Timepoint (hr) Value: 6
  misc_feature: MA Experiment 20000173 PARAMETER Experiment Name: At_42deg_Heat_P Parameter: Tissue Value: Aerial
  misc_feature: MA Experiment ID: 20000184 Result: Down-regulated in Transcription
  misc_feature: MA Experiment 20000184 PARAMETER Experiment Name: At_Shoots__P Parameter: Age (day) Value: 7
  misc_feature: MA Experiment 20000184 PARAMETER Experiment Name: At_Shoots__P Parameter: Tissue Value: Shoots vs. Whole Plant
  misc_feature: MA Experiment ID: 20000224 Result: Up-regulated in Transcription
  misc_feature: MA Experiment ID: 20000495 Result: Up-regulated in Transcription
  misc_feature: MA Experiment 20000495 PARAMETER Experiment Name: At_Guard_Cells_P Parameter: Harvest Date Value: 8/2/2002
  misc_feature: MA Experiment 20000495 PARAMETER Experiment Name: At_Guard_Cells_P Parameter: Organism Value: A. thaliana
  misc_feature: MA Experiment 20000495 PARAMETER Experiment Name: At_Guard_Cells_P Parameter: Tissue Value: Guard Cells vs. Leaves
  misc_feature: MA Experiment ID: 20000794 Result: Up-regulated in Transcription
  misc_feature: MA Experiment 20000794 PARAMETER Experiment Name: At_Petals_P Parameter: Age (day) Value: 23-25 days
  misc_feature: MA Experiment 20000794 PARAMETER Experiment Name: At_Petals_P Parameter: Plant Line Value: WS
  misc_feature: MA Experiment 20000794 PARAMETER Experiment Name: At_Petals_P Parameter: Tissue Value: Petals vs. Whole plant
  misc_feature: MA Experiment ID: 20001451 Result: Up-regulated in Transcription
  misc_feature: MA Experiment 20001451 PARAMETER Experiment Name: At_Far-red-induction_P Parameter: Age (day) Value: 7
  misc_feature: MA Experiment 20001451 PARAMETER Experiment Name: At_Far-red-induction_P Parameter: Light Value: Far-red vs. White
  misc_feature: MA Experiment 20001451 PARAMETER Experiment Name: At_Far-red-induction_P Parameter: Organism Value: A. thaliana
  misc_feature: MA Experiment 20001451 PARAMETER Experiment Name: At_Far-red-induction_P Parameter: Plant Line Value: Columbia
  misc_feature: MA Experiment 20001451 PARAMETER Experiment Name: At_Far-red-induction_P Parameter: Timepoint (hr) Value: 24
  misc_feature: MA Experiment 20001451 PARAMETER Experiment Name: At_Far-red-induction_P Parameter: Tissue Value: Whole Plant
gccagattatcgcctttcgttcagagaaaactttttccgatacacaaaatcggaggaagaagaagatgaagctcaaagtgtatgcggatcgaatgtcacagccatctcgtgctgtcctcatattctgcaaggttaatgaaatccaattcgatgagatattgatttacttggcgaatcgtcaacaattatcccctgaatttaaagatattaacccaatggggaaagttccagctattgttgatggcaaacttaagctctctgagagtcacgctatcttgatatatctttcctcagcatacccaagtgtagttgatcattggtacccgactgatctttccaaaagggccagaattcactctgttttggattggcatcacaccaatttacgccctggtgcagctggatacgttctgaatagtgtactaggtccagctctcggtcttcctctgaatccgaaagcagctgctgaagctgagcagttactaacaaagtctctgaccactctagacactttttggcttaagggcaatgccatgttcttgctcggaagcaaccaaccatctatagctgatctgagccttgtatgtgaactaacgcagctgcaggttttggatgataaagatcgtcttagattgctcagccctcataaaaatgttgaacaatggattgagaatacgagaaaagcgacgatgcctcactttgatgaggtccatgaggtccttttcagagccaaagatagatgtcagaagcagcgagagatggcaaccgcatctaaaccgggtcctcaatctaagattatccaatttagtactattggtgagaagagtgatgatccaaacctcgttcaaaacacaaccgatcgtagaaaacatagacgcaaatggagtcgagctgaagatgccattcttattagtgcttggttaaatactagcaaggatccaattgtcgataatgaacataaagcatgcgctttttggaagagaattggtgcatattttaacaatagcgcttcacttgcaaatctgccaaagcgagagccgagtcactgcagcaaagatggagtaaacttaacgacaaagtctgcaaatttgttggatgttatgatcaagctttgaatcaaagaagtagtggtcaatctgaagatgatgttttccaagttgcataccaagtctacacgaacaattacaagagtaattttacacttgagcatgcatggagggagctccgacacagtaaaaaatggtgtagtttgtacccctttgaaaattctaagggtggtggaagctcaaagagaacaaagttgaataatggagatcgtgtatattcttcaagctctaatccggagagtgtgcctatagctctagatgaagaggagcaagtcatggatcttcctcttggtgtgaagtcatcgaagcagaaagagaagaaagttgctactattataacgattgaagaaagggaggccgattctggatcaagacttgagaacttgtgggtactagatgaagaggagcaagttatggatcgtcctcttggtgtgaagtcattagagcaaaaagagaataaagttgctcctaaaccaacgattgaagaaagggaggcggccgattctcgatcaagacttgagaacttgtgggcactaaaggagaaagaagaaagggaggcagattcccgatcaagacttgagaacttgtgggcactgaaggagaaagacatagaagagcaaaagaaactaacaaggatggaagtccttaaaagtcttcttggaagaacaactgatcaactttctgaaaaagaagacattttgaagaacaagctcattgatgagatgctctaatctctatgttcatctctgtattttagctatgtttcattgtatttatctctgtattttctctaggtttatctcactatctatgttcaacatttgtttcactttccaattcacatcatgaaacgtt

SEQ ID NO: 23952 - protein, 370 aa, Arabidopsis thaliana
  peptide (1)..(370): Ceres Seq. ID no. 12370945
  misc_feature (22)..(265): Homolog of NCBI NO: 15237583 NR Description: glutathione transferase, putative
  misc_feature (22)..(265): Homolog of NCBI NO: 10177768 NR Description: glutathione transferase [Arabidopsis thaliana]
  misc_feature (22)..(265): Homolog of NCBI NO: 25453559 NR Description: glutathione transferase (EC 2.5.1.18) GST 10b
  misc_feature (22)..(349): Homolog of NCBI NO: 30693769 NR Description: glutathione transferase, putative [Arabidopsis
  misc_feature (22)..(359): Homolog of NCBI NO: 15237595 NR Description: glutathione transferase, putative
QIIAFRSEKTFSDTQNRRKKKMKLKVYADRMSQPSRAVLIFCKVNEIQFDEILIYLANRQQLSPEFKDINPMGKVPAIVDGKLKLSESHAILIYLSSAYPSVVDHWYPTDLSKRARIHSVLDWHHTNLRPGAAGYVLNSVLGPALGLPLNPKAAAEAEQLLTKSLTTLDTFWLKGNAMFLLGSNQPSIADLSLVCELTQLQVLDDKDRLRLLSPHKNVEQWIENTRKATMPHFDEVHEVLFRAKDRCQKQREMATASKPGPQSKIIQFSTIGEKSDDPNLVQNTTDRRKHRRKWSRAEDAILISAWLNTSKDPIVDNEHKACAFWKRIGAYFNNSASLANLPKREPSHCSKDGVNLTTKSANLLDVMIKL

SEQ ID NO: 23953 - protein, 349 aa, Arabidopsis thaliana
  peptide (1)..(349): Ceres Seq. ID no. 12370946
  misc_feature (1)..(244): Homolog of NCBI NO: 15237583 NR Description: glutathione transferase, putative
  misc_feature (1)..(244): Homolog of NCBI NO: 10177768 NR Description: glutathione transferase [Arabidopsis thaliana]
  misc_feature (1)..(244): Homolog of NCBI NO: 25453559 NR Description: glutathione transferase (EC 2.5.1.18) GST 10b
  misc_feature (1)..(328): Homolog of NCBI NO: 30693769 NR Description: glutathione transferase, putative [Arabidopsis
  misc_feature (1)..(338): Homolog of NCBI NO: 15237595 NR Description: glutathione transferase, putative
MKLKVYADRMSQPSRAVLIFCKVNEIQFDEILIYLANRQQLSPEFKDINPMGKVPAIVDGKLKLSESHAILIYLSSAYPSVVDHWYPTDLSKRARIHSVLDWHHTNLRPGAAGYVLNSVLGPALGLPLNPKAAAEAEQLLTKSLTTLDTFWLKGNAMFLLGSNQPSIADLSLVCELTQLQVLDDKDRLRLLSPHKNVEQWIENTRKATMPHFDEVHEVLFRAKDRCQKQREMATASKPGPQSKIIQFSTIGEKSDDPNLVQNTTDRRKHRRKWSRAEDAILISAWLNTSKDPIVDNEHKACAFWKRIGAYFNNSASLANLPKREPSHCSKDGVNLTTKSANLLDVMIKL

SEQ ID NO: 23954 - protein, 340 aa, Arabidopsis thaliana
  peptide (1)..(340): Ceres Seq. ID no. 12370947
  misc_feature (1)..(235): Homolog of NCBI NO: 15237583 NR Description: glutathione transferase, putative
  misc_feature (1)..(235): Homolog of NCBI NO: 10177768 NR Description: glutathione transferase [Arabidopsis thaliana]
  misc_feature (1)..(235): Homolog of NCBI NO: 25453559 NR Description: glutathione transferase (EC 2.5.1.18) GST 10b
  misc_feature (1)..(319): Homolog of NCBI NO: 30693769 NR Description: glutathione transferase, putative [Arabidopsis
  misc_feature (1)..(329): Homolog of NCBI NO: 15237595 NR Description: glutathione transferase, putative
MSQPSRAVLIFCKVNEIQFDEILIYLANRQQLSPEFKDINPMGKVPAIVDGKLKLSESHAILIYLSSAYPSVVDHWYPTDLSKRARIHSVLDWHHTNLRPGAAGYVLNSVLGPALGLPLNPKAAAEAEQLLTKSLTTLDTFWLKGNAMFLLGSNQPSIADLSLVCELTQLQVLDDKDRLRLLSPHKNVEQWIENTRKATMPHFDEVHEVLFRAKDRCQKQREMATASKPGPQSKIIQFSTIGEKSDDPNLVQNTTDRRKHRRKWSRAEDAILISAWLNTSKDPIVDNEHKACAFWKRIGAYFNNSASLANLPKREPSHCSKDGVNLTTKSANLLDVMIKL

SEQ ID NO: 23955 - DNA, 1324 bp, Arabidopsis thaliana
  misc_feature (1)..(1324): Ceres Seq. ID no. 13591589
  misc_feature: MA Experiment ID: 108434 Result: Up-regulated in Transcription
  misc_feature: MA Experiment 108434 PARAMETER Experiment Name: At_Root_Tips_cDNA_P Parameter: Tissue Value: Root Tips
  misc_feature: MA Experiment ID: 108464 Result: Down-regulated in Transcription
  misc_feature: MA Experiment 108464 PARAMETER Experiment Name: At_Germinating_Seeds_cDNA_P Parameter: Age (day) Value: 4 vs. 0
  misc_feature: MA Experiment 108464 PARAMETER Experiment Name: At_Germinating_Seeds_cDNA_P Parameter: Tissue Value: Germinating Seeds
  misc_feature: MA Experiment ID: 20000112 Result: Up-regulated in Transcription
  misc_feature: MA Experiment 20000112 PARAMETER Experiment Name: At_42deg_Heat_cDNA_P Parameter: Temperature (deg C) Value: 42 vs. 22
  misc_feature: MA Experiment 20000112 PARAMETER Experiment Name: At_42deg_Heat_cDNA_P Parameter: Timepoint (hr) Value: 2
  misc_feature: MA Experiment 20000112 PARAMETER Experiment Name: At_42deg_Heat_cDNA_P Parameter: Tissue Value: Aerial
  misc_feature: MA Experiment ID: 20000113 Result: Up-regulated in Transcription
  misc_feature: MA Experiment 20000113 PARAMETER Experiment Name: At_42deg_Heat_cDNA_P Parameter: Temperature (deg C) Value: 42 vs. 22
  misc_feature: MA Experiment 20000113 PARAMETER Experiment Name: At_42deg_Heat_cDNA_P Parameter: Timepoint (hr) Value: 8
  misc_feature: MA Experiment 20000113 PARAMETER Experiment Name: At_42deg_Heat_cDNA_P Parameter: Tissue Value: Aerial
  misc_feature: MA Experiment ID: 20000144 Result: Up-regulated in Transcription
  misc_feature: MA Experiment 20000144 PARAMETER Experiment Name: At_42deg_Heat_cDNA_P Parameter: Temperature (deg C) Value: 42 vs. 22
  misc_feature: MA Experiment 20000144 PARAMETER Experiment Name: At_42deg_Heat_cDNA_P Parameter: Timepoint (hr) Value: 1
  misc_feature: MA Experiment 20000144 PARAMETER Experiment Name: At_42deg_Heat_cDNA_P Parameter: Tissue Value: Aerial
  misc_feature: MA Experiment ID: 20000184 Result: Up-regulated in Transcription
  misc_feature: MA Experiment 20000184 PARAMETER Experiment Name: At_Shoots__P Parameter: Age (day) Value: 7
  misc_feature: MA Experiment 20000184 PARAMETER Experiment Name: At_Shoots__P Parameter: Tissue Value: Shoots vs. Whole Plant
  misc_feature: MA Experiment ID: 20000185 Result: Up-regulated in Transcription
  misc_feature: MA Experiment 20000185 PARAMETER Experiment Name: At_Roots__P Parameter: Age (day) Value: 7 vs. 21
  misc_feature: MA Experiment 20000185 PARAMETER Experiment Name: At_Roots__P Parameter: Organism Value: A. thaliana
  misc_feature: MA Experiment 20000185 PARAMETER Experiment Name: At_Roots__P Parameter: Tissue Value: Roots vs. Whole Plant
  misc_feature: MA Experiment ID: 20000214 Result: Up-regulated in Transcription
  misc_feature: MA Experiment 20000214 PARAMETER Experiment Name: At_4deg_Cold_P Parameter: Timepoint (hr) Value: 6
  misc_feature: MA Experiment ID: 20000234 Result: Up-regulated in Transcription
  misc_feature: MA Experiment 20000234 PARAMETER Experiment Name: At_Siliques_P Parameter: Age (day) Value: 21
  misc_feature: MA Experiment 20000234 PARAMETER Experiment Name: At_Siliques_P Parameter: Organism Value: A. thaliana
  misc_feature: MA Experiment 20000234 PARAMETER Experiment Name: At_Siliques_P Parameter: Plant Line Value: WS
  misc_feature: MA Experiment 20000234 PARAMETER Experiment Name: At_Siliques_P Parameter: Tissue Value: Less Than 5mm Siliques vs. Whole Plant
  misc_feature: MA Experiment ID: 20000235 Result: Up-regulated in Transcription
  misc_feature: MA Experiment 20000235 PARAMETER Experiment Name: At_Siliques_P Parameter: Age (day) Value: 21
  misc_feature: MA Experiment 20000235 PARAMETER Experiment Name: At_Siliques_P Parameter: Organism Value: A. thaliana
  misc_feature: MA Experiment 20000235 PARAMETER Experiment Name: At_Siliques_P Parameter: Plant Line Value: WS
  misc_feature: MA Experiment 20000235 PARAMETER Experiment Name: At_Siliques_P Parameter: Tissue Value: 5-10mm Siliques vs. Whole Plant
  misc_feature: MA Experiment ID: 20000439 Result: Up-regulated in Transcription
  misc_feature: MA Experiment 20000439 PARAMETER Experiment Name: At_Roots__P Parameter: Age (day) Value: 14 vs. 21
  misc_feature: MA Experiment 20000439 PARAMETER Experiment Name: At_Roots__P Parameter: Organism Value: A. thaliana
  misc_feature: MA Experiment 20000439 PARAMETER Experiment Name: At_Roots__P Parameter: Tissue Value: Roots vs. Whole Plant
  misc_feature: MA Experiment ID: 20001248 Result: Down-regulated in Transcription
  misc_feature: MA Experiment 20001248 PARAMETER Experiment Name: At_Far-red-induction_P Parameter: Age (day) Value: 7
  misc_feature: MA Experiment 20001248 PARAMETER Experiment Name: At_Far-red-induction_P Parameter: Light Value: Far-red vs. White
  misc_feature: MA Experiment 20001248 PARAMETER Experiment Name: At_Far-red-induction_P Parameter: Organism Value: A. thaliana
  misc_feature: MA Experiment 20001248 PARAMETER Experiment Name: At_Far-red-induction_P Parameter: Plant Line Value: Columbia
  misc_feature: MA Experiment 20001248 PARAMETER Experiment Name: At_Far-red-induction_P Parameter: Timepoint (hr) Value: 4
  misc_feature: MA Experiment 20001248 PARAMETER Experiment Name: At_Far-red-induction_P Parameter: Tissue Value: Whole Plant
tgcacctatctcactctaaaatctctctctgccaatctcatcttcaacctctctctaactctcgttttcgattctacaatggctgacaagaagattaggatcggaatcaacggattcggaagaattggtcgtttggttgctagagttgttctccagagggacgatgttgagctcgtcgctgtcaacgaccccttcatcactactgagtacatgacctacatgttcaagtacgacagtgttcacggtcaatggaaacacaatgaactcaagatcaaggatgagaagacccttctcttcggtgagaagccagtcactgttttcggcatcaggaaccctgaggatatcccatgggccgaggctggagctgactacgttgttgagtctactggtgtcttcactgacaaagacaaggctgcagctcacttgaagggtggtgccaagaaggttgttatctctgcccccagcaaagacgctccaatgtttgttgttggtgtcaacgagcacgaatacaagtccgaccttgacattgtctccaacgctagctgcaccactaactgccttgctccccttgccaaggttatcaatgacagatttggaattgttgagggtcttatgactacagtccactcaatcactgctactcagaagactgttgatgggccttcaatgaaggactggagaggtggaagagctgcttcattcaacattattcccagcagcactggagctgccaaggctgtcggaaaggtgcttccagctcttaacggaaagttgactggaatgtctttccgtgtcccaaccgttgatgtctcagttgttgaccttactgtcagactcgagaaagctgctacctacgatgaaatcaaaaaggctatcaaggaggaatccgaaggcaaactcaagggaatccttggatacaccgaggatgatgttgtctcaactgacttcgttggcgacaacaggtcgagcatttttgacgccaaggctggaattgcattgagcgacaagtttgtgaaattggtgtcatggtacgacaacgaatggggttacagttcccgtgtggtcgacttgatcgtccacatgtcaaaggcctaagctaagaagcagatctcgaatgatagggagtggaaagtcatctgttcatccccttttatggtctgaatttgtcgttttcgaataaaatttctttgaacttggaactttttttttttttggttttcttaattctcattcatgtgaggtgatgggagtttgtagaccgatgttttactggaagccctttgtttttggcttttgatatattgagttaacgttatggttttcg

SEQ ID NO: 23956 - protein, 364 aa, Arabidopsis thaliana
  peptide (1)..(364): Ceres Seq. ID no. 13591590
  misc_feature (183)..(344): Pfam Name: Glyceraldehyde 3-phosphate dehydrogenase, Pfam Description: Glyceraldehyde 3-phosphate dehydrogenase,
  misc_feature (183)..(344): Pfam Name: Glyceraldehyde 3-phosphate dehydrogenase, Pfam Description: Glyceraldehyde 3-phosphate dehydrogenase,
  misc_feature (183)..(344): Pfam Name: Glyceraldehyde 3-phosphate dehydrogenase, Pfam Description: Glyceraldehyde 3-phosphate dehydrogenase,
  misc_feature (31)..(362): Homolog of NCBI NO: 4539543 NR Description: glyceraldehyde-3-phosphate dehydrogenase
  misc_feature (32)..(363): Homolog of NCBI NO: 462137 NR Description: GLYCERALDEHYDE 3-PHOSPHATE DEHYDROGENASE,
  misc_feature (27)..(362): Homolog of NCBI NO: 120669 NR Description: Glyceraldehyde 3-phosphate dehydrogenase,
  misc_feature (31)..(364): Homolog of NCBI NO: 462141 NR Description: Glyceraldehyde 3-phosphate dehydrogenase (GAPDH)
  misc_feature (27)..(364): Homolog of NCBI NO: 22094840 NR Description: glyceraldehyde 3-phosphate dehydrogenase [Solanum
  misc_feature (31)..(362): Homolog of NCBI NO: 4539543 NR Description: glyceraldehyde-3-phosphate dehydrogenase
  misc_feature (27)..(362): Homolog of NCBI NO: 120669 NR Description: Glyceraldehyde 3-phosphate dehydrogenase,
  misc_feature (27)..(364): Homolog of NCBI NO: 22094840 NR Description: glyceraldehyde 3-phosphate dehydrogenase [Solanum
  misc_feature (31)..(364): Homolog of NCBI NO: 462141 NR Description: Glyceraldehyde 3-phosphate dehydrogenase (GAPDH)
  misc_feature (27)..(362): Homolog of NCBI NO: 120669 NR Description: Glyceraldehyde 3-phosphate dehydrogenase,
  misc_feature (32)..(363): Homolog of NCBI NO: 462137 NR Description: GLYCERALDEHYDE 3-PHOSPHATE DEHYDROGENASE,
  misc_feature (31)..(362): Homolog of NCBI NO: 4539543 NR Description: glyceraldehyde-3-phosphate dehydrogenase
  misc_feature (27)..(364): Homolog of NCBI NO: 15229231 NR Description: glyceraldehyde-3-phosphate dehydrogenase C
  misc_feature (27)..(364): Homolog of NCBI NO: 21593240 NR Description: glyceraldehyde-3-phosphate dehydrogenase C
  misc_feature (27)..(364): Homolog of NCBI NO: 81622 NR Description: glyceraldehyde-3-phosphate dehydrogenase
  misc_feature (27)..(364): Homolog of NCBI NO: 15222848 NR Description: glyceraldehyde-3-phosphate dehydrogenase -related
  misc_feature (27)..(364): Homolog of NCBI NO: 120675 NR Description: Glyceraldehyde 3-phosphate dehydrogenase,
  misc_feature (27)..(364): Homolog of NCBI NO: 15229231 NR Description: glyceraldehyde-3-phosphate dehydrogenase C
  misc_feature (27)..(364): Homolog of NCBI NO: 21593240 NR Description: glyceraldehyde-3-phosphate dehydrogenase C
  misc_feature (27)..(364): Homolog of NCBI NO: 81622 NR Description: glyceraldehyde-3-phosphate dehydrogenase
  misc_feature (27)..(364): Homolog of NCBI NO: 15222848 NR Description: glyceraldehyde-3-phosphate dehydrogenase -related
  misc_feature (27)..(364): Homolog of NCBI NO: 120675 NR Description: Glyceraldehyde 3-phosphate dehydrogenase,
  misc_feature (27)..(364): Homolog of NCBI NO: 22094840 NR Description: glyceraldehyde 3-phosphate dehydrogenase [Solanum
  misc_feature (31)..(364): Homolog of NCBI NO: 462141 NR Description: Glyceraldehyde 3-phosphate dehydrogenase (GAPDH)
  misc_feature (32)..(363): Homolog of NCBI NO: 462137 NR Description: GLYCERALDEHYDE 3-PHOSPHATE DEHYDROGENASE,
  misc_feature (27)..(364): Homolog of NCBI NO: 120675 NR Description: Glyceraldehyde 3-phosphate dehydrogenase,
  misc_feature (27)..(364): Homolog of NCBI NO: 15222848 NR Description: glyceraldehyde-3-phosphate dehydrogenase -related
  misc_feature (27)..(364): Homolog of NCBI NO: 81622 NR Description: glyceraldehyde-3-phosphate dehydrogenase
  misc_feature (27)..(364): Homolog of NCBI NO: 21593240 NR Description: glyceraldehyde-3-phosphate dehydrogenase C
  misc_feature (27)..(364): Homolog of NCBI NO: 15229231 NR Description: glyceraldehyde-3-phosphate dehydrogenase C
CTYLTLKSLSANLIFNLSLTLVFDSTMADKKIRIGINGFGRIGRLVARVVLQRDDVELVAVNDPFITTEYMTYMFKYDSVHGQWKHNELKIKDEKTLLFGEKPVTVFGIRNPEDIPWAEAGADYVVESTGVFTDKDKAAAHLKGGAKKVVISAPSKDAPMFVVGVNEHEYKSDLDIVSNASCTTNCLAPLAKVINDRFGIVEGLMTTVHSITATQKTVDGPSMKDWRGGRAASFNIIPSSTGAAKAVGKVLPALNGKLTGMSFRVPTVDVSVVDLTVRLEKAATYDEIKKAIKEESEGKLKGILGYTEDDVVSTDFVGDNRSSIFDAKAGIALSDKFVKLVSWYDNEWGYSSRVVDLIVHMSKA

SEQ ID NO: 23957 - protein, 338 aa, Arabidopsis thaliana
  peptide (1)..(338): Ceres Seq. ID no. 13591591
  misc_feature (157)..(318): Pfam Name: Glyceraldehyde 3-phosphate dehydrogenase, Pfam Description: Glyceraldehyde 3-phosphate dehydrogenase,
  misc_feature (157)..(318): Pfam Name: Glyceraldehyde 3-phosphate dehydrogenase, Pfam Description: Glyceraldehyde 3-phosphate dehydrogenase,
  misc_feature (157)..(318): Pfam Name: Glyceraldehyde 3-phosphate dehydrogenase, Pfam Description: Glyceraldehyde 3-phosphate dehydrogenase,
  misc_feature (5)..(336): Homolog of NCBI NO: 4539543 NR Description: glyceraldehyde-3-phosphate dehydrogenase
  misc_feature (6)..(337): Homolog of NCBI NO: 462137 NR Description: GLYCERALDEHYDE 3-PHOSPHATE DEHYDROGENASE,
  misc_feature (1)..(336): Homolog of NCBI NO: 120669 NR Description: Glyceraldehyde 3-phosphate dehydrogenase,
  misc_feature (5)..(338): Homolog of NCBI NO: 462141 NR Description: Glyceraldehyde 3-phosphate dehydrogenase (GAPDH)
  misc_feature (1)..(338): Homolog of NCBI NO: 22094840 NR Description: glyceraldehyde 3-phosphate dehydrogenase [Solanum
  misc_feature (5)..(336): Homolog of NCBI NO: 4539543 NR Description: glyceraldehyde-3-phosphate dehydrogenase
  misc_feature (1)..(336): Homolog of NCBI NO: 120669 NR Description: Glyceraldehyde 3-phosphate dehydrogenase,
  misc_feature (1)..(338): Homolog of NCBI NO: 22094840 NR Description: glyceraldehyde 3-phosphate dehydrogenase [Solanum
  misc_feature (5)..(338): Homolog of NCBI NO: 462141 NR Description: Glyceraldehyde 3-phosphate dehydrogenase (GAPDH)
  misc_feature (1)..(336): Homolog of NCBI NO: 120669 NR Description: Glyceraldehyde 3-phosphate dehydrogenase,
  misc_feature (6)..(337): Homolog of NCBI NO: 462137 NR Description: GLYCERALDEHYDE 3-PHOSPHATE DEHYDROGENASE,
  misc_feature (5)..(336): Homolog of NCBI NO: 4539543 NR Description: glyceraldehyde-3-phosphate dehydrogenase
  misc_feature (1)..(338): Homolog of NCBI NO: 15229231 NR Description: glyceraldehyde-3-phosphate dehydrogenase C
  misc_feature (1)..(338): Homolog of NCBI NO: 21593240 NR Description: glyceraldehyde-3-phosphate dehydrogenase C
  misc_feature (1)..(338): Homolog of NCBI NO: 81622 NR Description: glyceraldehyde-3-phosphate dehydrogenase
  misc_feature (1)..(338): Homolog of NCBI NO: 15222848 NR Description: glyceraldehyde-3-phosphate dehydrogenase -related
  misc_feature (1)..(338): Homolog of NCBI NO: 120675 NR Description: Glyceraldehyde 3-phosphate dehydrogenase,
  misc_feature (1)..(338): Homolog of NCBI NO: 15229231 NR Description: glyceraldehyde-3-phosphate dehydrogenase C
  misc_feature (1)..(338): Homolog of NCBI NO: 21593240 NR Description: glyceraldehyde-3-phosphate dehydrogenase C
  misc_feature (1)..(338): Homolog of NCBI NO: 81622 NR Description: glyceraldehyde-3-phosphate dehydrogenase
  misc_feature (1)..(338): Homolog of NCBI NO: 15222848 NR Description: glyceraldehyde-3-phosphate dehydrogenase -related
  misc_feature (1)..(338): Homolog of NCBI NO: 120675 NR Description: Glyceraldehyde 3-phosphate dehydrogenase,
  misc_feature (1)..(338): Homolog of NCBI NO: 22094840 NR Description: glyceraldehyde 3-phosphate dehydrogenase [Solanum
  misc_feature (5)..(338): Homolog of NCBI NO: 462141 NR Description: Glyceraldehyde 3-phosphate dehydrogenase (GAPDH)
  misc_feature (6)..(337): Homolog of NCBI NO: 462137 NR Description: GLYCERALDEHYDE 3-PHOSPHATE DEHYDROGENASE,
  misc_feature (1)..(338): Homolog of NCBI NO: 120675 NR Description: Glyceraldehyde 3-phosphate dehydrogenase,
  misc_feature (1)..(338): Homolog of NCBI NO: 15222848 NR Description: glyceraldehyde-3-phosphate dehydrogenase -related
  misc_feature (1)..(338): Homolog of NCBI NO: 81622 NR Description: glyceraldehyde-3-phosphate dehydrogenase
  misc_feature (1)..(338): Homolog of NCBI NO: 21593240 NR Description: glyceraldehyde-3-phosphate dehydrogenase C
  misc_feature (1)..(338): Homolog of NCBI NO: 15229231 NR Description: glyceraldehyde-3-phosphate dehydrogenase C
MADKKIRIGINGFGRIGRLVARVVLQRDDVELVAVNDPFITTEYMTYMFKYDSVHGQWKHNELKIKDEKTLLFGEKPVTVFGIRNPEDIPWAEAGADYVVESTGVFTDKDKAAAHLKGGAKKVVISAPSKDAPMFVVGVNEHEYKSDLDIVSNASCTTNCLAPLAKVINDRFGIVEGLMTTVHSITATQKTVDGPSMKDWRGGRAASFNIIPSSTGAAKAVGKVLPALNGKLTGMSFRVPTVDVSVVDLTVRLEKAATYDEIKKAIKEESEGKLKGILGYTEDDVVSTDFVGDNRSSIFDAKAGIALSDKFVKLVSWYDNEWGYSSRVVDLIVHMSKA

SEQ ID NO: 23958 - protein, 294 aa, Arabidopsis thaliana
  peptide (1)..(294): Ceres Seq. ID no. 13591592
  misc_feature (113)..(274): Pfam Name: Glyceraldehyde 3-phosphate dehydrogenase, Pfam Description: Glyceraldehyde 3-phosphate dehydrogenase,
  misc_feature (113)..(274): Pfam Name: Glyceraldehyde 3-phosphate dehydrogenase, Pfam Description: Glyceraldehyde 3-phosphate dehydrogenase,
  misc_feature (113)..(274): Pfam Name: Glyceraldehyde 3-phosphate dehydrogenase, Pfam Description: Glyceraldehyde 3-phosphate dehydrogenase,
  misc_feature (1)..(292): Homolog of NCBI NO: 4539543 NR Description: glyceraldehyde-3-phosphate dehydrogenase
  misc_feature (1)..(293): Homolog of NCBI NO: 462137 NR Description: GLYCERALDEHYDE 3-PHOSPHATE DEHYDROGENASE,
  misc_feature (1)..(292): Homolog of NCBI NO: 120669 NR Description: Glyceraldehyde 3-phosphate dehydrogenase,
  misc_feature (1)..(294): Homolog of NCBI NO: 462141 NR Description: Glyceraldehyde 3-phosphate dehydrogenase (GAPDH)
  misc_feature (1)..(294): Homolog of NCBI NO: 22094840 NR Description: glyceraldehyde 3-phosphate dehydrogenase [Solanum
  misc_feature (1)..(292): Homolog of NCBI NO: 4539543 NR Description: glyceraldehyde-3-phosphate dehydrogenase
  misc_feature (1)..(292): Homolog of NCBI NO: 120669 NR Description: Glyceraldehyde 3-phosphate dehydrogenase,
  misc_feature (1)..(294): Homolog of NCBI NO: 22094840 NR Description: glyceraldehyde 3-phosphate dehydrogenase [Solanum
  misc_feature (1)..(294): Homolog of NCBI NO: 462141 NR Description: Glyceraldehyde 3-phosphate dehydrogenase (GAPDH)
  misc_feature (1)..(292): Homolog of NCBI NO: 120669 NR Description: Glyceraldehyde 3-phosphate dehydrogenase,
  misc_feature (1)..(293): Homolog of NCBI NO: 462137 NR Description: GLYCERALDEHYDE 3-PHOSPHATE DEHYDROGENASE,
  misc_feature (1)..(292): Homolog of NCBI NO: 4539543 NR Description: glyceraldehyde-3-phosphate dehydrogenase
  misc_feature (1)..(294): Homolog of NCBI NO: 15229231 NR Description: glyceraldehyde-3-phosphate dehydrogenase C
  misc_feature (1)..(294): Homolog of NCBI NO: 21593240 NR Description: glyceraldehyde-3-phosphate dehydrogenase C
  misc_feature (1)..(294): Homolog of NCBI NO: 81622 NR Description: glyceraldehyde-3-phosphate dehydrogenase
  misc_feature (1)..(294): Homolog of NCBI NO: 15222848 NR Description: glyceraldehyde-3-phosphate dehydrogenase -related
  misc_feature (1)..(294): Homolog of NCBI NO: 120675 NR Description: Glyceraldehyde 3-phosphate dehydrogenase,
  misc_feature (1)..(294): Homolog of NCBI NO: 15229231 NR Description: glyceraldehyde-3-phosphate dehydrogenase C
  misc_feature (1)..(294): Homolog of NCBI NO: 21593240 NR Description: glyceraldehyde-3-phosphate dehydrogenase C
  misc_feature (1)..(294): Homolog of NCBI NO: 81622 NR Description: glyceraldehyde-3-phosphate dehydrogenase
  misc_feature (1)..(294): Homolog of NCBI NO: 15222848 NR Description: glyceraldehyde-3-phosphate dehydrogenase -related
  misc_feature (1)..(294): Homolog of NCBI NO: 120675 NR Description: Glyceraldehyde 3-phosphate dehydrogenase,
  misc_feature (1)..(294): Homolog of NCBI NO: 22094840 NR Description: glyceraldehyde 3-phosphate dehydrogenase [Solanum
  misc_feature (1)..(294): Homolog of NCBI NO: 462141 NR Description: Glyceraldehyde 3-phosphate dehydrogenase (GAPDH)
  misc_feature (1)..(293): Homolog of NCBI NO: 462137 NR Description: GLYCERALDEHYDE 3-PHOSPHATE DEHYDROGENASE,
  misc_feature (1)..(294): Homolog of NCBI NO: 120675 NR Description: Glyceraldehyde 3-phosphate dehydrogenase,
  misc_feature (1)..(294): Homolog of NCBI NO: 15222848 NR Description: glyceraldehyde-3-phosphate dehydrogenase -related
  misc_feature (1)..(294): Homolog of NCBI NO: 81622 NR Description: glyceraldehyde-3-phosphate dehydrogenase
  misc_feature (1)..(294): Homolog of NCBI NO: 21593240 NR Description: glyceraldehyde-3-phosphate dehydrogenase C
  misc_feature (1)..(294): Homolog of NCBI NO: 15229231 NR Description: glyceraldehyde-3-phosphate dehydrogenase C
MTYMFKYDSVHGQWKHNELKIKDEKTLLFGEKPVTVFGIRNPEDIPWAEAGADYVVESTGVFTDKDKAAAHLKGGAKKVVISAPSKDAPMFVVGVNEHEYKSDLDIVSNASCTTNCLAPLAKVINDRFGIVEGLMTTVHSITATQKTVDGPSMKDWRGGRAASFNIIPSSTGAAKAVGKVLPALNGKLTGMSFRVPTVDVSVVDLTVRLEKAATYDEIKKAIKEESEGKLKGILGYTEDDVVSTDFVGDNRSSIFDAKAGIALSDKFVKLVSWYDNEWGYSSRVVDLIVHMSKA

SEQ ID NO: 23959 - DNA, 1218 bp, Arabidopsis thaliana
  misc_feature (1)..(1218): Ceres Seq. ID no. 12326995
  misc_feature: MA Experiment ID: 108434 Result: Down-regulated in Transcription
  misc_feature: MA Experiment 108434 PARAMETER Experiment Name: At_Root_Tips_cDNA_P Parameter: Tissue Value: Root Tips
  misc_feature: MA Experiment ID: 108462 Result: Up-regulated in Transcription
  misc_feature: MA Experiment 108462 PARAMETER Experiment Name: At_Germinating_Seeds_cDNA_P Parameter: Age (day) Value: 2 vs. 0
  misc_feature: MA Experiment 108462 PARAMETER Experiment Name: At_Germinating_Seeds_cDNA_P Parameter: Tissue Value: Germinating Seeds
  misc_feature: MA Experiment ID: 108463 Result: Up-regulated in Transcription
  misc_feature: MA Experiment 108463 PARAMETER Experiment Name: At_Germinating_Seeds_cDNA_P Parameter: Age (day) Value: 3 vs. 0
  misc_feature: MA Experiment 108463 PARAMETER Experiment Name: At_Germinating_Seeds_cDNA_P Parameter: Tissue Value: Germinating Seeds
  misc_feature: MA Experiment ID: 108576 Result: Up-regulated in Transcription
  misc_feature: MA Experiment 108576 PARAMETER Experiment Name: At_42deg_Heat_cDNA_P Parameter: Temperature (deg C) Value: 42 vs. 22
  misc_feature: MA Experiment 108576 PARAMETER Experiment Name: At_42deg_Heat_cDNA_P Parameter: Timepoint (hr) Value: 1
  misc_feature: MA Experiment 108576 PARAMETER Experiment Name: At_42deg_Heat_cDNA_P Parameter: Tissue Value: Aerial
  misc_feature: MA Experiment ID: 20000072 Result: Up-regulated in Transcription
  misc_feature: MA Experiment 20000072 PARAMETER Experiment Name: At_100uM_ABA_Mutants_cDNA_P Parameter: Plant Line Value: CS8105
  misc_feature: MA Experiment 20000072 PARAMETER Experiment Name: At_100uM_ABA_Mutants_cDNA_P Parameter: Timepoint (hr) Value: 6
  misc_feature: MA Experiment 20000072 PARAMETER Experiment Name: At_100uM_ABA_Mutants_cDNA_P Parameter: Tissue Value: Aerial
  misc_feature: MA Experiment 20000072 PARAMETER Experiment Name: At_100uM_ABA_Mutants_cDNA_P Parameter: Treatment Value: 100uM ABA vs. No Treatment
  misc_feature: MA Experiment ID: 20000111 Result: Up-regulated in Transcription
  misc_feature: MA Experiment 20000111 PARAMETER Experiment Name: At_42deg_Heat_cDNA_P Parameter: Temperature (deg C) Value: 42 vs. 22
  misc_feature: MA Experiment 20000111 PARAMETER Experiment Name: At_42deg_Heat_cDNA_P Parameter: Timepoint (hr) Value: 6
  misc_feature: MA Experiment 20000111 PARAMETER Experiment Name: At_42deg_Heat_cDNA_P Parameter: Tissue Value: Aerial
  misc_feature: MA Experiment ID: 20000144 Result: Up-regulated in Transcription
  misc_feature: MA Experiment 20000144 PARAMETER Experiment Name: At_42deg_Heat_cDNA_P Parameter: Temperature (deg C) Value: 42 vs. 22
  misc_feature: MA Experiment 20000144 PARAMETER Experiment Name: At_42deg_Heat_cDNA_P Parameter: Timepoint (hr) Value: 1
  misc_feature: MA Experiment 20000144 PARAMETER Experiment Name: At_42deg_Heat_cDNA_P Parameter: Tissue Value: Aerial
  misc_feature: MA Experiment ID: 20000166 Result: Up-regulated in Transcription
  misc_feature: MA Experiment 20000166 PARAMETER Experiment Name: At_100uM_ABA_P Parameter: Age (day) Value: 14
  misc_feature: MA Experiment 20000166 PARAMETER Experiment Name: At_100uM_ABA_P Parameter: Organism Value: A. thaliana
  misc_feature: MA Experiment 20000166 PARAMETER Experiment Name: At_100uM_ABA_P Parameter: Plant Line Value: WS
  misc_feature: MA Experiment 20000166 PARAMETER Experiment Name: At_100uM_ABA_P Parameter: Timepoint (hr) Value: 1
  misc_feature: MA Experiment 20000166 PARAMETER Experiment Name: At_100uM_ABA_P Parameter: Tissue Value: Aerial
  misc_feature: MA Experiment 20000166 PARAMETER Experiment Name: At_100uM_ABA_P Parameter: Treatment Value: 100uM ABA vs. No Treatment
  misc_feature: MA Experiment ID: 20000169 Result: Up-regulated in Transcription
  misc_feature: MA Experiment 20000169 PARAMETER Experiment Name: At_100uM_ABA_P Parameter: Age (day) Value: 14
  misc_feature: MA Experiment 20000169 PARAMETER Experiment Name: At_100uM_ABA_P Parameter: Organism Value: A. thaliana
  misc_feature: MA Experiment 20000169 PARAMETER Experiment Name: At_100uM_ABA_P Parameter: Plant Line Value: WS
  misc_feature: MA Experiment 20000169 PARAMETER Experiment Name: At_100uM_ABA_P Parameter: Timepoint (hr) Value: 6
  misc_feature: MA Experiment 20000169 PARAMETER Experiment Name: At_100uM_ABA_P Parameter: Tissue Value: Aerial
  misc_feature: MA Experiment 20000169 PARAMETER Experiment Name: At_100uM_ABA_P Parameter: Treatment Value: 100uM ABA vs. No Treatment
  misc_feature: MA Experiment ID: 20000234 Result: Down-regulated in Transcription
  misc_feature: MA Experiment 20000234 PARAMETER Experiment Name: At_Siliques_P Parameter: Age (day) Value: 21
  misc_feature: MA Experiment 20000234 PARAMETER Experiment Name: At_Siliques_P Parameter: Organism Value: A. thaliana
  misc_feature: MA Experiment 20000234 PARAMETER Experiment Name: At_Siliques_P Parameter: Plant Line Value: WS
  misc_feature: MA Experiment 20000234 PARAMETER Experiment Name: At_Siliques_P Parameter: Tissue Value: Less Than 5mm Siliques vs. Whole Plant
  misc_feature: MA Experiment ID: 20000235 Result: Down-regulated in Transcription
  misc_feature: MA Experiment 20000235 PARAMETER Experiment Name: At_Siliques_P Parameter: Age (day) Value: 21
  misc_feature: MA Experiment 20000235 PARAMETER Experiment Name: At_Siliques_P Parameter: Organism Value: A. thaliana
  misc_feature: MA Experiment 20000235 PARAMETER Experiment Name: At_Siliques_P Parameter: Plant Line Value: WS
  misc_feature: MA Experiment 20000235 PARAMETER Experiment Name: At_Siliques_P Parameter: Tissue Value: 5-10mm Siliques vs. Whole Plant
  misc_feature: MA Experiment ID: 20000265 Result: Down-regulated in Transcription
  misc_feature: MA Experiment 20000265 PARAMETER Experiment Name: At_Open_Flower_P Parameter: Age (day) Value: 21
  misc_feature: MA Experiment 20000265 PARAMETER Experiment Name: At_Open_Flower_P Parameter: Plant Line Value: WS
  misc_feature: MA Experiment 20000265 PARAMETER Experiment Name: At_Open_Flower_P Parameter: Tissue Value: Closed Flower vs. Whole Plant
  misc_feature: MA Experiment ID: 20000286 Result: Down-regulated in Transcription
  misc_feature: MA Experiment 20000286 PARAMETER Experiment Name: At_Open_Flower_P Parameter: Age (day) Value: 21
  misc_feature: MA Experiment 20000286 PARAMETER Experiment Name: At_Open_Flower_P Parameter: Plant Line Value: WS
  misc_feature: MA Experiment 20000286 PARAMETER Experiment Name: At_Open_Flower_P Parameter: Tissue Value: Half Open vs. Whole Plant
  misc_feature: MA Experiment ID: 20000453 Result: Up-regulated in Transcription
  misc_feature: MA Experiment 20000453 PARAMETER Experiment Name: At_100uM_ABA_P Parameter: Age (day) Value: 15
  misc_feature: MA Experiment 20000453 PARAMETER Experiment Name: At_100uM_ABA_P Parameter: Organism Value: A. thaliana
  misc_feature: MA Experiment 20000453 PARAMETER Experiment Name: At_100uM_ABA_P Parameter: Plant Line Value: WS
  misc_feature: MA Experiment 20000453 PARAMETER Experiment Name: At_100uM_ABA_P Parameter: Timepoint (hr) Value: 24
  misc_feature: MA Experiment 20000453 PARAMETER Experiment Name: At_100uM_ABA_P Parameter: Tissue Value: Aerial
  misc_feature: MA Experiment 20000453 PARAMETER Experiment Name: At_100uM_ABA_P Parameter: Treatment Value: 100uM ABA vs. No Treatment
  misc_feature: MA Experiment ID: 20001247 Result: Up-regulated in Transcription
  misc_feature: MA Experiment 20001247 PARAMETER Experiment Name: At_Far-red-induction_P Parameter: Age (day) Value: 7
  misc_feature: MA Experiment 20001247 PARAMETER Experiment Name: At_Far-red-induction_P Parameter: Light Value: Far-red vs. White
  misc_feature: MA Experiment 20001247 PARAMETER Experiment Name: At_Far-red-induction_P Parameter: Organism Value: A. thaliana
  misc_feature: MA Experiment 20001247 PARAMETER Experiment Name: At_Far-red-induction_P Parameter: Plant Line Value: Columbia
  misc_feature: MA Experiment 20001247 PARAMETER Experiment Name: At_Far-red-induction_P Parameter: Timepoint (hr) Value: 1
  misc_feature: MA Experiment 20001247 PARAMETER Experiment Name: At_Far-red-induction_P Parameter: Tissue Value: Whole Plant
  misc_feature: MA Experiment ID: 20001248 Result: Up-regulated in Transcription
  misc_feature: MA Experiment 20001248 PARAMETER Experiment Name: At_Far-red-induction_P Parameter: Age (day) Value: 7
  misc_feature: MA Experiment 20001248 PARAMETER Experiment Name: At_Far-red-induction_P Parameter: Light Value: Far-red vs. White
  misc_feature: MA Experiment 20001248 PARAMETER Experiment Name: At_Far-red-induction_P Parameter: Organism Value: A. thaliana
  misc_feature: MA Experiment 20001248 PARAMETER Experiment Name: At_Far-red-induction_P Parameter: Plant Line Value: Columbia
  misc_feature: MA Experiment 20001248 PARAMETER Experiment Name: At_Far-red-induction_P Parameter: Timepoint (hr) Value: 4
  misc_feature: MA Experiment 20001248 PARAMETER Experiment Name: At_Far-red-induction_P Parameter: Tissue Value: Whole Plant
  misc_feature: MA Experiment ID: 20001450 Result: Up-regulated in Transcription
  misc_feature: MA Experiment 20001450 PARAMETER Experiment Name: At_Far-red-induction_P Parameter: Age (day) Value: 7
  misc_feature: MA Experiment 20001450 PARAMETER Experiment Name: At_Far-red-induction_P Parameter: Light Value: Far-red vs. White
  misc_feature: MA Experiment 20001450 PARAMETER Experiment Name: At_Far-red-induction_P Parameter: Organism Value: A. thaliana
  misc_feature: MA Experiment 20001450 PARAMETER Experiment Name: At_Far-red-induction_P Parameter: Plant Line Value: Columbia
  misc_feature: MA Experiment 20001450 PARAMETER Experiment Name: At_Far-red-induction_P Parameter: Timepoint (hr) Value: 8
  misc_feature: MA Experiment 20001450 PARAMETER Experiment Name: At_Far-red-induction_P Parameter: Tissue Value: Whole Plant
  misc_feature: MA Experiment ID: 20001451 Result: Up-regulated in Transcription
  misc_feature: MA Experiment 20001451 PARAMETER Experiment Name: At_Far-red-induction_P Parameter: Age (day) Value: 7
  misc_feature: MA Experiment 20001451 PARAMETER Experiment Name: At_Far-red-induction_P Parameter: Light Value: Far-red vs. White
  misc_feature: MA Experiment 20001451 PARAMETER Experiment Name: At_Far-red-induction_P Parameter: Organism Value: A. thaliana
  misc_feature: MA Experiment 20001451 PARAMETER Experiment Name: At_Far-red-induction_P Parameter: Plant Line Value: Columbia
  misc_feature: MA Experiment 20001451 PARAMETER Experiment Name: At_Far-red-induction_P Parameter: Timepoint (hr) Value: 24
  misc_feature: MA Experiment 20001451 PARAMETER Experiment Name: At_Far-red-induction_P Parameter: Tissue Value: Whole Plant
  misc_feature: MA Experiment ID: 20001556 Result: Down-regulated in Transcription
  misc_feature: MA Experiment 20001556 PARAMETER Experiment Name: At_Drought_Soil_Dry_P Parameter: Age (day) Value: 26
  misc_feature: MA Experiment 20001556 PARAMETER Experiment Name: At_Drought_Soil_Dry_P Parameter: Organism Value: A. thaliana
  misc_feature: MA Experiment 20001556 PARAMETER Experiment Name: At_Drought_Soil_Dry_P Parameter: Plant Line Value: WS
  misc_feature: MA Experiment 20001556 PARAMETER Experiment Name: At_Drought_Soil_Dry_P Parameter: Post Timepoint (hr) Value: None
  misc_feature: MA Experiment 20001556 PARAMETER Experiment Name: At_Drought_Soil_Dry_P Parameter: Post-Treatment Value: None
  misc_feature: MA Experiment 20001556 PARAMETER Experiment Name: At_Drought_Soil_Dry_P Parameter: Timepoint (day) Value: 12
  misc_feature: MA Experiment 20001556 PARAMETER Experiment Name: At_Drought_Soil_Dry_P Parameter: Treatment Value: Drought vs. No Drought
  misc_feature: MA Experiment ID: 20001557 Result: Down-regulated in Transcription
  misc_feature: MA Experiment 20001557 PARAMETER Experiment Name: At_Drought_Soil_Dry_P Parameter: Age (day) Value: 27
  misc_feature: MA Experiment 20001557 PARAMETER Experiment Name: At_Drought_Soil_Dry_P Parameter: Organism Value: A. thaliana
  misc_feature: MA Experiment 20001557 PARAMETER Experiment Name: At_Drought_Soil_Dry_P Parameter: Plant Line Value: WS
  misc_feature: MA Experiment 20001557 PARAMETER Experiment Name: At_Drought_Soil_Dry_P Parameter: Post Timepoint (hr) Value: 3
  misc_feature: MA Experiment 20001557 PARAMETER Experiment Name: At_Drought_Soil_Dry_P Parameter: Post-Treatment Value: Re-Water vs. No Drought
  misc_feature: MA Experiment 20001557 PARAMETER Experiment Name: At_Drought_Soil_Dry_P Parameter: Timepoint (day) Value: 13
  misc_feature: MA Experiment 20001557 PARAMETER Experiment Name: At_Drought_Soil_Dry_P Parameter: Treatment Value: Drought vs. No Drought
  misc_feature: MA Experiment ID: 20001558 Result: Down-regulated in Transcription
  misc_feature: MA Experiment 20001558 PARAMETER Experiment Name: At_Drought_Soil_Dry_P Parameter: Age (day) Value: 27
  misc_feature: MA Experiment 20001558 PARAMETER Experiment Name: At_Drought_Soil_Dry_P Parameter: Organism Value: A. thaliana
  misc_feature: MA Experiment 20001558 PARAMETER Experiment Name: At_Drought_Soil_Dry_P Parameter: Plant Line Value: WS
  misc_feature: MA Experiment 20001558 PARAMETER Experiment Name: At_Drought_Soil_Dry_P Parameter: Post Timepoint (hr) Value: 6
  misc_feature: MA Experiment 20001558 PARAMETER Experiment Name: At_Drought_Soil_Dry_P Parameter: Post-Treatment Value: Re-Water vs. No Drought
  misc_feature: MA Experiment 20001558 PARAMETER Experiment Name: At_Drought_Soil_Dry_P Parameter: Timepoint (day) Value: 13
  misc_feature: MA Experiment 20001558 PARAMETER Experiment Name: At_Drought_Soil_Dry_P Parameter: Treatment Value: Drought vs. No Drought
  misc_feature: MA Experiment ID: 20001904 Result: Down-regulated in Transcription
  misc_feature: MA Experiment 20001904 PARAMETER Experiment Name: At_Drought_Reproduction_P Parameter: Age (day) Value: 37
  misc_feature: MA Experiment 20001904 PARAMETER Experiment Name: At_Drought_Reproduction_P Parameter: Organism Value: A. thaliana
  misc_feature: MA Experiment 20001904 PARAMETER Experiment Name: At_Drought_Reproduction_P Parameter: Plant Line Value: WS
  misc_feature: MA Experiment 20001904 PARAMETER Experiment Name: At_Drought_Reproduction_P Parameter: Timepoint (day) Value: 7
  misc_feature: MA Experiment 20001904 PARAMETER Experiment Name: At_Drought_Reproduction_P Parameter: Tissue Value: Rosettes
  misc_feature: MA Experiment 20001904 PARAMETER Experiment Name: At_Drought_Reproduction_P Parameter: Treatment Value: Drought vs. No Drought
aaatcaaaacctctcctatatctcttcaatctgatataactacccttctcaatggcttctaattaccgttttgccatcttcctcactctctttttcgccaccgctggtttctccgccgccgcgttggtcgaggagcagccgcttgttatgaaataccacaacggagttctgttgaaaggtaacatcacagtcaatctcgtatggtacgggaaattcacaccgatccaacggtccgtaatcgtcgatttcatccactcgctaaactccaaagacgttgcatcttccgccgcagttccttccgttgcttcgtggtggaagacgacggagaaatacaaaggtggctcttcaacactcgtcgtcgggaaacagcttctactcgagaactatcctctcggaaaatctctcaaaaatccttacctccgtgctttatccaccaaacttaacggcggtctccgttccataaccgtcgttctaacggcgaaagatgttaccgtcgaaagattctgtatgagccggtgcgggactcacggatcctccggttcgaatccccgtcgcgcagctaacggcgcggcttacgtatgggtcgggaactccgagacgcagtgccctggatattgcgcgtggccgtttcaccagccgatttacggaccacaaacgccgccgttagtagcgcctaacggtgacgttggagttgacggaatgattataaaccttgccacacttctagctaacaccgtgacgaatccgtttaataacggatattaccaaggcccaccaactgcaccgcttgaagctgtgtctgcttgtcctggtatattcgggtcaggttcttatccgggttacgcgggtcgggtacttgttgacaaaacaaccgggtctagttacaacgctcgtggactcgccggtaggaaatatctattgccggcgatgtgggatccgcagagttcgacgtgcaagactctggtttgatccaagggatgtgagtaagacacgtggcatagtagtgagagcgatgacgagatctagacggcatgtgtagtcaaaatcaagttgcacgcgagcgtgtgtataaaaaaatctttcgggtttgggtctcgggtttggattgtggatagggctctctctttgctttttgtcgttttgtaatgacgtgtaaaaactgtactcggaaatgtgaagaatgcatataaaataataaaaaatcattttgtttctact

SEQ ID NO: 23960 - protein, 305 aa, Arabidopsis thaliana
  peptide (1)..(305): Ceres Seq. ID no. 12326996
  misc_feature (33)..(305): Pfam Name: Phosphate-induced protein 1 conserved region Pfam Description: Phosphate-induced protein 1 conserved region
  misc_feature (68)..(301): Homolog of NCBI NO: 37533672 NR Description: putative phosphate-induced protein
  misc_feature (136)..(304): Homolog of NCBI NO: 13194680 NR Description: phosphate-induced protein 1-like protein
  misc_feature (7)..(236): Homolog of NCBI NO: 11762144 NR Description: At1g35140 [Arabidopsis thaliana]
  misc_feature (7)..(304): Homolog of NCBI NO: 15219504 NR Description: phosphate-induced (phi-1) protein, putative
  misc_feature (7)..(305): Homolog of NCBI NO: 21593043 NR Description: putative phi-1-like phosphate-induced protein
  misc_feature (7)..(305): Homolog of NCBI NO: 15236667 NR Description: putative phi-1-like phosphate-induced protein
  misc_feature (3)..(305): Homolog of NCBI NO: 3759184 NR Description: phi-1 [Nicotiana tabacum]
  misc_feature (1)..(305): Homolog of NCBI NO: 31074969 NR Description: erg-1 [Solanum tuberosum]
  misc_feature (1)..(305): Homolog of NCBI NO: 15242420 NR Description: putative protein
  misc_feature (1)..(305): Homolog of NCBI NO: 15237656 NR Description: phi-1-like protein
MASNYRFAIFLTLFFATAGFSAAALVEEQPLVMKYHNGVLLKGNITVNLVWYGKFTPIQRSVIVDFIHSLNSKDVASSAAVPSVASWWKTTEKYKGGSSTLVVGKQLLLENYPLGKSLKNPYLRALSTKLNGGLRSITVVLTAKDVTVERFCMSRCGTHGSSGSNPRRAANGAAYVWVGNSETQCPGYCAWPFHQPIYGPQTPPLVAPNGDVGVDGMIINLATLLANTVTNPFNNGYYQGPPTAPLEAVSACPGIFGSGSYPGYAGRVLVDKTTGSSYNARGLAGRKYLLPAMWDPQSSTCKTLV

SEQ ID NO: 23961 - protein, 273 aa, Arabidopsis thaliana
  peptide (1)..(273): Ceres Seq. ID no. 12326997
  misc_feature (1)..(273): Pfam Name: Phosphate-induced protein 1 conserved region Pfam Description: Phosphate-induced protein 1 conserved region
  misc_feature (36)..(269): Homolog of NCBI NO: 37533672 NR Description: putative phosphate-induced protein
  misc_feature (104)..(272): Homolog of NCBI NO: 13194680 NR Description: phosphate-induced protein 1-like protein
  misc_feature (1)..(204): Homolog of NCBI NO: 11762144 NR Description: At1g35140 [Arabidopsis thaliana]
  misc_feature (1)..(272): Homolog of NCBI NO: 15219504 NR Description: phosphate-induced (phi-1) protein, putative
  misc_feature (1)..(273): Homolog of NCBI NO: 21593043 NR Description: putative phi-1-like phosphate-induced protein
  misc_feature (1)..(273): Homolog of NCBI NO: 15236667 NR Description: putative phi-1-like phosphate-induced protein
  misc_feature (1)..(273): Homolog of NCBI NO: 3759184 NR Description: phi-1 [Nicotiana tabacum]
  misc_feature (1)..(273): Homolog of NCBI NO: 31074969 NR Description: erg-1 [Solanum tuberosum]
  misc_feature (1)..(273): Homolog of NCBI NO: 15242420 NR Description: putative protein
  misc_feature (1)..(273): Homolog of NCBI NO: 15237656 NR Description: phi-1-like protein
MKYHNGVLLKGNITVNLVWYGKFTPIQRSVIVDFIHSLNSKDVASSAAVPSVASWWKTTEKYKGGSSTLVVGKQLLLENYPLGKSLKNPYLRALSTKLNGGLRSITVVLTAKDVTVERFCMSRCGTHGSSGSNPRRAANGAAYVWVGNSETQCPGYCAWPFHQPIYGPQTPPLVAPNGDVGVDGMIINLATLLANTVTNPFNNGYYQGPPTAPLEAVSACPGIFGSGSYPGYAGRVLVDKTTGSSYNARGLAGRKYLLPAMWDPQSSTCKTLV

SEQ ID NO: 23962 - protein, 153 aa, Arabidopsis thaliana
  peptide (1)..(153): Ceres Seq. ID no. 12326998
  misc_feature (1)..(153): Pfam Name: Phosphate-induced protein 1 conserved region Pfam Description: Phosphate-induced protein 1 conserved region
  misc_feature (1)..(149): Homolog of NCBI NO: 37533672 NR Description: putative phosphate-induced protein
  misc_feature (1)..(152): Homolog of NCBI NO: 13194680 NR Description: phosphate-induced protein 1-like protein
  misc_feature (1)..(84): Homolog of NCBI NO: 11762144 NR Description: At1g35140 [Arabidopsis thaliana]
  misc_feature (1)..(152): Homolog of NCBI NO: 15219504 NR Description: phosphate-induced (phi-1) protein, putative
  misc_feature (1)..(153): Homolog of NCBI NO: 21593043 NR Description: putative phi-1-like phosphate-induced protein
  misc_feature (1)..(153): Homolog of NCBI NO: 15236667 NR Description: putative phi-1-like phosphate-induced protein
  misc_feature (1)..(153): Homolog of NCBI NO: 3759184 NR Description: phi-1 [Nicotiana tabacum]
  misc_feature (1)..(153): Homolog of NCBI NO: 31074969 NR Description: erg-1 [Solanum tuberosum]
  misc_feature (1)..(153): Homolog of NCBI NO: 15242420 NR Description: putative protein
  misc_feature (1)..(153): Homolog of NCBI NO: 15237656 NR Description: phi-1-like protein
MSRCGTHGSSGSNPRRAANGAAYVWVGNSETQCPGYCAWPFHQPIYGPQTPPLVAPNGDVGVDGMIINLATLLANTVTNPFNNGYYQGPPTAPLEAVSACPGIFGSGSYPGYAGRVLVDKTTGSSYNARGLAGRKYLLPAMWDPQSSTCKTLV

SEQ ID NO: 23963 - DNA, 1574 bp, Arabidopsis thaliana
  misc_feature (1)..(1574): Ceres Seq. ID no. 12328206
  misc_feature: MA Experiment ID: 108434 Result: Up-regulated in Transcription
  misc_feature: MA Experiment 108434 PARAMETER Experiment Name: At_Root_Tips_cDNA_P Parameter: Tissue Value: Root Tips
cttcttcctcctcctctgttcgtcaatcgccgatctcgttgcttcattttccttgagatcgattggtacaagtgttcatccaatggttggaggaggagttatccggcagcttcttagaaggaaacttcattcccaatcagtcgtgagctttttccctgttacatctttttgattttctgctgtagcttaggatctgtttgaagatagaatcatatgatttgttttggttctgtctacaccttcattgctctgagagattgtccttgaagaattgtaactggaattgttgtggcgttggagattttgggatataagaacttagacttattgatttgtgcttcgagagtatgattaatgttcgatttcttttcagaaaaagtagtcttttgatttgttgagcatacaccttcttgtgtcttggcctttttttttgttttcttactgttgttctgtattatctaccaccataggcaactccggtattgtcatggttgtcttcgaagaaagctaatgaagatgctgggtctgctggtttaagagcatttgctctcatgggtgctggtattaccggattattgagtttttctactgttgcatctgctgatgaggctgaacatggtctggagtgtcctaactacccttggccacatgagggcattctcagctcatatgaccatgcttcgatccgtcgtggtcaccaagtttatcagcaagtttgtgcgtcttgccattcgatgtctctgatctcatacagagacttggtgggtgttgcctacacagaggaagaggcgaaggccatggcagctgaaatcgaggttgttgatggaccaaatgatgagggtgagatgttcacccgacctggtaaactcagtgatcggcttcctgaaccatactcaaatgaatcggctgctaggttcgccaatggaggagcgtatccaccggatctaagtcttgtaactaaggcacgtcacaatggccaaaattatgtctttgctctgttgactggttatcgtgatcctcctgctggaatttcaatcagagaggggctacactacaatccttatttccctggtggagcaatcgctatgccaaaaatgctcaacgatgaagctgtggaatatgaagatggaactcctgcaacagaagcacagatgggtaaagatgttgtatccttcttgtcctgggcagctgaaccagagatggaagagaggaaattgatggggttcaaatggatattcttactgtctttggctctgcttcaagctgcgtattacaggagactgaaatggtcagtgctcaaatcccgtaagcttgttctcgacgttgttaactaatcccgtgaagatcaccttttctctgggtaataatcattaatcttgaaagggataaatggtgaatcccactttttgtctcaaaagacatgtttctttgtttattgtttagaaagtctaatgaggcaaagaagtaaagcttttttaacctcaagtcacacatgattttgagattatattatttctttttggtttgttgtctcctaaaccggactcggtttgtcttaataaaaatgtggtttt

SEQ ID NO: 23964 - protein, 260 aa, Arabidopsis thaliana
  peptide (1)..(260): Ceres Seq. ID no. 12328207
  misc_feature (25)..(250): Pfam Name: Cytochrome C1 family Pfam Description: Cytochrome C1 family
  misc_feature (1)..(260): Homolog of NCBI NO: 82264 NR Description: ubiquinol-cytochrome-c reductase (EC 1.10.2.2)
  misc_feature (1)..(260): Homolog of NCBI NO: 34907202 NR Description: putative cytochrome c1 precursor
  misc_feature (1)..(260): Homolog of NCBI NO: 117765 NR Description: Cytochrome c1, heme protein, mitochondrial
  misc_feature (1)..(260): Homolog of NCBI NO: 7547401 NR Description: cytochrome c1 precursor [Solanum tuberosum]
  misc_feature (1)..(260): Homolog of NCBI NO: 82263 NR Description: ubiquinol-cytochrome-c reductase (EC 1.10.2.2)
  misc_feature (1)..(260): Homolog of NCBI NO: 15809956 NR Description: AT3g27240/K17E12_6 [Arabidopsis thaliana]
  misc_feature (1)..(260): Homolog of NCBI NO: 21593678 NR Description: cytochrome c, putative [Arabidopsis thaliana]
  misc_feature (1)..(260): Homolog of NCBI NO: 15232125 NR Description: cytochrome c, putative
  misc_feature (1)..(260): Homolog of NCBI NO: 15215624 NR Description: AT5g40810/MHK7_4 [Arabidopsis thaliana]
  misc_feature (1)..(260): Homolog of NCBI NO: 15237497 NR Description: cytochrome c1 precursor
MGAGITGLLSFSTVASADEAEHGLECPNYPWPHEGILSSYDHASIRRGHQVYQQVCASCHSMSLISYRDLVGVAYTEEEAKAMAAEIEVVDGPNDEGEMFTRPGKLSDRLPEPYSNESAARFANGGAYPPDLSLVTKARHNGQNYVFALLTGYRDPPAGISIREGLHYNPYFPGGAIAMPKMLNDEAVEYEDGTPATEAQMGKDVVSFLSWAAEPEMEERKLMGFKWIFLLSLALLQAAYYRRLKWSVLKSRKLVLDVVN

SEQ ID NO: 23965 - protein, 199 aa, Arabidopsis thaliana
  peptide (1)..(199): Ceres Seq. ID no. 12328208
  misc_feature (1)..(189): Pfam Name: Cytochrome C1 family Pfam Description: Cytochrome C1 family
  misc_feature (1)..(199): Homolog of NCBI NO: 82264 NR Description: ubiquinol-cytochrome-c reductase (EC 1.10.2.2)
  misc_feature (1)..(199): Homolog of NCBI NO: 34907202 NR Description: putative cytochrome c1 precursor
  misc_feature (1)..(199): Homolog of NCBI NO: 117765 NR Description: Cytochrome c1, heme protein, mitochondrial
  misc_feature (1)..(199): Homolog of NCBI NO: 7547401 NR Description: cytochrome c1 precursor [Solanum tuberosum]
  misc_feature (1)..(199): Homolog of NCBI NO: 82263 NR Description: ubiquinol-cytochrome-c reductase (EC 1.10.2.2)
  misc_feature (1)..(199): Homolog of NCBI NO: 15809956 NR Description: AT3g27240/K17E12_6 [Arabidopsis thaliana]
  misc_feature (1)..(199): Homolog of NCBI NO: 21593678 NR Description: cytochrome c, putative [Arabidopsis thaliana]
  misc_feature (1)..(199): Homolog of NCBI NO: 15232125 NR Description: cytochrome c, putative
  misc_feature (1)..(199): Homolog of NCBI NO: 15215624 NR Description: AT5g40810/MHK7_4 [Arabidopsis thaliana]
  misc_feature (1)..(199): Homolog of NCBI NO: 15237497 NR Description: cytochrome c1 precursor
MSLISYRDLVGVAYTEEEAKAMAAEIEVVDGPNDEGEMFTRPGKLSDRLPEPYSNESAARFANGGAYPPDLSLVTKARHNGQNYVFALLTGYRDPPAGISIREGLHYNPYFPGGAIAMPKMLNDEAVEYEDGTPATEAQMGKDVVSFLSWAAEPEMEERKLMGFKWIFLLSLALLQAAYYRRLKWSVLKSRKLVLDVVN

SEQ ID NO: 23966 - protein, 178 aa, Arabidopsis thaliana
  peptide (1)..(178): Ceres Seq. ID no. 12328209
  misc_feature (1)..(168): Pfam Name: Cytochrome C1 family Pfam Description: Cytochrome C1 family
  misc_feature (1)..(178): Homolog of NCBI NO: 117765 NR Description: Cytochrome c1, heme protein, mitochondrial
  misc_feature (1)..(178): Homolog of NCBI NO: 7547401 NR Description: cytochrome c1 precursor [Solanum tuberosum]
  misc_feature (1)..(178): Homolog of NCBI NO: 82263 NR Description: ubiquinol-cytochrome-c reductase (EC 1.10.2.2)
  misc_feature (1)..(178): Homolog of NCBI NO: 15809956 NR Description: AT3g27240/K17E12_6 [Arabidopsis thaliana]
  misc_feature (1)..(178): Homolog of NCBI NO: 82264 NR Description: ubiquinol-cytochrome-c reductase (EC 1.10.2.2)
  misc_feature (1)..(178): Homolog of NCBI NO: 34907202 NR Description: putative cytochrome c1 precursor
  misc_feature (1)..(178): Homolog of NCBI NO: 21593678 NR Description: cytochrome c, putative [Arabidopsis thaliana]
  misc_feature (1)..(178): Homolog of NCBI NO: 15232125 NR Description: cytochrome c, putative
  misc_feature (1)..(178): Homolog of NCBI NO: 15215624 NR Description: AT5g40810/MHK7_4 [Arabidopsis thaliana]
  misc_feature (1)..(178): Homolog of NCBI NO: 15237497 NR Description: cytochrome c1 precursor
MAAEIEVVDGPNDEGEMFTRPGKLSDRLPEPYSNESAARFANGGAYPPDLSLVTKARHNGQNYVFALLTGYRDPPAGISIREGLHYNPYFPGGAIAMPKMLNDEAVEYEDGTPATEAQMGKDVVSFLSWAAEPEMEERKLMGFKWIFLLSLALLQAAYYRRLKWSVLKSRKLVLDVVN

SEQ ID NO: 23967 - DNA, 1373 bp, Arabidopsis thaliana
  misc_feature (1)..(1373): Ceres Seq. ID no. 13487812
  misc_feature: MA Experiment ID: 108595 Result: Up-regulated in Transcription
  misc_feature: MA Experiment 108595 PARAMETER Experiment Name: At_Ler-pi_Ovule_cDNA_P Parameter: Plant Line Value: null
  misc_feature: MA Experiment ID: 20000111 Result: Up-regulated in Transcription
  misc_feature: MA Experiment 20000111 PARAMETER Experiment Name: At_42deg_Heat_cDNA_P Parameter: Temperature (deg C) Value: 42 vs. 22
  misc_feature: MA Experiment 20000111 PARAMETER Experiment Name: At_42deg_Heat_cDNA_P Parameter: Timepoint (hr) Value: 6
  misc_feature: MA Experiment 20000111 PARAMETER Experiment Name: At_42deg_Heat_cDNA_P Parameter: Tissue Value: Aerial
  misc_feature: MA Experiment ID: 20000112 Result: Up-regulated in Transcription
  misc_feature: MA Experiment 20000112 PARAMETER Experiment Name: At_42deg_Heat_cDNA_P Parameter: Temperature (deg C) Value: 42 vs. 22
  misc_feature: MA Experiment 20000112 PARAMETER Experiment Name: At_42deg_Heat_cDNA_P Parameter: Timepoint (hr) Value: 2
  misc_feature: MA Experiment 20000112 PARAMETER Experiment Name: At_42deg_Heat_cDNA_P Parameter: Tissue Value: Aerial
  misc_feature: MA Experiment ID: 20000113 Result: Up-regulated in Transcription
  misc_feature: MA Experiment 20000113 PARAMETER Experiment Name: At_42deg_Heat_cDNA_P Parameter: Temperature (deg C) Value: 42 vs. 22
  misc_feature: MA Experiment 20000113 PARAMETER Experiment Name: At_42deg_Heat_cDNA_P Parameter: Timepoint (hr) Value: 8
  misc_feature: MA Experiment 20000113 PARAMETER Experiment Name: At_42deg_Heat_cDNA_P Parameter: Tissue Value: Aerial
  misc_feature: MA Experiment ID: 20000173 Result: Down-regulated in Transcription
  misc_feature: MA Experiment 20000173 PARAMETER Experiment Name: At_42deg_Heat_P Parameter: Age (day) Value: 14
  misc_feature: MA Experiment 20000173 PARAMETER Experiment Name: At_42deg_Heat_P Parameter: Organism Value: A. thaliana
  misc_feature: MA Experiment 20000173 PARAMETER Experiment Name: At_42deg_Heat_P Parameter: Plant Line Value: WS
  misc_feature: MA Experiment 20000173 PARAMETER Experiment Name: At_42deg_Heat_P Parameter: Temperature (deg C) Value: 42 vs. 22
  misc_feature: MA Experiment 20000173 PARAMETER Experiment Name: At_42deg_Heat_P Parameter: Timepoint (hr) Value: 6
  misc_feature: MA Experiment 20000173 PARAMETER Experiment Name: At_42deg_Heat_P Parameter: Tissue Value: Aerial
gtgaatcgaaagattaaaggtcaaatttttgtgtcttctcttcctctgtctcatgccacaatttttagatttcaaactttgatccatgacactctccatagcttcctctctcattcccttcagctttctcagagaattgaagtcgagacattagaagtgtttgttgtgtgtgtgtgtgtgtttctatagaatttttgaattttgtgataaaattgtgtgaatgggagctccaaagctgaagtggacaccagaagaagaaacagctcttaaagctggagtacttaaacatggaactggaaaatggcgtaccattctctcagatcctgtgtatagcacaattctgaagtctcgttctaatgtggatctcaaggacaaatggagaaatataagtgtaacagctttatggggatctaggaagaaggctaagcttgctcttaaaagaactcctttgtcgggtagtaggcaagacgataacgctacagctattaccattgtgtctttagctaatggtgatgtaggaggacaacagattgatgcaccatctcctcctgcaggttcttgtgaacctccaagaccttctacaagtgtggataagattatattggaggctattaccagcttgaagagaccatttggtcctgacggaaagtcgatcttgatgtatatagaggagaatttcaagatgcaaccggatatgaaacggcttgtgacttcaaggctgaagtatttgacaaatgttggaacattagttaagaaaaagcacaaatacaggatttctcagaattatatggctgaaggagaaggacaaaggtctcctcaactcttgttggaaggaaacaaggaaaacactccgaaaccggaggagaatggcgtcaaaaatcttactaaatcccaagtaggtggagaagttatgataatgggtatgacagaaaaagaagctgctgcagcagctgcaagagctgtggcagaagcagaatttgcaatggcagaagctgaagaagcagcaagagaggcagataaagcagaagccgaagctgaagctgcccatatttttgcaaaagcggcgatgaaagctgtgaagtatagaatgcatagccaaactcggtaagaattaagaaaatcattgatgttgtatcggttgatatatcttcaattcttcatgttatgtcaagtttcgatcttgcatcgaaatcaacattttacaatcgccgcagtgtttttagtcagtaacagtgtcttctaactcagatgattatgtaaaacctgttccttctcttgcttctgttgatctggttttgttagtaacttcacaggtttctcgtgaaccattttgaaactggtttgaaaagatataaataaggcctttgatttgt

SEQ ID NO: 23968 - protein, 295 aa, Arabidopsis thaliana
  peptide (1)..(295): Ceres Seq. ID no. 13487813
  misc_feature (5)..(57): Pfam Name: Myb-like DNA-binding domain Pfam Description: Myb-like DNA-binding domain
  misc_feature (1)..(289): Homolog of NCBI NO: 34105723 NR Description: Single myb histone 6 [Zea mays subsp. mays]
  misc_feature (1)..(289): Homolog of NCBI NO: 33286863 NR Description: Single myb histone 1 [Zea mays subsp. mays]
  misc_feature (1)..(292): Homolog of NCBI NO: 34912214 NR Description: putative telomere repeat binding factor
  misc_feature (1)..(289): Homolog of NCBI NO: 18481420 NR Description: telomere repeat binding factor 1 [Arabidopsis
  misc_feature (1)..(289): Homolog of NCBI NO: 21593573 NR Description: DNA-binding protein PcMYB1, putative [Arabidopsis
  misc_feature (1)..(289): Homolog of NCBI NO: 25405344 NR Description: hypothetical protein F2J10.16 [imported] -
  misc_feature (1)..(289): Homolog of NCBI NO: 18402853 NR Description: DNA-binding protein PcMYB1 -related [Arabidopsis
  misc_feature (1)..(292): Homolog of NCBI NO: 18481426 NR Description: telomere repeat binding factor 2 [Arabidopsis
  misc_feature (1)..(292): Homolog of NCBI NO: 15240783 NR Description: telomere repeat binding factor 2 (TRB2)
  misc_feature (1)..(295): Homolog of NCBI NO: 15229625 NR Description: MYB -related protein [Arabidopsis thaliana]
MGAPKLKWTPEEETALKAGVLKHGTGKWRTILSDPVYSTILKSRSNVDLKDKWRNISVTALWGSRKKAKLALKRTPLSGSRQDDNATAITIVSLANGDVGGQQIDAPSPPAGSCEPPRPSTSVDKIILEAITSLKRPFGPDGKSILMYIEENFKMQPDMKRLVTSRLKYLTNVGTLVKKKHKYRISQNYMAEGEGQRSPQLLLEGNKENTPKPEENGVKNLTKSQVGGEVMIMGMTEKEAAAAAARAVAEAEFAMAEAEEAAREADKAEAEAEAAHIFAKAAMKAVKYRMHSQTR

SEQ ID NO: 23969 - protein, 149 aa, Arabidopsis thaliana
  peptide (1)..(149): Ceres Seq. ID no. 13487814
  misc_feature (1)..(143): Homolog of NCBI NO: 34105723 NR Description: Single myb histone 6 [Zea mays subsp. mays]
  misc_feature (1)..(143): Homolog of NCBI NO: 33286863 NR Description: Single myb histone 1 [Zea mays subsp. mays]
  misc_feature (1)..(146): Homolog of NCBI NO: 34912214 NR Description: putative telomere repeat binding factor
  misc_feature (1)..(143): Homolog of NCBI NO: 18481420 NR Description: telomere repeat binding factor 1 [Arabidopsis
  misc_feature (1)..(143): Homolog of NCBI NO: 21593573 NR Description: DNA-binding protein PcMYB1, putative [Arabidopsis
  misc_feature (1)..(143): Homolog of NCBI NO: 25405344 NR Description: hypothetical protein F2J10.16 [imported] -
  misc_feature (1)..(143): Homolog of NCBI NO: 18402853 NR Description: DNA-binding protein PcMYB1 -related [Arabidopsis
  misc_feature (1)..(146): Homolog of NCBI NO: 18481426 NR Description: telomere repeat binding factor 2 [Arabidopsis
  misc_feature (1)..(146): Homolog of NCBI NO: 15240783 NR Description: telomere repeat binding factor 2 (TRB2)
  misc_feature (1)..(149): Homolog of NCBI NO: 15229625 NR Description: MYB -related protein [Arabidopsis thaliana]
MYIEENFKMQPDMKRLVTSRLKYLTNVGTLVKKKHKYRISQNYMAEGEGQRSPQLLLEGNKENTPKPEENGVKNLTKSQVGGEVMIMGMTEKEAAAAAARAVAEAEFAMAEAEEAAREADKAEAEAEAAHIFAKAAMKAVKYRMHSQTR

SEQ ID NO: 23970 - DNA, 1314 bp, Arabidopsis thaliana
  misc_feature (1)..(1314): Ceres Seq. ID no. 13504718
  misc_feature: MA Experiment ID: 108435 Result: Up-regulated in Transcription
  misc_feature: MA Experiment 108435 PARAMETER Experiment Name: At_stm_Mutants_cDNA_P Parameter: Plant Line Value: wt Landsburg vs stm
  misc_feature: MA Experiment 108435 PARAMETER Experiment Name: At_stm_Mutants_cDNA_P Parameter: Tissue Value: Shoot Apical Meristem Region
  misc_feature: MA Experiment ID: 108573 Result: Up-regulated in Transcription
  misc_feature: MA Experiment 108573 PARAMETER Experiment Name: At_Drought_cDNA_P Parameter: Timepoint (hr) Value: 6
  misc_feature: MA Experiment 108573 PARAMETER Experiment Name: At_Drought_cDNA_P Parameter: Tissue Value: Aerial
  misc_feature: MA Experiment 108573 PARAMETER Experiment Name: At_Drought_cDNA_P Parameter: Treatment Value: Drought vs. No Drought
  misc_feature: MA Experiment ID: 108576 Result: Up-regulated in Transcription
  misc_feature: MA Experiment 108576 PARAMETER Experiment Name: At_42deg_Heat_cDNA_P Parameter: Temperature (deg C) Value: 42 vs. 22
  misc_feature: MA Experiment 108576 PARAMETER Experiment Name: At_42deg_Heat_cDNA_P Parameter: Timepoint (hr) Value: 1
  misc_feature: MA Experiment 108576 PARAMETER Experiment Name: At_42deg_Heat_cDNA_P Parameter: Tissue Value: Aerial
  misc_feature: MA Experiment ID: 20000185 Result: Down-regulated in Transcription
  misc_feature: MA Experiment 20000185 PARAMETER Experiment Name: At_Roots__P Parameter: Age (day) Value: 7 vs. 21
  misc_feature: MA Experiment 20000185 PARAMETER Experiment Name: At_Roots__P Parameter: Organism Value: A. thaliana
  misc_feature: MA Experiment 20000185 PARAMETER Experiment Name: At_Roots__P Parameter: Tissue Value: Roots vs. Whole Plant
  misc_feature: MA Experiment ID: 20000438 Result: Up-regulated in Transcription
  misc_feature: MA Experiment 20000438 PARAMETER Experiment Name: At_Shoots__P Parameter: Age (day) Value: 14
  misc_feature: MA Experiment 20000438 PARAMETER Experiment Name: At_Shoots__P Parameter: Tissue Value: Shoots vs. Whole Plant
  misc_feature: MA Experiment ID: 20000439 Result: Down-regulated in Transcription
  misc_feature: MA Experiment 20000439 PARAMETER Experiment Name: At_Roots__P Parameter: Age (day) Value: 14 vs. 21
  misc_feature: MA Experiment 20000439 PARAMETER Experiment Name: At_Roots__P Parameter: Organism Value: A. thaliana
  misc_feature: MA Experiment 20000439 PARAMETER Experiment Name: At_Roots__P Parameter: Tissue Value: Roots vs. Whole Plant
  misc_feature: MA Experiment ID: 20001905 Result: Up-regulated in Transcription
  misc_feature: MA Experiment 20001905 PARAMETER Experiment Name: At_Drought_Reproduction_P Parameter: Age (day) Value: 40
  misc_feature: MA Experiment 20001905 PARAMETER Experiment Name: At_Drought_Reproduction_P Parameter: Organism Value: A. thaliana
  misc_feature: MA Experiment 20001905 PARAMETER Experiment Name: At_Drought_Reproduction_P Parameter: Plant Line Value: WS
  misc_feature: MA Experiment 20001905 PARAMETER Experiment Name: At_Drought_Reproduction_P Parameter: Timepoint (day) Value: 10
  misc_feature: MA Experiment 20001905 PARAMETER Experiment Name: At_Drought_Reproduction_P Parameter: Tissue Value: Rosettes
  misc_feature: MA Experiment 20001905 PARAMETER Experiment Name: At_Drought_Reproduction_P Parameter: Treatment Value: Drought vs. No Drought
  misc_feature: MA Experiment ID: 20001911 Result: Up-regulated in Transcription
  misc_feature: MA Experiment 20001911 PARAMETER Experiment Name: At_Drought_Reproduction_P Parameter: Age (day) Value: 40
  misc_feature: MA Experiment 20001911 PARAMETER Experiment Name: At_Drought_Reproduction_P Parameter: Organism Value: A. thaliana
  misc_feature: MA Experiment 20001911 PARAMETER Experiment Name: At_Drought_Reproduction_P Parameter: Plant Line Value: WS
  misc_feature: MA Experiment 20001911 PARAMETER Experiment Name: At_Drought_Reproduction_P Parameter: Timepoint (day) Value: 10
  misc_feature: MA Experiment 20001911 PARAMETER Experiment Name: At_Drought_Reproduction_P Parameter: Tissue Value: Flowers
  misc_feature: MA Experiment 20001911 PARAMETER Experiment Name: At_Drought_Reproduction_P Parameter: Treatment Value: Drought vs. No Drought
ctgcttggtttctctcgttctcggtctgatcattgcatcatcatgtctggagaatcaagctctggttctaccgaacattgcatcaaagttgtaccgacacacggtggccgctatgttcagtacaacgtttatggacaactctttgaagtttccagaaagtatgtccctcctattcgtcccattggtagaggcgcttgcggtattgtctgtgctgcggtgaactcagtgactggagagaaagtggctattaagaagatcggtaatgcttttgataacatcatcgatgctaagagaacgctacgtgaaattaaacttctcaggcatatggatcatgagaacgttataaccatcaaagatattgtaagacctccgcaacgagatatcttcaatgatgtctacattgtctatgagttaatggacactgatcttcagcgaatcctccgttctaaccaaacactgaccagtgatcaatgccgtttcctagtataccagctcttaagagggctcaaatacgtgcactcggccaacatattacatcgtgatctaaggccaagcaacgtgctacttaactcgaaaaacgagctaaagattggtgattttgggcttgcaagaacaacttccgacacagacttcatgactgaatatgtcgttacccgttggtacagggctcctgagttgcttcttaactgctcagagtacaccgcagctattgatatttggtctgttggctgcatactcggcgaaatcatgacgggacaaccgttgtttccaggcaaagattatgttcatcagcttaggcttataacagagcttgtaggctctccagacaattccagcctcggcttccttcgcagtgacaacgcaagaagatacgtcaggcaacttccgcgatacccgaaacaacagtttgctgctagattcccgaaaatgcccactacggctatcgatttgcttgagagaatgctcgtctttgatcctaaccggcgcatctcagtcgatgaagcccttggccatgcttacctatcaccgcaccatgatgtggccaaagaaccggtctgttcgactcctttcagctttgatttcgaacatccttcttgcacagaagaacacataaaggagcttatctacaaggagtctgtcaaattcaatcctgaccactgagagagaaacatgtttgaatgatttgattcctttttaaaagtctgctccgtttggtttgatctaagattcctttatattgaatctaaactcattttatctttgattgaataattgctatgatgatacacacatatttatccatatcgtaagccc

SEQ ID NO: 23971 - protein, 386 aa, Arabidopsis thaliana
  peptide (1)..(386): Ceres Seq. ID no. 13504719
  misc_feature (55)..(341): Pfam Name: Protein kinase domain Pfam Description: Protein kinase domain
  misc_feature (17)..(386): Homolog of NCBI NO: 21165527 NR Description: mitogen-activated protein kinase [Solanum
  misc_feature (19)..(385): Homolog of NCBI NO: 27312014 NR Description: mitogen-activated protein kinase [Malus
  misc_feature (31)..(384): Homolog of NCBI NO: 18378855 NR Description: mitogen-activated protein kinase (MAPK), putative
  misc_feature (23)..(385): Homolog of NCBI NO: 2499613 NR Description: MITOGEN-ACTIVATED PROTEIN KINASE HOMOLOG MMK2
  misc_feature (23)..(385): Homolog of NCBI NO: 2129855 NR Description: mitogen-activated protein kinase MMK2 (EC
  misc_feature (15)..(384): Homolog of NCBI NO: 2129645 NR Description: mitogen-activated protein kinase 4 (EC 2.7.1.-) -
  misc_feature (15)..(384): Homolog of NCBI NO: 15234152 NR Description: mitogen-activated protein kinase (MAPK), putative
  misc_feature (18)..(385): Homolog of NCBI NO: 25052804 NR Description: mitogen-activated protein kinase 4 [Petroselinum
  misc_feature (15)..(386): Homolog of NCBI NO: 30690210 NR Description: mitogen-activated protein kinase (MAPK), putative
  misc_feature (1)..(386): Homolog of NCBI NO: 25387109 NR Description: probable mitogen-activated protein kinase
LLGFSRSRSDHCIIMSGESSSGSTEHCIKVVPTHGGRYVQYNVYGQLFEVSRKYVPPIRPIGRGACGIVCAAVNSVTGEKVAIKKIGNAFDNIIDAKRTLREIKLLRHMDHENVITIKDIVRPPQRDIFNDVYIVYELMDTDLQRILRSNQTLTSDQCRFLVYQLLRGLKYVHSANILHRDLRPSNVLLNSKNELKIGDFGLARTTSDTDFMTEYVVTRWYRAPELLLNCSEYTAAIDIWSVGCILGEIMTGQPLFPGKDYVHQLRLITELVGSPDNSSLGFLRSDNARRYVRQLPRYPKQQFAARFPKMPTTAIDLLERMLVFDPNRRISVDEALGHAYLSPHHDVAKEPVCSTPFSFDFEHPSCTEEHIKELIYKESVKFNPDH

SEQ ID NO: 23972 - protein, 372 aa, Arabidopsis thaliana
  peptide (1)..(372): Ceres Seq. ID no. 13504720
  misc_feature (41)..(327): Pfam Name: Protein kinase domain Pfam Description: Protein kinase domain
  misc_feature (3)..(372): Homolog of NCBI NO: 21165527 NR Description: mitogen-activated protein kinase [Solanum
  misc_feature (5)..(371): Homolog of NCBI NO: 27312014 NR Description: mitogen-activated protein kinase [Malus
  misc_feature (17)..(370): Homolog of NCBI NO: 18378855 NR Description: mitogen-activated protein kinase (MAPK), putative
  misc_feature (9)..(371): Homolog of NCBI NO: 2499613 NR Description: MITOGEN-ACTIVATED PROTEIN KINASE HOMOLOG MMK2
  misc_feature (9)..(371): Homolog of NCBI NO: 2129855 NR Description: mitogen-activated protein kinase MMK2 (EC
  misc_feature (1)..(370): Homolog of NCBI NO: 2129645 NR Description: mitogen-activated protein kinase 4 (EC 2.7.1.-) -
  misc_feature (1)..(370): Homolog of NCBI NO: 15234152 NR Description: mitogen-activated protein kinase (MAPK), putative
  misc_feature (4)..(371): Homolog of NCBI NO: 25052804 NR Description: mitogen-activated protein kinase 4 [Petroselinum
  misc_feature (1)..(372): Homolog of NCBI NO: 30690210 NR Description: mitogen-activated protein kinase (MAPK), putative
  misc_feature (1)..(372): Homolog of NCBI NO: 25387109 NR Description: probable mitogen-activated protein kinase
MSGESSSGSTEHCIKVVPTHGGRYVQYNVYGQLFEVSRKYVPPIRPIGRGACGIVCAAVNSVTGEKVAIKKIGNAFDNIIDAKRTLREIKLLRHMDHENVITIKDIVRPPQRDIFNDVYIVYELMDTDLQRILRSNQTLTSDQCRFLVYQLLRGLKYVHSANILHRDLRPSNVLLNSKNELKIGDFGLARTTSDTDFMTEYVVTRWYRAPELLLNCSEYTAAIDIWSVGCILGEIMTGQPLFPGKDYVHQLRLITELVGSPDNSSLGFLRSDNARRYVRQLPRYPKQQFAARFPKMPTTAIDLLERMLVFDPNRRISVDEALGHAYLSPHHDVAKEPVCSTPFSFDFEHPSCTEEHIKELIYKESVKFNPDH

SEQ ID NO: 23973 - protein, 278 aa, Arabidopsis thaliana
  peptide (1)..(278): Ceres Seq. ID no. 13504721
  misc_feature (1)..(233): Pfam Name: Protein kinase domain Pfam Description: Protein kinase domain
  misc_feature (1)..(278): Homolog of NCBI NO: 21165527 NR Description: mitogen-activated protein kinase [Solanum
  misc_feature (1)..(277): Homolog of NCBI NO: 27312014 NR Description: mitogen-activated protein kinase [Malus
  misc_feature (1)..(276): Homolog of NCBI NO: 18378855 NR Description: mitogen-activated protein kinase (MAPK), putative
  misc_feature (1)..(277): Homolog of NCBI NO: 2499613 NR Description: MITOGEN-ACTIVATED PROTEIN KINASE HOMOLOG MMK2
  misc_feature (1)..(277): Homolog of NCBI NO: 2129855 NR Description: mitogen-activated protein kinase MMK2 (EC
  misc_feature (1)..(276): Homolog of NCBI NO: 2129645 NR Description: mitogen-activated protein kinase 4 (EC 2.7.1.-) -
  misc_feature (1)..(276): Homolog of NCBI NO: 15234152 NR Description: mitogen-activated protein kinase (MAPK), putative
  misc_feature (1)..(277): Homolog of NCBI NO: 25052804 NR Description: mitogen-activated protein kinase 4 [Petroselinum
  misc_feature (1)..(278): Homolog of NCBI NO: 30690210 NR Description: mitogen-activated protein kinase (MAPK), putative
  misc_feature (1)..(278): Homolog of NCBI NO: 25387109 NR Description: probable mitogen-activated protein kinase
MDHENVITIKDIVRPPQRDIFNDVYIVYELMDTDLQRILRSNQTLTSDQCRFLVYQLLRGLKYVHSANILHRDLRPSNVLLNSKNELKIGDFGLARTTSDTDFMTEYVVTRWYRAPELLLNCSEYTAAIDIWSVGCILGEIMTGQPLFPGKDYVHQLRLITELVGSPDNSSLGFLRSDNARRYVRQLPRYPKQQFAARFPKMPTTAIDLLERMLVFDPNRRISVDEALGHAYLSPHHDVAKEPVCSTPFSFDFEHPSCTEEHIKELIYKESVKFNPDH

SEQ ID NO: 23974 - DNA, 1473 bp, Arabidopsis thaliana
  misc_feature (1)..(1473): Ceres Seq. ID no. 12357838
  misc_feature: MA Experiment ID: 108434 Result: Up-regulated in Transcription
  misc_feature: MA Experiment 108434 PARAMETER Experiment Name: At_Root_Tips_cDNA_P Parameter: Tissue Value: Root Tips
  misc_feature: MA Experiment ID: 108461 Result: Up-regulated in Transcription
  misc_feature: MA Experiment 108461 PARAMETER Experiment Name: At_Germinating_Seeds_cDNA_P Parameter: Age (day) Value: 1 vs. 0
  misc_feature: MA Experiment 108461 PARAMETER Experiment Name: At_Germinating_Seeds_cDNA_P Parameter: Tissue Value: Germinating Seeds
  misc_feature: MA Experiment ID: 108463 Result: Up-regulated in Transcription
  misc_feature: MA Experiment 108463 PARAMETER Experiment Name: At_Germinating_Seeds_cDNA_P Parameter: Age (day) Value: 3 vs. 0
  misc_feature: MA Experiment 108463 PARAMETER Experiment Name: At_Germinating_Seeds_cDNA_P Parameter: Tissue Value: Germinating Seeds
  misc_feature: MA Experiment ID: 108605 Result: Up-regulated in Transcription
  misc_feature: MA Experiment 108605 PARAMETER Experiment Name: At_100uM_ABA_cDNA_P Parameter: Timepoint (hr) Value: 6
  misc_feature: MA Experiment 108605 PARAMETER Experiment Name: At_100uM_ABA_cDNA_P Parameter: Tissue Value: Aerial
  misc_feature: MA Experiment 108605 PARAMETER Experiment Name: At_100uM_ABA_cDNA_P Parameter: Treatment Value: 100uM ABA vs. No Treatment
  misc_feature: MA Experiment ID: 20000111 Result: Down-regulated in Transcription
  misc_feature: MA Experiment 20000111 PARAMETER Experiment Name: At_42deg_Heat_cDNA_P Parameter: Temperature (deg C) Value: 42 vs. 22
  misc_feature: MA Experiment 20000111 PARAMETER Experiment Name: At_42deg_Heat_cDNA_P Parameter: Timepoint (hr) Value: 6
  misc_feature: MA Experiment 20000111 PARAMETER Experiment Name: At_42deg_Heat_cDNA_P Parameter: Tissue Value: Aerial
  misc_feature: MA Experiment ID: 20000112 Result: Down-regulated in Transcription
  misc_feature: MA Experiment 20000112 PARAMETER Experiment Name: At_42deg_Heat_cDNA_P Parameter: Temperature (deg C) Value: 42 vs. 22
  misc_feature: MA Experiment 20000112 PARAMETER Experiment Name: At_42deg_Heat_cDNA_P Parameter: Timepoint (hr) Value: 2
  misc_feature: MA Experiment 20000112 PARAMETER Experiment Name: At_42deg_Heat_cDNA_P Parameter: Tissue Value: Aerial
  misc_feature: MA Experiment ID: 20000113 Result: Down-regulated in Transcription
  misc_feature: MA Experiment 20000113 PARAMETER Experiment Name: At_42deg_Heat_cDNA_P Parameter: Temperature (deg C) Value: 42 vs. 22
  misc_feature: MA Experiment 20000113 PARAMETER Experiment Name: At_42deg_Heat_cDNA_P Parameter: Timepoint (hr) Value: 8
  misc_feature: MA Experiment 20000113 PARAMETER Experiment Name: At_42deg_Heat_cDNA_P Parameter: Tissue Value: Aerial
  misc_feature: MA Experiment ID: 20000180 Result: Up-regulated in Transcription
  misc_feature: MA Experiment 20000180 PARAMETER Experiment Name: At_Germinating_Seeds_P Parameter: Age (hr) Value: 24 vs. 0
  misc_feature: MA Experiment 20000180 PARAMETER Experiment Name: At_Germinating_Seeds_P Parameter: Tissue Value: Germinating Seeds
  misc_feature: MA Experiment ID: 20000185 Result: Up-regulated in Transcription
  misc_feature: MA Experiment 20000185 PARAMETER Experiment Name: At_Roots__P Parameter: Age (day) Value: 7 vs. 21
  misc_feature: MA Experiment 20000185 PARAMETER Experiment Name: At_Roots__P Parameter: Organism Value: A. thaliana
  misc_feature: MA Experiment 20000185 PARAMETER Experiment Name: At_Roots__P Parameter: Tissue Value: Roots vs. Whole Plant
  misc_feature: MA Experiment ID: 20000227 Result: Up-regulated in Transcription
  misc_feature: MA Experiment 20000227 PARAMETER Experiment Name: At_Root-Tips-vs-Tops_P Parameter: Tissue Value: Root Tips vs. Root Tops
  misc_feature: MA Experiment ID: 20000234 Result: Up-regulated in Transcription
  misc_feature: MA Experiment 20000234 PARAMETER Experiment Name: At_Siliques_P Parameter: Age (day) Value: 21
  misc_feature: MA Experiment 20000234 PARAMETER Experiment Name: At_Siliques_P Parameter: Organism Value: A. thaliana
  misc_feature: MA Experiment 20000234 PARAMETER Experiment Name: At_Siliques_P Parameter: Plant Line Value: WS
  misc_feature: MA Experiment 20000234 PARAMETER Experiment Name: At_Siliques_P Parameter: Tissue Value: Less Than 5mm Siliques vs. Whole Plant
  misc_feature: MA Experiment ID: 20000265 Result: Up-regulated in Transcription
  misc_feature: MA Experiment 20000265 PARAMETER Experiment Name: At_Open_Flower_P Parameter: Age (day) Value: 21
  misc_feature: MA Experiment 20000265 PARAMETER Experiment Name: At_Open_Flower_P Parameter: Plant Line Value: WS
  misc_feature: MA Experiment 20000265 PARAMETER Experiment Name: At_Open_Flower_P Parameter: Tissue Value: Closed Flower vs. Whole Plant
attttcaactactttgaagctgcagatctcttttggagattcacatggcgacggagaaatgggtgttcatggtgacagcgcaaactccgacgaacattgcggtgattaagtattggggaaagagacatgaagtccggattctccccgttaacgatagcattagcgtaactcttgatcctgatcatctctgcacagtcactactgttgccgttagtcctgcttttgatcgggatcgaatgtggctcaatggcaaggaaatatctctttctggaagtaggtaccaaaattgtttgagggaaatacgaagtcgtgctggtgatgttgaagacatggaaaaggggatcaagataaggaagaaagattgggagaaattgaatctacatattgcttctcataataacttccctactgctgctggcttagcatcttcagctgctggatttgcttgtctagttttttctcttgcaaagttgatgaatgtagatgaagatccaagccatctttctgcaatagccaggcaaggttcaggaagtgcttgccggagtttatttggtggatttgtcaagtggacaatgggaagcaaagaagatggaagtgacagcgttgcagttcaactggcagatgagaagcattgggatgatcttgttatcatcattgctgtggtgagttcacggcagaaggaaacgagcagtacctccggaatgcgtgaaagtgttgagacaagtttgcttttacagcatagagcaaaagaagttgtgccaaaacggattttgcaaatggaggaagctataaaaaatcgagactttgcatcgtttacacaattgacatgtacagatagtaatcagtttcatgctgtttgtctggatacatctccacccatattctacatgaatgacacttcacacagaataattagcttagttgaaaagtggaaccgttctgaagggacaccacaggttgcttacacatttgatgctggtccaaatgctgtactgattgcacgcaacagaaaggtcgcagtccaattgctccaggggcttctgtactattttccccctaagtcagacactgatatgaagagttacgtagtgggcgataattcaattctaaaagaagcaggattagatggagcaagtggtgtagagaatctgcaacctccacctgaaattaaagacaatattggatctcaggatcaaaaaggagaagtcagttattttatctgcactagacctggaaaaggtcccatcgtgcttcacgaccaaactcaagcccttctcgatcctgaaactggccttcctaagtgagcattctctctgcttcaaactaattattatgattagcatctcctttaactgcaagtttaagatacaatatttgtggcagaataggtgcagctacgttgtcatctaactcttagctttcctattttcaaataaaagaaattcactggttttgttttaccaggataaaacc

SEQ ID NO: 23975 - protein, 419 aa, Arabidopsis thaliana
  peptide (1)..(419): Ceres Seq. ID no. 12357839
  misc_feature (1)..(411): Homolog of NCBI NO: 23814095 NR Description: Diphosphomevalonate decarboxylase (Mevalonate
  misc_feature (1)..(411): Homolog of NCBI NO: 26354448 NR Description: unnamed protein product [Mus musculus]
  misc_feature (1)..(411): Homolog of NCBI NO: 20149736 NR Description: mevalonate (diphospho) decarboxylase
  misc_feature (1)..(414): Homolog of NCBI NO: 13592005 NR Description: mevalonate pyrophosphate decarboxylase [Rattus
  misc_feature (4)..(419): Homolog of NCBI NO: 16417950 NR Description: mevalonate disphosphate decarboxylase [Hevea
  misc_feature (9)..(419): Homolog of NCBI NO: 21593039 NR Description: mevalonate diphosphate decarboxylase [Arabidopsis
  misc_feature (1)..(419): Homolog of NCBI NO: 15224931 NR Description: mevalonate diphosphate decarboxylase
  misc_feature (1)..(419): Homolog of NCBI NO: 11281655 NR Description: diphosphomevalonate decarboxylase (EC 4.1.1.33)
  misc_feature (1)..(419): Homolog of NCBI NO: 18410026 NR Description: DIPHOSPHOMEVALONATE DECARBOXYLASE - like protein
  misc_feature (1)..(419): Homolog of NCBI NO: 21593243 NR Description: diphosphomevalonate decarboxylase-like protein
MATEKWVFMVTAQTPTNIAVIKYWGKRHEVRILPVNDSISVTLDPDHLCTVTTVAVSPAFDRDRMWLNGKEISLSGSRYQNCLREIRSRAGDVEDMEKGIKIRKKDWEKLNLHIASHNNFPTAAGLASSAAGFACLVFSLAKLMNVDEDPSHLSAIARQGSGSACRSLFGGFVKWTMGSKEDGSDSVAVQLADEKHWDDLVIIIAVVSSRQKETSSTSGMRESVETSLLLQHRAKEVVPKRILQMEEAIKNRDFASFTQLTCTDSNQFHAVCLDTSPPIFYMNDTSHRIISLVEKWNRSEGTPQVAYTFDAGPNAVLIARNRKVAVQLLQGLLYYFPPKSDTDMKSYVVGDNSILKEAGLDGASGVENLQPPPEIKDNIGSQDQKGEVSYFICTRPGKGPIVLHDQTQALLDPETGLPK

SEQ ID NO: 23976 - protein, 411 aa, Arabidopsis thaliana
  peptide (1)..(411): Ceres Seq. ID no. 12357840
  misc_feature (1)..(403): Homolog of NCBI NO: 23814095 NR Description: Diphosphomevalonate decarboxylase (Mevalonate
  misc_feature (1)..(403): Homolog of NCBI NO: 26354448 NR Description: unnamed protein product [Mus musculus]
  misc_feature (1)..(403): Homolog of NCBI NO: 20149736 NR Description: mevalonate (diphospho) decarboxylase
  misc_feature (1)..(406): Homolog of NCBI NO: 13592005 NR Description: mevalonate pyrophosphate decarboxylase [Rattus
  misc_feature (1)..(411): Homolog of NCBI NO: 16417950 NR Description: mevalonate disphosphate decarboxylase [Hevea
  misc_feature (1)..(411): Homolog of NCBI NO: 21593039 NR Description: mevalonate diphosphate decarboxylase [Arabidopsis
  misc_feature (1)..(411): Homolog of NCBI NO: 15224931 NR Description: mevalonate diphosphate decarboxylase
  misc_feature (1)..(411): Homolog of NCBI NO: 11281655 NR Description: diphosphomevalonate decarboxylase (EC 4.1.1.33)
  misc_feature (1)..(411): Homolog of NCBI NO: 18410026 NR Description: DIPHOSPHOMEVALONATE DECARBOXYLASE - like protein
  misc_feature (1)..(411): Homolog of NCBI NO: 21593243 NR Description: diphosphomevalonate decarboxylase-like protein
MVTAQTPTNIAVIKYWGKRHEVRILPVNDSISVTLDPDHLCTVTTVAVSPAFDRDRMWLNGKEISLSGSRYQNCLREIRSRAGDVEDMEKGIKIRKKDWEKLNLHIASHNNFPTAAGLASSAAGFACLVFSLAKLMNVDEDPSHLSAIARQGSGSACRSLFGGFVKWTMGSKEDGSDSVAVQLADEKHWDDLVIIIAVVSSRQKETSSTSGMRESVETSLLLQHRAKEVVPKRILQMEEAIKNRDFASFTQLTCTDSNQFHAVCLDTSPPIFYMNDTSHRIISLVEKWNRSEGTPQVAYTFDAGPNAVLIARNRKVAVQLLQGLLYYFPPKSDTDMKSYVVGDNSILKEAGLDGASGVENLQPPPEIKDNIGSQDQKGEVSYFICTRPGKGPIVLHDQTQALLDPETGLPK

SEQ ID NO: 23977 - protein, 355 aa, Arabidopsis thaliana
  peptide (1)..(355): Ceres Seq. ID no. 12357841
  misc_feature (1)..(347): Homolog of NCBI NO: 23814095 NR Description: Diphosphomevalonate decarboxylase (Mevalonate
  misc_feature (1)..(347): Homolog of NCBI NO: 26354448 NR Description: unnamed protein product [Mus musculus]
  misc_feature (1)..(347): Homolog of NCBI NO: 20149736 NR Description: mevalonate (diphospho) decarboxylase
  misc_feature (1)..(350): Homolog of NCBI NO: 13592005 NR Description: mevalonate pyrophosphate decarboxylase [Rattus
  misc_feature (1)..(355): Homolog of NCBI NO: 16417950 NR Description: mevalonate disphosphate decarboxylase [Hevea
  misc_feature (1)..(355): Homolog of NCBI NO: 21593039 NR Description: mevalonate diphosphate decarboxylase [Arabidopsis
  misc_feature (1)..(355): Homolog of NCBI NO: 15224931 NR Description: mevalonate diphosphate decarboxylase
  misc_feature (1)..(355): Homolog of NCBI NO: 11281655 NR Description: diphosphomevalonate decarboxylase (EC 4.1.1.33)
  misc_feature (1)..(355): Homolog of NCBI NO: 18410026 NR Description: DIPHOSPHOMEVALONATE DECARBOXYLASE - like protein
  misc_feature (1)..(355): Homolog of NCBI NO: 21593243 NR Description: diphosphomevalonate decarboxylase-like protein
MWLNGKEISLSGSRYQNCLREIRSRAGDVEDMEKGIKIRKKDWEKLNLHIASHNNFPTAAGLASSAAGFACLVFSLAKLMNVDEDPSHLSAIARQGSGSACRSLFGGFVKWTMGSKEDGSDSVAVQLADEKHWDDLVIIIAVVSSRQKETSSTSGMRESVETSLLLQHRAKEVVPKRILQMEEAIKNRDFASFTQLTCTDSNQFHAVCLDTSPPIFYMNDTSHRIISLVEKWNRSEGTPQVAYTFDAGPNAVLIARNRKVAVQLLQGLLYYFPPKSDTDMKSYVVGDNSILKEAGLDGASGVENLQPPPEIKDNIGSQDQKGEVSYFICTRPGKGPIVLHDQTQALLDPETGLPK

SEQ ID NO: 23978 - DNA, 1302 bp, Arabidopsis thaliana
  misc_feature (1)..(1302): Ceres Seq. ID no. 12338811
  misc_feature: MA Experiment ID: 108463 Result: Down-regulated in Transcription
  misc_feature: MA Experiment 108463 PARAMETER Experiment Name: At_Germinating_Seeds_cDNA_P Parameter: Age (day) Value: 3 vs. 0
  misc_feature: MA Experiment 108463 PARAMETER Experiment Name: At_Germinating_Seeds_cDNA_P Parameter: Tissue Value: Germinating Seeds
  misc_feature: MA Experiment ID: 108573 Result: Up-regulated in Transcription
  misc_feature: MA Experiment 108573 PARAMETER Experiment Name: At_Drought_cDNA_P Parameter: Timepoint (hr) Value: 6
  misc_feature: MA Experiment 108573 PARAMETER Experiment Name: At_Drought_cDNA_P Parameter: Tissue Value: Aerial
  misc_feature: MA Experiment 108573 PARAMETER Experiment Name: At_Drought_cDNA_P Parameter: Treatment Value: Drought vs. No Drought
  misc_feature: MA Experiment ID: 20000224 Result: Down-regulated in Transcription
  misc_feature: MA Experiment ID: 20000227 Result: Down-regulated in Transcription
  misc_feature: MA Experiment 20000227 PARAMETER Experiment Name: At_Root-Tips-vs-Tops_P Parameter: Tissue Value: Root Tips vs. Root Tops
atccaacaaatgttaagttcttcagtttccttcaaaattgggttttcttgagaaagcattacagacacagtaatggcggctcctcggaatttaacaggtgacggtggagcaagacagctagtaaaagacgaagaaagccccgcagcttcatcggcagctaaaggactcttaaacgatgactcaccgactggtaaacgaaccaaatcggagagatttcctctctcacggtgggaattcgccgtgtttttcaccgtctttctcgttttcaccaccggactcttttgtatttacctcaccatgcctgccgctgaatacggcaagctcaaagttcctagaactatctccgatcttcgattgctcaaagagaatcttgggtcttatgcaagtgagtaccaagcacggttcattttaggttactgttcgacgtatatctttatgcagacatttatgatacctggaacgatctttatgtcattgcttgctggagctcttttcggtgtggttagaggttttgttcttgttgtccttaatgcaactgctggagcatgttcttgcttcttcttatcgaaattggtcggtaggccattggttaactggttatggcctgaaaagttgaggtttttccaagctgagattgcgaaaagaagagataggctgctaaactacatgctgttcttaaggataacaccaacacttccaaacctctttatcaatttgtcttctccaatcgttgacataccctttcacgtcttctttttggcgactctagtcggtcttatgccagcttcgtacatcacagttagagctggtttggctcttggagatctcagatcagtaaaggatttgtatgatttcaagaccttgtcagtgctgttcctcattggatccatctccatattccctgcccttctaaagagaaagagagtatatgaatgaagagtcgaagactgaagagtataatcatttatatagatattgatgagcagcacctttcagtcgcatggcagcatttcaaaggtgtttatgagctcaagataaaagaagaagattgtttctgcaacatcgcggagcttaaaatcgctaactctggctttgatttgtttattgtcttcgatttgagagcttctcttacccccttgtagtagtaagtgtttgtgtagctagtttactgaatcatgattggctttgtatattgaatacttgattcagagatctgactctgcagcctattggcttatgtataacaaacatgattatgtaaatgcttgaagacattgctttgaccaaatatgggtgattctg

SEQ ID NO: 23979 - protein, 287 aa, Arabidopsis thaliana
  peptide (1)..(287): Ceres Seq. ID no. 12338812
  misc_feature (1)..(287): Homolog of NCBI NO: 30681121 NR Description: expressed protein [Arabidopsis thaliana]
  misc_feature (51)..(283): Homolog of NCBI NO: 22268065 NR Description: D7Ertd743e protein [Mus musculus]
  misc_feature (56)..(283): Homolog of NCBI NO: 18859941 NR Description: CG8408-PA [Drosophila melanogaster]
  misc_feature (15)..(283): Homolog of NCBI NO: 20558053 NR Description: similar to KIAA0033 [Homo sapiens]
  misc_feature (15)..(283): Homolog of NCBI NO: 436224 NR Description: KIAA0033 [Homo sapiens]
  misc_feature (34)..(283): Homolog of NCBI NO: 28850296 NR Description: similar to Mus musculus (Mouse). Colon RCB-0549 cDNA, RIKEN full-length enriched library, clone:G430121L01 N-terminal nucleophile aminohydrolases (Ntn hydrolases) structure
  misc_feature (48)..(284): Homolog of NCBI NO: 21593768 NR Description: unknown [Arabidopsis thaliana]
  misc_feature (48)..(284): Homolog of NCBI NO: 18414967 NR Description: expressed protein
  misc_feature (1)..(189): Homolog of NCBI NO: 25407510 NR Description: hypothetical protein AT4g09580 [imported] -
  misc_feature (14)..(287): Homolog of NCBI NO: 18409951 NR Description: expressed protein
MAAPRNLTGDGGARQLVKDEESPAASSAAKGLLNDDSPTGKRTKSERFPLSRWEFAVFFTVFLVFTTGLFCIYLTMPAAEYGKLKVPRTISDLRLLKENLGSYASEYQARFILGYCSTYIFMQTFMIPGTIFMSLLAGALFGVVRGFVLVVLNATAGACSCFFLSKLVGRPLVNWLWPEKLRFFQAEIAKRRDRLLNYMLFLRITPTLPNLFINLSSPIVDIPFHVFFLATLVGLMPASYITVRAGLALGDLRSVKDLYDFKTLSVLFLIGSISIFPALLKRKRVYE

SEQ ID NO: 23980 - protein, 212 aa, Arabidopsis thaliana
  peptide (1)..(212): Ceres Seq. ID no. 12338814
  misc_feature (1)..(208): Homolog of NCBI NO: 22268065 NR Description: D7Ertd743e protein [Mus musculus]
  misc_feature (1)..(208): Homolog of NCBI NO: 18859941 NR Description: CG8408-PA [Drosophila melanogaster]
  misc_feature (1)..(208): Homolog of NCBI NO: 20558053 NR Description: similar to KIAA0033 [Homo sapiens]
  misc_feature (1)..(208): Homolog of NCBI NO: 436224 NR Description: KIAA0033 [Homo sapiens]
  misc_feature (1)..(208): Homolog of NCBI NO: 28850296 NR Description: similar to Mus musculus (Mouse). Colon RCB-0549 cDNA, RIKEN full-length enriched library, clone:G430121L01 N-terminal nucleophile aminohydrolases (Ntn hydrolases) structure
  misc_feature (1)..(209): Homolog of NCBI NO: 21593768 NR Description: unknown [Arabidopsis thaliana]
  misc_feature (1)..(209): Homolog of NCBI NO: 18414967 NR Description: expressed protein
  misc_feature (1)..(114): Homolog of NCBI NO: 25407510 NR Description: hypothetical protein AT4g09580 [imported] -
  misc_feature (1)..(212): Homolog of NCBI NO: 18409951 NR Description: expressed protein
  misc_feature (1)..(212): Homolog of NCBI NO: 30681121 NR Description: expressed protein [Arabidopsis thaliana]
MPAAEYGKLKVPRTISDLRLLKENLGSYASEYQARFILGYCSTYIFMQTFMIPGTIFMSLLAGALFGVVRGFVLVVLNATAGACSCFFLSKLVGRPLVNWLWPEKLRFFQAEIAKRRDRLLNYMLFLRITPTLPNLFINLSSPIVDIPFHVFFLATLVGLMPASYITVRAGLALGDLRSVKDLYDFKTLSVLFLIGSISIFPALLKRKRVYE

SEQ ID NO: 23981 - protein, 166 aa, Arabidopsis thaliana
  peptide (1)..(166): Ceres Seq. ID no. 12338815
  misc_feature (1)..(162): Homolog of NCBI NO: 22268065 NR Description: D7Ertd743e protein [Mus musculus]
  misc_feature (1)..(162): Homolog of NCBI NO: 18859941 NR Description: CG8408-PA [Drosophila melanogaster]
  misc_feature (1)..(162): Homolog of NCBI NO: 20558053 NR Description: similar to KIAA0033 [Homo sapiens]
  misc_feature (1)..(162): Homolog of NCBI NO: 436224 NR Description: KIAA0033 [Homo sapiens]
  misc_feature (1)..(162): Homolog of NCBI NO: 28850296 NR Description: similar to Mus musculus (Mouse). Colon RCB-0549 cDNA, RIKEN full-length enriched library, clone:G430121L01 N-terminal nucleophile aminohydrolases (Ntn hydrolases) structure
  misc_feature (1)..(163): Homolog of NCBI NO: 21593768 NR Description: unknown [Arabidopsis thaliana]
  misc_feature (1)..(163): Homolog of NCBI NO: 18414967 NR Description: expressed protein
  misc_feature (1)..(68): Homolog of NCBI NO: 25407510 NR Description: hypothetical protein AT4g09580 [imported] -
  misc_feature (1)..(166): Homolog of NCBI NO: 18409951 NR Description: expressed protein
  misc_feature (1)..(166): Homolog of NCBI NO: 30681121 NR Description: expressed protein [Arabidopsis thaliana]
MQTFMIPGTIFMSLLAGALFGVVRGFVLVVLNATAGACSCFFLSKLVGRPLVNWLWPEKLRFFQAEIAKRRDRLLNYMLFLRITPTLPNLFINLSSPIVDIPFHVFFLATLVGLMPASYITVRAGLALGDLRSVKDLYDFKTLSVLFLIGSISIFPALLKRKRVYE

SEQ ID NO: 23982 - DNA, 1551 bp, Arabidopsis thaliana
  misc_feature (1)..(1551): Ceres Seq. ID no. 13487155
  misc_feature: MA Experiment ID: 108434 Result: Down-regulated in Transcription
  misc_feature: MA Experiment 108434 PARAMETER Experiment Name: At_Root_Tips_cDNA_P Parameter: Tissue Value: Root Tips
  misc_feature: MA Experiment ID: 108435 Result: Down-regulated in Transcription
  misc_feature: MA Experiment 108435 PARAMETER Experiment Name: At_stm_Mutants_cDNA_P Parameter: Plant Line Value: wt Landsburg vs stm
  misc_feature: MA Experiment 108435 PARAMETER Experiment Name: At_stm_Mutants_cDNA_P Parameter: Tissue Value: Shoot Apical Meristem Region
  misc_feature: MA Experiment ID: 108569 Result: Down-regulated in Transcription
  misc_feature: MA Experiment 108569 PARAMETER Experiment Name: At_0.001%_MeJA__cDNA_P Parameter: Timepoint (hr) Value: 6
  misc_feature: MA Experiment 108569 PARAMETER Experiment Name: At_0.001%_MeJA__cDNA_P Parameter: Tissue Value: Aerial
  misc_feature: MA Experiment 108569 PARAMETER Experiment Name: At_0.001%_MeJA__cDNA_P Parameter: Treatment Value: 0.001% MeJA vs. No Treatment
  misc_feature: MA Experiment ID: 108595 Result: Down-regulated in Transcription
  misc_feature: MA Experiment 108595 PARAMETER Experiment Name: At_Ler-pi_Ovule_cDNA_P Parameter: Plant Line Value: null
  misc_feature: MA Experiment ID: 108607 Result: Up-regulated in Transcription
  misc_feature: MA Experiment 108607 PARAMETER Experiment Name: At_100uM_ABA_cDNA_P Parameter: Timepoint (hr) Value: 4
  misc_feature: MA Experiment 108607 PARAMETER Experiment Name: At_100uM_ABA_cDNA_P Parameter: Tissue Value: Aerial
  misc_feature: MA Experiment 108607 PARAMETER Experiment Name: At_100uM_ABA_cDNA_P Parameter: Treatment Value: 100uM ABA vs. No Treatment
  misc_feature: MA Experiment ID: 20000069 Result: Up-regulated in Transcription
  misc_feature: MA Experiment 20000069 PARAMETER Experiment Name: At_100uM_ABA_Mutants_cDNA_P Parameter: Plant Line Value: CS23
  misc_feature: MA Experiment 20000069 PARAMETER Experiment Name: At_100uM_ABA_Mutants_cDNA_P Parameter: Timepoint (hr) Value: 6
  misc_feature: MA Experiment 20000069 PARAMETER Experiment Name: At_100uM_ABA_Mutants_cDNA_P Parameter: Tissue Value: Aerial
  misc_feature: MA Experiment 20000069 PARAMETER Experiment Name: At_100uM_ABA_Mutants_cDNA_P Parameter: Treatment Value: 100uM ABA vs. No Treatment
  misc_feature: MA Experiment ID: 20000071 Result: Up-regulated in Transcription
  misc_feature: MA Experiment 20000071 PARAMETER Experiment Name: At_100uM_ABA_Mutants_cDNA_P Parameter: Plant Line Value: CS8104
  misc_feature: MA Experiment 20000071 PARAMETER Experiment Name: At_100uM_ABA_Mutants_cDNA_P Parameter: Timepoint (hr) Value: 6
  misc_feature: MA Experiment 20000071 PARAMETER Experiment Name: At_100uM_ABA_Mutants_cDNA_P Parameter: Tissue Value: Aerial
  misc_feature: MA Experiment 20000071 PARAMETER Experiment Name: At_100uM_ABA_Mutants_cDNA_P Parameter: Treatment Value: 100uM ABA vs. No Treatment
  misc_feature: MA Experiment ID: 20000086 Result: Up-regulated in Transcription
  misc_feature: MA Experiment 20000086 PARAMETER Experiment Name: At_100uM_ABA_Mutants_cDNA_P Parameter: Plant Line Value: CS22
  misc_feature: MA Experiment 20000086 PARAMETER Experiment Name: At_100uM_ABA_Mutants_cDNA_P Parameter: Timepoint (hr) Value: 6
  misc_feature: MA Experiment 20000086 PARAMETER Experiment Name: At_100uM_ABA_Mutants_cDNA_P Parameter: Tissue Value: Aerial
  misc_feature: MA Experiment 20000086 PARAMETER Experiment Name: At_100uM_ABA_Mutants_cDNA_P Parameter: Treatment Value: 100uM ABA vs. No Treatment
  misc_feature: MA Experiment ID: 20000087 Result: Up-regulated in Transcription
  misc_feature: MA Experiment 20000087 PARAMETER Experiment Name: At_100uM_ABA_Mutants_cDNA_P Parameter: Plant Line Value: WS
  misc_feature: MA Experiment 20000087 PARAMETER Experiment Name: At_100uM_ABA_Mutants_cDNA_P Parameter: Timepoint (hr) Value: 6
  misc_feature: MA Experiment 20000087 PARAMETER Experiment Name: At_100uM_ABA_Mutants_cDNA_P Parameter: Tissue Value: Aerial
  misc_feature: MA Experiment 20000087 PARAMETER Experiment Name: At_100uM_ABA_Mutants_cDNA_P Parameter: Treatment Value: 100uM ABA vs. No Treatment
  misc_feature: MA Experiment ID: 20000088 Result: Up-regulated in Transcription
  misc_feature: MA Experiment 20000088 PARAMETER Experiment Name: At_100uM_ABA_Mutants_cDNA_P Parameter: Plant Line Value: Landsberg
  misc_feature: MA Experiment 20000088 PARAMETER Experiment Name: At_100uM_ABA_Mutants_cDNA_P Parameter: Timepoint (hr) Value: 6
  misc_feature: MA Experiment 20000088 PARAMETER Experiment Name: At_100uM_ABA_Mutants_cDNA_P Parameter: Tissue Value: Aerial
  misc_feature: MA Experiment 20000088 PARAMETER Experiment Name: At_100uM_ABA_Mutants_cDNA_P Parameter: Treatment Value: 100uM ABA vs. No Treatment
  misc_feature: MA Experiment ID: 20000089 Result: Up-regulated in Transcription
  misc_feature: MA Experiment ID: 20000090 Result: Up-regulated in Transcription
  misc_feature: MA Experiment ID: 20000112 Result: Down-regulated in Transcription
  misc_feature: MA Experiment 20000112 PARAMETER Experiment Name: At_42deg_Heat_cDNA_P Parameter: Temperature (deg C) Value: 42 vs. 22
  misc_feature: MA Experiment 20000112 PARAMETER Experiment Name: At_42deg_Heat_cDNA_P Parameter: Timepoint (hr) Value: 2
  misc_feature: MA Experiment 20000112 PARAMETER Experiment Name: At_42deg_Heat_cDNA_P Parameter: Tissue Value: Aerial
  misc_feature: MA Experiment ID: 20000113 Result: Down-regulated in Transcription
  misc_feature: MA Experiment 20000113 PARAMETER Experiment Name: At_42deg_Heat_cDNA_P Parameter: Temperature (deg C) Value: 42 vs. 22
  misc_feature: MA Experiment 20000113 PARAMETER Experiment Name: At_42deg_Heat_cDNA_P Parameter: Timepoint (hr) Value: 8
  misc_feature: MA Experiment 20000113 PARAMETER Experiment Name: At_42deg_Heat_cDNA_P Parameter: Tissue Value: Aerial
  misc_feature: MA Experiment ID: 20000117 Result: Up-regulated in Transcription
  misc_feature: MA Experiment 20000117 PARAMETER Experiment Name: At_100uM_ABA_Mutants_cDNA_P Parameter: Plant Line Value: Columbia
  misc_feature: MA Experiment 20000117 PARAMETER Experiment Name: At_100uM_ABA_Mutants_cDNA_P Parameter: Timepoint (hr) Value: 6
  misc_feature: MA Experiment 20000117 PARAMETER Experiment Name: At_100uM_ABA_Mutants_cDNA_P Parameter: Tissue Value: Aerial
  misc_feature: MA Experiment 20000117 PARAMETER Experiment Name: At_100uM_ABA_Mutants_cDNA_P Parameter: Treatment Value: 100uM ABA vs. No Treatment
  misc_feature: MA Experiment ID: 20000173 Result: Down-regulated in Transcription
  misc_feature: MA Experiment 20000173 PARAMETER Experiment Name: At_42deg_Heat_P Parameter: Age (day) Value: 14
  misc_feature: MA Experiment 20000173 PARAMETER Experiment Name: At_42deg_Heat_P Parameter: Organism Value: A. thaliana
  misc_feature: MA Experiment 20000173 PARAMETER Experiment Name: At_42deg_Heat_P Parameter: Plant Line Value: WS
  misc_feature: MA Experiment 20000173 PARAMETER Experiment Name: At_42deg_Heat_P Parameter: Temperature (deg C) Value: 42 vs. 22
  misc_feature: MA Experiment 20000173 PARAMETER Experiment Name: At_42deg_Heat_P Parameter: Timepoint (hr) Value: 6
  misc_feature: MA Experiment 20000173 PARAMETER Experiment Name: At_42deg_Heat_P Parameter: Tissue Value: Aerial
  misc_feature: MA Experiment ID: 20000182 Result: Down-regulated in Transcription
  misc_feature: MA Experiment 20000182 PARAMETER Experiment Name: At_2mM_SA_P Parameter: Age (day) Value: 14
  misc_feature: MA Experiment 20000182 PARAMETER Experiment Name: At_2mM_SA_P Parameter: Organism Value: A. thaliana
  misc_feature: MA Experiment 20000182 PARAMETER Experiment Name: At_2mM_SA_P Parameter: Plant Line Value: WS
  misc_feature: MA Experiment 20000182 PARAMETER Experiment Name: At_2mM_SA_P Parameter: Timepoint (hr) Value: 6
  misc_feature: MA Experiment 20000182 PARAMETER Experiment Name: At_2mM_SA_P Parameter: Tissue Value: Aerial
  misc_feature: MA Experiment 20000182 PARAMETER Experiment Name: At_2mM_SA_P Parameter: Treatment Value: 2mM SA vs. No Treatment
  misc_feature: MA Experiment ID: 20000184 Result: Down-regulated in Transcription
  misc_feature: MA Experiment 20000184 PARAMETER Experiment Name: At_Shoots__P Parameter: Age (day) Value: 7
  misc_feature: MA Experiment 20000184 PARAMETER Experiment Name: At_Shoots__P Parameter: Tissue Value: Shoots vs. Whole Plant
  misc_feature: MA Experiment ID: 20000211 Result: Up-regulated in Transcription
  misc_feature: MA Experiment 20000211 PARAMETER Experiment Name: At_0.001percent_MeJA__P Parameter: Age (day) Value: 14
  misc_feature: MA Experiment 20000211 PARAMETER Experiment Name: At_0.001percent_MeJA__P Parameter: Organism Value: A. thaliana
  misc_feature: MA Experiment 20000211 PARAMETER Experiment Name: At_0.001percent_MeJA__P Parameter: Plant Line Value: WS
  misc_feature: MA Experiment 20000211 PARAMETER Experiment Name: At_0.001percent_MeJA__P Parameter: Timepoint (hr) Value: 1
  misc_feature: MA Experiment 20000211 PARAMETER Experiment Name: At_0.001percent_MeJA__P Parameter: Tissue Value: Aerial
  misc_feature: MA Experiment 20000211 PARAMETER Experiment Name: At_0.001percent_MeJA__P Parameter: Treatment Value: 0.001percent MeJA vs. No Treatment
  misc_feature: MA Experiment ID: 20000224 Result: Up-regulated in Transcription
  misc_feature: MA Experiment ID: 20000234 Result: Down-regulated in Transcription
  misc_feature: MA Experiment 20000234 PARAMETER Experiment Name: At_Siliques_P Parameter: Age (day) Value: 21
  misc_feature: MA Experiment 20000234 PARAMETER Experiment Name: At_Siliques_P Parameter: Organism Value: A. thaliana
  misc_feature: MA Experiment 20000234 PARAMETER Experiment Name: At_Siliques_P Parameter: Plant Line Value: WS
  misc_feature: MA Experiment 20000234 PARAMETER Experiment Name: At_Siliques_P Parameter: Tissue Value: Less Than 5mm Siliques vs. Whole Plant
  misc_feature: MA Experiment ID: 20000235 Result: Down-regulated in Transcription
  misc_feature: MA Experiment 20000235 PARAMETER Experiment Name: At_Siliques_P Parameter: Age (day) Value: 21
  misc_feature: MA Experiment 20000235 PARAMETER Experiment Name: At_Siliques_P Parameter: Organism Value: A. thaliana
  misc_feature: MA Experiment 20000235 PARAMETER Experiment Name: At_Siliques_P Parameter: Plant Line Value: WS
  misc_feature: MA Experiment 20000235 PARAMETER Experiment Name: At_Siliques_P Parameter: Tissue Value: 5-10mm Siliques vs. Whole Plant
  misc_feature: MA Experiment ID: 20000264 Result: Down-regulated in Transcription
  misc_feature: MA Experiment 20000264 PARAMETER Experiment Name: At_Open_Flower_P Parameter: Age (day) Value: 21
  misc_feature: MA Experiment 20000264 PARAMETER Experiment Name: At_Open_Flower_P Parameter: Plant Line Value: WS
  misc_feature: MA Experiment 20000264 PARAMETER Experiment Name: At_Open_Flower_P Parameter: Tissue Value: Open Flower vs. Whole Plant
  misc_feature: MA Experiment ID: 20000265 Result: Down-regulated in Transcription
  misc_feature: MA Experiment 20000265 PARAMETER Experiment Name: At_Open_Flower_P Parameter: Age (day) Value: 21
  misc_feature: MA Experiment 20000265 PARAMETER Experiment Name: At_Open_Flower_P Parameter: Plant Line Value: WS
  misc_feature: MA Experiment 20000265 PARAMETER Experiment Name: At_Open_Flower_P Parameter: Tissue Value: Closed Flower vs. Whole Plant
  misc_feature: MA Experiment ID: 20000286 Result: Down-regulated in Transcription
  misc_feature: MA Experiment 20000286 PARAMETER Experiment Name: At_Open_Flower_P Parameter: Age (day) Value: 21
  misc_feature: MA Experiment 20000286 PARAMETER Experiment Name: At_Open_Flower_P Parameter: Plant Line Value: WS
  misc_feature: MA Experiment 20000286 PARAMETER Experiment Name: At_Open_Flower_P Parameter: Tissue Value: Half Open vs. Whole Plant
  misc_feature: MA Experiment ID: 20000438 Result: Down-regulated in Transcription
  misc_feature: MA Experiment 20000438 PARAMETER Experiment Name: At_Shoots__P Parameter: Age (day) Value: 14
  misc_feature: MA Experiment 20000438 PARAMETER Experiment Name: At_Shoots__P Parameter: Tissue Value: Shoots vs. Whole Plant
  misc_feature: MA Experiment ID: 20000794 Result: Down-regulated in Transcription
  misc_feature: MA Experiment 20000794 PARAMETER Experiment Name: At_Petals_P Parameter: Age (day) Value: 23-25 days
  misc_feature: MA Experiment 20000794 PARAMETER Experiment Name: At_Petals_P Parameter: Plant Line Value: WS
  misc_feature: MA Experiment 20000794 PARAMETER Experiment Name: At_Petals_P Parameter: Tissue Value: Petals vs. Whole plant
  misc_feature: MA Experiment ID: 20001248 Result: Up-regulated in Transcription
  misc_feature: MA Experiment 20001248 PARAMETER Experiment Name: At_Far-red-induction_P Parameter: Age (day) Value: 7
  misc_feature: MA Experiment 20001248 PARAMETER Experiment Name: At_Far-red-induction_P Parameter: Light Value: Far-red vs. White
  misc_feature: MA Experiment 20001248 PARAMETER Experiment Name: At_Far-red-induction_P Parameter: Organism Value: A. thaliana
  misc_feature: MA Experiment 20001248 PARAMETER Experiment Name: At_Far-red-induction_P Parameter: Plant Line Value: Columbia
  misc_feature: MA Experiment 20001248 PARAMETER Experiment Name: At_Far-red-induction_P Parameter: Timepoint (hr) Value: 4
  misc_feature: MA Experiment 20001248 PARAMETER Experiment Name: At_Far-red-induction_P Parameter: Tissue Value: Whole Plant
  misc_feature: MA Experiment ID: 20001558 Result: Down-regulated in Transcription
  misc_feature: MA Experiment 20001558 PARAMETER Experiment Name: At_Drought_Soil_Dry_P Parameter: Age (day) Value: 27
  misc_feature: MA Experiment 20001558 PARAMETER Experiment Name: At_Drought_Soil_Dry_P Parameter: Organism Value: A. thaliana
  misc_feature: MA Experiment 20001558 PARAMETER Experiment Name: At_Drought_Soil_Dry_P Parameter: Plant Line Value: WS
  misc_feature: MA Experiment 20001558 PARAMETER Experiment Name: At_Drought_Soil_Dry_P Parameter: Post Timepoint (hr) Value: 6
  misc_feature: MA Experiment 20001558 PARAMETER Experiment Name: At_Drought_Soil_Dry_P Parameter: Post-Treatment Value: Re-Water vs. No Drought
  misc_feature: MA Experiment 20001558 PARAMETER Experiment Name: At_Drought_Soil_Dry_P Parameter: Timepoint (day) Value: 13
  misc_feature: MA Experiment 20001558 PARAMETER Experiment Name: At_Drought_Soil_Dry_P Parameter: Treatment Value: Drought vs. No Drought
  misc_feature: MA Experiment ID: 20001560 Result: Down-regulated in Transcription
  misc_feature: MA Experiment 20001560 PARAMETER Experiment Name: At_Drought_Soil_Dry_P Parameter: Age (day) Value: 28
  misc_feature: MA Experiment 20001560 PARAMETER Experiment Name: At_Drought_Soil_Dry_P Parameter: Organism Value: A. thaliana
  misc_feature: MA Experiment 20001560 PARAMETER Experiment Name: At_Drought_Soil_Dry_P Parameter: Plant Line Value: WS
  misc_feature: MA Experiment 20001560 PARAMETER Experiment Name: At_Drought_Soil_Dry_P Parameter: Post Timepoint (hr) Value: None
  misc_feature: MA Experiment 20001560 PARAMETER Experiment Name: At_Drought_Soil_Dry_P Parameter: Post-Treatment Value: None
  misc_feature: MA Experiment 20001560 PARAMETER Experiment Name: At_Drought_Soil_Dry_P Parameter: Timepoint (day) Value: 14
  misc_feature: MA Experiment 20001560 PARAMETER Experiment Name: At_Drought_Soil_Dry_P Parameter: Treatment Value: Drought vs. No Drought
  misc_feature: MA Experiment ID: 20001904 Result: Down-regulated in Transcription
  misc_feature: MA Experiment 20001904 PARAMETER Experiment Name: At_Drought_Reproduction_P Parameter: Age (day) Value: 37
  misc_feature: MA Experiment 20001904 PARAMETER Experiment Name: At_Drought_Reproduction_P Parameter: Organism Value: A. thaliana
  misc_feature: MA Experiment 20001904 PARAMETER Experiment Name: At_Drought_Reproduction_P Parameter: Plant Line Value: WS
  misc_feature: MA Experiment 20001904 PARAMETER Experiment Name: At_Drought_Reproduction_P Parameter: Timepoint (day) Value: 7
  misc_feature: MA Experiment 20001904 PARAMETER Experiment Name: At_Drought_Reproduction_P Parameter: Tissue Value: Rosettes
  misc_feature: MA Experiment 20001904 PARAMETER Experiment Name: At_Drought_Reproduction_P Parameter: Treatment Value: Drought vs. No Drought
aattcgaacccttcaagattttcttctctctatctctctgtttctctctgtttctgagatgggtttgtttggaacgaagaagatcgggaagtatgagataggaagaacaatcggagaagggaatttcgcaaaagtgaaacttggttacgacacgaccaatggtacttacgtagctgtcaaaatcatagacaaggctttggttattcaaaagggtcttgagtctcaagtcaagagagagatacgaacgatgaagcttcttaaccatcccaacatcgtccaaatacacgaggtgattggaaccaagacaaagatctgtatagttatggaatacgtttcaggtggtcagctttcagacagacttggaagacagaaaatgaaagaatcagatgctagaaaacttttccaacaattgattgatgctgttgattgttgtcataacagaggagtttatcatagagatcttaagccacaaaacttgttactagattcaaagggtaatctcaaagtttctgactttggattaagtgcagttcctaaatcgggggatatgctctctacagcttgtggctctccatgttatatagcaccagagttgattatgaacaaaggctactcaggagcagcagtagatgtatggtcttgtggagtgattctatttgaattgcttgctggttatccacctttcgatgatcatacacttccggttttgtataagaagatactcagagcagattacacgttcccacctggattcactggagagcagaagaggctaatctttaacattcttgacccaaatcctctaagtcgtataacactagctgagataatcatcaaagattcttggttcaagataggttatacaccagtttatcatcaactttcagactcaatcaaggacaatgtcgcggagataaatgcagcaaccgcgtcatcaaatttcataaatgcttttcagataatagcaatgtctagtgatctagatttgtcaggtctcttcgaagaaaatgatgataagagatataaaacaagaattgggtccaagaacacagcacaagaaacaatcaagaagattgaagctgcagcaacttatgttagtttatcagttgagagaataaagcacttcaaggttaagattcagccaaaggagataagatcaagatcttcttatgacttattatcagcagaggtgatagaggtgactccaacaaattgtgttatagaaatatcgaaatccgcaggcgagttaagactatacatggagttttgccagagcttatcaagcttacttaccgcggaagtaagctaagatagagagccatagattctcaagtaaaaatgttaaaacagaggaagcaaatgaagcatatttttgcagattgaagttgaagtgtaaagaagacaatgaagagaagaaatccaaagaatttagttatgtcttggatcttggtgatcccaaagggttcttattcaggatgtaaaatgatagattggtttctaatcaaactcgtttataaaatagatatataaaaagctgaacaagttctattt

SEQ ID NO: 23983 - protein, 435 aa, Arabidopsis thaliana
  peptide (1)..(435): Ceres Seq. ID no. 13487156
  misc_feature (31)..(283): Pfam Name: Protein kinase domain Pfam Description: Protein kinase domain
  misc_feature (27)..(423): Homolog of NCBI NO: 9294138 NR Description: serine/threonine kinase [Arabidopsis thaliana]
  misc_feature (28)..(430): Homolog of NCBI NO: 34894358 NR Description: unnamed protein product [Oryza sativa (japonica
  misc_feature (24)..(428): Homolog of NCBI NO: 18397430 NR Description: CBL-interacting protein kinase 23 [Arabidopsis
  misc_feature (24)..(428): Homolog of NCBI NO: 34393400 NR Description: putative CBL-interacting protein kinase 23
  misc_feature (24)..(428): Homolog of NCBI NO: 25387051 NR Description: probable serine/threonine kinase
  misc_feature (26)..(430): Homolog of NCBI NO: 7446372 NR Description: probable serine/threonine kinase (EC 2.7.1.-)
  misc_feature (26)..(430): Homolog of NCBI NO: 7446371 NR Description: probable serine/threonine kinase (EC 2.7.1.-)
  misc_feature (20)..(435): Homolog of NCBI NO: 9758325 NR Description: SNF1 related protein kinase-like protein
  misc_feature (20)..(435): Homolog of NCBI NO: 18424001 NR Description: CBL-interacting protein kinase 21 [Arabidopsis
  misc_feature (20)..(435): Homolog of NCBI NO: 20260304 NR Description: unknown protein [Arabidopsis thaliana]
IRTLQDFLLSISLFLSVSEMGLFGTKKIGKYEIGRTIGEGNFAKVKLGYDTTNGTYVAVKIIDKALVIQKGLESQVKREIRTMKLLNHPNIVQIHEVIGTKTKICIVMEYVSGGQLSDRLGRQKMKESDARKLFQQLIDAVDCCHNRGVYHRDLKPQNLLLDSKGNLKVSDFGLSAVPKSGDMLSTACGSPCYIAPELIMNKGYSGAAVDVWSCGVILFELLAGYPPFDDHTLPVLYKKILRADYTFPPGFTGEQKRLIFNILDPNPLSRITLAEIIIKDSWFKIGYTPVYHQLSDSIKDNVAEINAATASSNFINAFQIIAMSSDLDLSGLFEENDDKRYKTRIGSKNTAQETIKKIEAAATYVSLSVERIKHFKVKIQPKEIRSRSSYDLLSAEVIEVTPTNCVIEISKSAGELRLYMEFCQSLSSLLTAEVS

SEQ ID NO: 23984 - protein, 416 aa, Arabidopsis thaliana
  peptide (1)..(416): Ceres Seq. ID no. 13487157
  misc_feature (12)..(264): Pfam Name: Protein kinase domain Pfam Description: Protein kinase domain
  misc_feature (8)..(404): Homolog of NCBI NO: 9294138 NR Description: serine/threonine kinase [Arabidopsis thaliana]
  misc_feature (9)..(411): Homolog of NCBI NO: 34894358 NR Description: unnamed protein product [Oryza sativa (japonica
  misc_feature (5)..(409): Homolog of NCBI NO: 18397430 NR Description: CBL-interacting protein kinase 23 [Arabidopsis
  misc_feature (5)..(409): Homolog of NCBI NO: 34393400 NR Description: putative CBL-interacting protein kinase 23
  misc_feature (5)..(409): Homolog of NCBI NO: 25387051 NR Description: probable serine/threonine kinase
  misc_feature (7)..(411): Homolog of NCBI NO: 7446372 NR Description: probable serine/threonine kinase (EC 2.7.1.-)
  misc_feature (7)..(411): Homolog of NCBI NO: 7446371 NR Description: probable serine/threonine kinase (EC 2.7.1.-)
  misc_feature (1)..(416): Homolog of NCBI NO: 9758325 NR Description: SNF1 related protein kinase-like protein
  misc_feature (1)..(416): Homolog of NCBI NO: 18424001 NR Description: CBL-interacting protein kinase 21 [Arabidopsis
  misc_feature (1)..(416): Homolog of NCBI NO: 20260304 NR Description: unknown protein [Arabidopsis thaliana]
MGLFGTKKIGKYEIGRTIGEGNFAKVKLGYDTTNGTYVAVKIIDKALVIQKGLESQVKREIRTMKLLNHPNIVQIHEVIGTKTKICIVMEYVSGGQLSDRLGRQKMKESDARKLFQQLIDAVDCCHNRGVYHRDLKPQNLLLDSKGNLKVSDFGLSAVPKSGDMLSTACGSPCYIAPELIMNKGYSGAAVDVWSCGVILFELLAGYPPFDDHTLPVLYKKILRADYTFPPGFTGEQKRLIFNILDPNPLSRITLAEIIIKDSWFKIGYTPVYHQLSDSIKDNVAEINAATASSNFINAFQIIAMSSDLDLSGLFEENDDKRYKTRIGSKNTAQETIKKIEAAATYVSLSVERIKHFKVKIQPKEIRSRSSYDLLSAEVIEVTPTNCVIEISKSAGELRLYMEFCQSLSSLLTAEVS

SEQ ID NO: 23985 - protein, 353 aa, Arabidopsis thaliana
  peptide (1)..(353): Ceres Seq. ID no. 13487158
  misc_feature (1)..(201): Pfam Name: Protein kinase domain Pfam Description: Protein kinase domain
  misc_feature (1)..(341): Homolog of NCBI NO: 9294138 NR Description: serine/threonine kinase [Arabidopsis thaliana]
  misc_feature (1)..(348): Homolog of NCBI NO: 34894358 NR Description: unnamed protein product [Oryza sativa (japonica
  misc_feature (1)..(346): Homolog of NCBI NO: 18397430 NR Description: CBL-interacting protein kinase 23 [Arabidopsis
  misc_feature (1)..(346): Homolog of NCBI NO: 34393400 NR Description: putative CBL-interacting protein kinase 23
  misc_feature (1)..(346): Homolog of NCBI NO: 25387051 NR Description: probable serine/threonine kinase
  misc_feature (1)..(348): Homolog of NCBI NO: 7446372 NR Description: probable serine/threonine kinase (EC 2.7.1.-)
  misc_feature (1)..(348): Homolog of NCBI NO: 7446371 NR Description: probable serine/threonine kinase (EC 2.7.1.-)
  misc_feature (1)..(353): Homolog of NCBI NO: 9758325 NR Description: SNF1 related protein kinase-like protein
  misc_feature (1)..(353): Homolog of NCBI NO: 18424001 NR Description: CBL-interacting protein kinase 21 [Arabidopsis
  misc_feature (1)..(353): Homolog of NCBI NO: 20260304 NR Description: unknown protein [Arabidopsis thaliana]
MKLLNHPNIVQIHEVIGTKTKICIVMEYVSGGQLSDRLGRQKMKESDARKLFQQLIDAVDCCHNRGVYHRDLKPQNLLLDSKGNLKVSDFGLSAVPKSGDMLSTACGSPCYIAPELIMNKGYSGAAVDVWSCGVILFELLAGYPPFDDHTLPVLYKKILRADYTFPPGFTGEQKRLIFNILDPNPLSRITLAEIIIKDSWFKIGYTPVYHQLSDSIKDNVAEINAATASSNFINAFQIIAMSSDLDLSGLFEENDDKRYKTRIGSKNTAQETIKKIEAAATYVSLSVERIKHFKVKIQPKEIRSRSSYDLLSAEVIEVTPTNCVIEISKSAGELRLYMEFCQSLSSLLTAEVS

SEQ ID NO: 23986 - DNA, 1206 bp, Arabidopsis thaliana
  misc_feature (1)..(1206): Ceres Seq. ID no. 12335319
  misc_feature: MA Experiment ID: 108433 Result: Down-regulated in Transcription
  misc_feature: MA Experiment 108433 PARAMETER Experiment Name: At_rhl_Mutant2_cDNA_P Parameter: Age (day) Value: 7
  misc_feature: MA Experiment 108433 PARAMETER Experiment Name: At_rhl_Mutant2_cDNA_P Parameter: Organism Value: A. thaliana
  misc_feature: MA Experiment 108433 PARAMETER Experiment Name: At_rhl_Mutant2_cDNA_P Parameter: Plant Line Value: rhl Mutant vs. wt landsburg
  misc_feature: MA Experiment 108433 PARAMETER Experiment Name: At_rhl_Mutant2_cDNA_P Parameter: Tissue Value: Roots
  misc_feature: MA Experiment ID: 108434 Result: Up-regulated in Transcription
  misc_feature: MA Experiment 108434 PARAMETER Experiment Name: At_Root_Tips_cDNA_P Parameter: Tissue Value: Root Tips
  misc_feature: MA Experiment ID: 108435 Result: Up-regulated in Transcription
  misc_feature: MA Experiment 108435 PARAMETER Experiment Name: At_stm_Mutants_cDNA_P Parameter: Plant Line Value: wt Landsburg vs stm
  misc_feature: MA Experiment 108435 PARAMETER Experiment Name: At_stm_Mutants_cDNA_P Parameter: Tissue Value: Shoot Apical Meristem Region
  misc_feature: MA Experiment ID: 108461 Result: Up-regulated in Transcription
  misc_feature: MA Experiment 108461 PARAMETER Experiment Name: At_Germinating_Seeds_cDNA_P Parameter: Age (day) Value: 1 vs. 0
  misc_feature: MA Experiment 108461 PARAMETER Experiment Name: At_Germinating_Seeds_cDNA_P Parameter: Tissue Value: Germinating Seeds
  misc_feature: MA Experiment ID: 108462 Result: Up-regulated in Transcription
  misc_feature: MA Experiment 108462 PARAMETER Experiment Name: At_Germinating_Seeds_cDNA_P Parameter: Age (day) Value: 2 vs. 0
  misc_feature: MA Experiment 108462 PARAMETER Experiment Name: At_Germinating_Seeds_cDNA_P Parameter: Tissue Value: Germinating Seeds
  misc_feature: MA Experiment ID: 108463 Result: Up-regulated in Transcription
  misc_feature: MA Experiment 108463 PARAMETER Experiment Name: At_Germinating_Seeds_cDNA_P Parameter: Age (day) Value: 3 vs. 0
  misc_feature: MA Experiment 108463 PARAMETER Experiment Name: At_Germinating_Seeds_cDNA_P Parameter: Tissue Value: Germinating Seeds
  misc_feature: MA Experiment ID: 108464 Result: Up-regulated in Transcription
  misc_feature: MA Experiment 108464 PARAMETER Experiment Name: At_Germinating_Seeds_cDNA_P Parameter: Age (day) Value: 4 vs. 0
  misc_feature: MA Experiment 108464 PARAMETER Experiment Name: At_Germinating_Seeds_cDNA_P Parameter: Tissue Value: Germinating Seeds
  misc_feature: MA Experiment ID: 108489 Result: Up-regulated in Transcription
  misc_feature: MA Experiment ID: 108501 Result: Up-regulated in Transcription
  misc_feature: MA Experiment 108501 PARAMETER Experiment Name: At_ap2_floral_buds_cDNA_P Parameter: Plant Line Value: ap2 (Ler.)
  misc_feature: MA Experiment 108501 PARAMETER Experiment Name: At_ap2_floral_buds_cDNA_P Parameter: Tissue Value: Closed Flower
  misc_feature: MA Experiment ID: 108561 Result: Down-regulated in Transcription
  misc_feature: MA Experiment 108561 PARAMETER Experiment Name: At_100uM_ABA_cDNA_P Parameter: Timepoint (hr) Value: 6
  misc_feature: MA Experiment 108561 PARAMETER Experiment Name: At_100uM_ABA_cDNA_P Parameter: Tissue Value: Aerial
  misc_feature: MA Experiment 108561 PARAMETER Experiment Name: At_100uM_ABA_cDNA_P Parameter: Treatment Value: 100uM ABA vs. No Treatment
  misc_feature: MA Experiment ID: 108605 Result: Down-regulated in Transcription
  misc_feature: MA Experiment 108605 PARAMETER Experiment Name: At_100uM_ABA_cDNA_P Parameter: Timepoint (hr) Value: 6
  misc_feature: MA Experiment 108605 PARAMETER Experiment Name: At_100uM_ABA_cDNA_P Parameter: Tissue Value: Aerial
  misc_feature: MA Experiment 108605 PARAMETER Experiment Name: At_100uM_ABA_cDNA_P Parameter: Treatment Value: 100uM ABA vs. No Treatment
  misc_feature: MA Experiment ID: 108607 Result: Down-regulated in Transcription
  misc_feature: MA Experiment 108607 PARAMETER Experiment Name: At_100uM_ABA_cDNA_P Parameter: Timepoint (hr) Value: 4
  misc_feature: MA Experiment 108607 PARAMETER Experiment Name: At_100uM_ABA_cDNA_P Parameter: Tissue Value: Aerial
  misc_feature: MA Experiment 108607 PARAMETER Experiment Name: At_100uM_ABA_cDNA_P Parameter: Treatment Value: 100uM ABA vs. No Treatment
  misc_feature: MA Experiment ID: 108609 Result: Down-regulated in Transcription
  misc_feature: MA Experiment 108609 PARAMETER Experiment Name: At_100uM_ABA_cDNA_P Parameter: Timepoint (hr) Value: 24
  misc_feature: MA Experiment 108609 PARAMETER Experiment Name: At_100uM_ABA_cDNA_P Parameter: Tissue Value: Aerial
  misc_feature: MA Experiment 108609 PARAMETER Experiment Name: At_100uM_ABA_cDNA_P Parameter: Treatment Value: 100uM ABA vs. No Treatment
  misc_feature: MA Experiment ID: 20000030 Result: Down-regulated in Transcription
  misc_feature: MA Experiment 20000030 PARAMETER Experiment Name: At_CS6630_Roots_cDNA_P Parameter: Plant Line Value: CS6630 vs. WS
  misc_feature: MA Experiment 20000030 PARAMETER Experiment Name: At_CS6630_Roots_cDNA_P Parameter: Tissue Value: Roots
  misc_feature: MA Experiment ID: 20000070 Result: Down-regulated in Transcription
  misc_feature: MA Experiment 20000070 PARAMETER Experiment Name: At_100uM_ABA_Mutants_cDNA_P Parameter: Plant Line Value: CS24
  misc_feature: MA Experiment 20000070 PARAMETER Experiment Name: At_100uM_ABA_Mutants_cDNA_P Parameter: Timepoint (hr) Value: 6
  misc_feature: MA Experiment 20000070 PARAMETER Experiment Name: At_100uM_ABA_Mutants_cDNA_P Parameter: Tissue Value: Aerial
  misc_feature: MA Experiment 20000070 PARAMETER Experiment Name: At_100uM_ABA_Mutants_cDNA_P Parameter: Treatment Value: 100uM ABA vs. No Treatment
  misc_feature: MA Experiment ID: 20000071 Result: Down-regulated in Transcription
  misc_feature: MA Experiment 20000071 PARAMETER Experiment Name: At_100uM_ABA_Mutants_cDNA_P Parameter: Plant Line Value: CS8104
  misc_feature: MA Experiment 20000071 PARAMETER Experiment Name: At_100uM_ABA_Mutants_cDNA_P Parameter: Timepoint (hr) Value: 6
  misc_feature: MA Experiment 20000071 PARAMETER Experiment Name: At_100uM_ABA_Mutants_cDNA_P Parameter: Tissue Value: Aerial
  misc_feature: MA Experiment 20000071 PARAMETER Experiment Name: At_100uM_ABA_Mutants_cDNA_P Parameter: Treatment Value: 100uM ABA vs. No Treatment
  misc_feature: MA Experiment ID: 20000111 Result: Down-regulated in Transcription
  misc_feature: MA Experiment 20000111 PARAMETER Experiment Name: At_42deg_Heat_cDNA_P Parameter: Temperature (deg C) Value: 42 vs. 22
  misc_feature: MA Experiment 20000111 PARAMETER Experiment Name: At_42deg_Heat_cDNA_P Parameter: Timepoint (hr) Value: 6
  misc_feature: MA Experiment 20000111 PARAMETER Experiment Name: At_42deg_Heat_cDNA_P Parameter: Tissue Value: Aerial
  misc_feature: MA Experiment ID: 20000144 Result: Down-regulated in Transcription
  misc_feature: MA Experiment 20000144 PARAMETER Experiment Name: At_42deg_Heat_cDNA_P Parameter: Temperature (deg C) Value: 42 vs. 22
  misc_feature: MA Experiment 20000144 PARAMETER Experiment Name: At_42deg_Heat_cDNA_P Parameter: Timepoint (hr) Value: 1
  misc_feature: MA Experiment 20000144 PARAMETER Experiment Name: At_42deg_Heat_cDNA_P Parameter: Tissue Value: Aerial
  misc_feature: MA Experiment ID: 20000169 Result: Down-regulated in Transcription
  misc_feature: MA Experiment 20000169 PARAMETER Experiment Name: At_100uM_ABA_P Parameter: Age (day) Value: 14
  misc_feature: MA Experiment 20000169 PARAMETER Experiment Name: At_100uM_ABA_P Parameter: Organism Value: A. thaliana
  misc_feature: MA Experiment 20000169 PARAMETER Experiment Name: At_100uM_ABA_P Parameter: Plant Line Value: WS
  misc_feature: MA Experiment 20000169 PARAMETER Experiment Name: At_100uM_ABA_P Parameter: Timepoint (hr) Value: 6
  misc_feature: MA Experiment 20000169 PARAMETER Experiment Name: At_100uM_ABA_P Parameter: Tissue Value: Aerial
  misc_feature: MA Experiment 20000169 PARAMETER Experiment Name: At_100uM_ABA_P Parameter: Treatment Value: 100uM ABA vs. No Treatment
  misc_feature: MA Experiment ID: 20000173 Result: Down-regulated in Transcription
  misc_feature: MA Experiment 20000173 PARAMETER Experiment Name: At_42deg_Heat_P Parameter: Age (day) Value: 14
  misc_feature: MA Experiment 20000173 PARAMETER Experiment Name: At_42deg_Heat_P Parameter: Organism Value: A. thaliana
  misc_feature: MA Experiment 20000173 PARAMETER Experiment Name: At_42deg_Heat_P Parameter: Plant Line Value: WS
  misc_feature: MA Experiment 20000173 PARAMETER Experiment Name: At_42deg_Heat_P Parameter: Temperature (deg C) Value: 42 vs. 22
  misc_feature: MA Experiment 20000173 PARAMETER Experiment Name: At_42deg_Heat_P Parameter: Timepoint (hr) Value: 6
  misc_feature: MA Experiment 20000173 PARAMETER Experiment Name: At_42deg_Heat_P Parameter: Tissue Value: Aerial
  misc_feature: MA Experiment ID: 20000180 Result: Up-regulated in Transcription
  misc_feature: MA Experiment 20000180 PARAMETER Experiment Name: At_Germinating_Seeds_P Parameter: Age (hr) Value: 24 vs. 0
  misc_feature: MA Experiment 20000180 PARAMETER Experiment Name: At_Germinating_Seeds_P Parameter: Tissue Value: Germinating Seeds
  misc_feature: MA Experiment ID: 20000185 Result: Up-regulated in Transcription
  misc_feature: MA Experiment 20000185 PARAMETER Experiment Name: At_Roots__P Parameter: Age (day) Value: 7 vs. 21
  misc_feature: MA Experiment 20000185 PARAMETER Experiment Name: At_Roots__P Parameter: Organism Value: A. thaliana
  misc_feature: MA Experiment 20000185 PARAMETER Experiment Name: At_Roots__P Parameter: Tissue Value: Roots vs. Whole Plant
  misc_feature: MA Experiment ID: 20000224 Result: Down-regulated in Transcription
  misc_feature: MA Experiment ID: 20000437 Result: Down-regulated in Transcription
  misc_feature: MA Experiment 20000437 PARAMETER Experiment Name: At_Drought_P Parameter: Age (day) Value: 8
  misc_feature: MA Experiment 20000437 PARAMETER Experiment Name: At_Drought_P Parameter: Organism Value: A. thaliana
  misc_feature: MA Experiment 20000437 PARAMETER Experiment Name: At_Drought_P Parameter: Plant Line Value: WS
  misc_feature: MA Experiment 20000437 PARAMETER Experiment Name: At_Drought_P Parameter: Timepoint (hr) Value: 24
  misc_feature: MA Experiment 20000437 PARAMETER Experiment Name: At_Drought_P Parameter: Tissue Value: Whole Plant
  misc_feature: MA Experiment 20000437 PARAMETER Experiment Name: At_Drought_P Parameter: Treatment Value: Drought vs. No Drought
  misc_feature: MA Experiment ID: 20000439 Result: Up-regulated in Transcription
  misc_feature: MA Experiment 20000439 PARAMETER Experiment Name: At_Roots__P Parameter: Age (day) Value: 14 vs. 21
  misc_feature: MA Experiment 20000439 PARAMETER Experiment Name: At_Roots__P Parameter: Organism Value: A. thaliana
  misc_feature: MA Experiment 20000439 PARAMETER Experiment Name: At_Roots__P Parameter: Tissue Value: Roots vs. Whole Plant
  misc_feature: MA Experiment ID: 20000453 Result: Down-regulated in Transcription
  misc_feature: MA Experiment 20000453 PARAMETER Experiment Name: At_100uM_ABA_P Parameter: Age (day) Value: 15
  misc_feature: MA Experiment 20000453 PARAMETER Experiment Name: At_100uM_ABA_P Parameter: Organism Value: A. thaliana
  misc_feature: MA Experiment 20000453 PARAMETER Experiment Name: At_100uM_ABA_P Parameter: Plant Line Value: WS
  misc_feature: MA Experiment 20000453 PARAMETER Experiment Name: At_100uM_ABA_P Parameter: Timepoint (hr) Value: 24
  misc_feature: MA Experiment 20000453 PARAMETER Experiment Name: At_100uM_ABA_P Parameter: Tissue Value: Aerial
  misc_feature: MA Experiment 20000453 PARAMETER Experiment Name: At_100uM_ABA_P Parameter: Treatment Value: 100uM ABA vs. No Treatment
  misc_feature: MA Experiment ID: 20000455 Result: Down-regulated in Transcription
  misc_feature: MA Experiment 20000455 PARAMETER Experiment Name: At_100uM_ABA_P Parameter: Age (day) Value: 16
  misc_feature: MA Experiment 20000455 PARAMETER Experiment Name: At_100uM_ABA_P Parameter: Organism Value: A. thaliana
  misc_feature: MA Experiment 20000455 PARAMETER Experiment Name: At_100uM_ABA_P Parameter: Plant Line Value: WS
  misc_feature: MA Experiment 20000455 PARAMETER Experiment Name: At_100uM_ABA_P Parameter: Timepoint (hr) Value: 48
  misc_feature: MA Experiment 20000455 PARAMETER Experiment Name: At_100uM_ABA_P Parameter: Tissue Value: Aerial
  misc_feature: MA Experiment 20000455 PARAMETER Experiment Name: At_100uM_ABA_P Parameter: Treatment Value: 100uM ABA vs. No Treatment
  misc_feature: MA Experiment ID: 20000576 Result: Down-regulated in Transcription
  misc_feature: MA Experiment 20000576 PARAMETER Experiment Name: At_100uM_ABA_Mutants__P Parameter: Organism Value: A. thaliana
  misc_feature: MA Experiment 20000576 PARAMETER Experiment Name: At_100uM_ABA_Mutants__P Parameter: Plant Line Value: CS23
  misc_feature: MA Experiment 20000576 PARAMETER Experiment Name: At_100uM_ABA_Mutants__P Parameter: Timepoint (hr) Value: 6
  misc_feature: MA Experiment 20000576 PARAMETER Experiment Name: At_100uM_ABA_Mutants__P Parameter: Tissue Value: Whole Plant
  misc_feature: MA Experiment 20000576 PARAMETER Experiment Name: At_100uM_ABA_Mutants__P Parameter: Treatment Value: 1uM ABA vs. No Treatment
  misc_feature: MA Experiment ID: 20000794 Result: Down-regulated in Transcription
  misc_feature: MA Experiment 20000794 PARAMETER Experiment Name: At_Petals_P Parameter: Age (day) Value: 23-25 days
  misc_feature: MA Experiment 20000794 PARAMETER Experiment Name: At_Petals_P Parameter: Plant Line Value: WS
  misc_feature: MA Experiment 20000794 PARAMETER Experiment Name: At_Petals_P Parameter: Tissue Value: Petals vs. Whole plant
  misc_feature: MA Experiment ID: 20001450 Result: Down-regulated in Transcription
  misc_feature: MA Experiment 20001450 PARAMETER Experiment Name: At_Far-red-induction_P Parameter: Age (day) Value: 7
  misc_feature: MA Experiment 20001450 PARAMETER Experiment Name: At_Far-red-induction_P Parameter: Light Value: Far-red vs. White
  misc_feature: MA Experiment 20001450 PARAMETER Experiment Name: At_Far-red-induction_P Parameter: Organism Value: A. thaliana
  misc_feature: MA Experiment 20001450 PARAMETER Experiment Name: At_Far-red-induction_P Parameter: Plant Line Value: Columbia
  misc_feature: MA Experiment 20001450 PARAMETER Experiment Name: At_Far-red-induction_P Parameter: Timepoint (hr) Value: 8
  misc_feature: MA Experiment 20001450 PARAMETER Experiment Name: At_Far-red-induction_P Parameter: Tissue Value: Whole Plant
  misc_feature: MA Experiment ID: 20001554 Result: Down-regulated in Transcription
  misc_feature: MA Experiment 20001554 PARAMETER Experiment Name: At_Drought_Soil_Dry_P Parameter: Age (day) Value: 21
  misc_feature: MA Experiment 20001554 PARAMETER Experiment Name: At_Drought_Soil_Dry_P Parameter: Organism Value: A. thaliana
  misc_feature: MA Experiment 20001554 PARAMETER Experiment Name: At_Drought_Soil_Dry_P Parameter: Plant Line Value: WS
  misc_feature: MA Experiment 20001554 PARAMETER Experiment Name: At_Drought_Soil_Dry_P Parameter: Post Timepoint (hr) Value: None
  misc_feature: MA Experiment 20001554 PARAMETER Experiment Name: At_Drought_Soil_Dry_P Parameter: Post-Treatment Value: None
  misc_feature: MA Experiment 20001554 PARAMETER Experiment Name: At_Drought_Soil_Dry_P Parameter: Timepoint (day) Value: 7
  misc_feature: MA Experiment 20001554 PARAMETER Experiment Name: At_Drought_Soil_Dry_P Parameter: Treatment Value: Drought vs. No Drought
  misc_feature: MA Experiment ID: 20001555 Result: Down-regulated in Transcription
  misc_feature: MA Experiment 20001555 PARAMETER Experiment Name: At_Drought_Soil_Dry_P Parameter: Age (day) Value: 24
  misc_feature: MA Experiment 20001555 PARAMETER Experiment Name: At_Drought_Soil_Dry_P Parameter: Organism Value: A. thaliana
  misc_feature: MA Experiment 20001555 PARAMETER Experiment Name: At_Drought_Soil_Dry_P Parameter: Plant Line Value: WS
  misc_feature: MA Experiment 20001555 PARAMETER Experiment Name: At_Drought_Soil_Dry_P Parameter: Post Timepoint (hr) Value: None
  misc_feature: MA Experiment 20001555 PARAMETER Experiment Name: At_Drought_Soil_Dry_P Parameter: Post-Treatment Value: None
  misc_feature: MA Experiment 20001555 PARAMETER Experiment Name: At_Drought_Soil_Dry_P Parameter: Timepoint (day) Value: 10
  misc_feature: MA Experiment 20001555 PARAMETER Experiment Name: At_Drought_Soil_Dry_P Parameter: Treatment Value: Drought vs. No Drought
  misc_feature: MA Experiment ID: 20001556 Result: Down-regulated in Transcription
  misc_feature: MA Experiment 20001556 PARAMETER Experiment Name: At_Drought_Soil_Dry_P Parameter: Age (day) Value: 26
  misc_feature: MA Experiment 20001556 PARAMETER Experiment Name: At_Drought_Soil_Dry_P Parameter: Organism Value: A. thaliana
  misc_feature: MA Experiment 20001556 PARAMETER Experiment Name: At_Drought_Soil_Dry_P Parameter: Plant Line Value: WS
  misc_feature: MA Experiment 20001556 PARAMETER Experiment Name: At_Drought_Soil_Dry_P Parameter: Post Timepoint (hr) Value: None
  misc_feature: MA Experiment 20001556 PARAMETER Experiment Name: At_Drought_Soil_Dry_P Parameter: Post-Treatment Value: None
  misc_feature: MA Experiment 20001556 PARAMETER Experiment Name: At_Drought_Soil_Dry_P Parameter: Timepoint (day) Value: 12
  misc_feature: MA Experiment 20001556 PARAMETER Experiment Name: At_Drought_Soil_Dry_P Parameter: Treatment Value: Drought vs. No Drought
  misc_feature: MA Experiment ID: 20001757 Result: Up-regulated in Transcription
  misc_feature: MA Experiment 20001757 PARAMETER Experiment Name: At_50mM_NH4NO3_L-to-H_P Parameter: Timepoint (hr) Value: 6
  misc_feature: MA Experiment 20001757 PARAMETER Experiment Name: At_50mM_NH4NO3_L-to-H_P Parameter: Tissue Value: Leaf
  misc_feature: MA Experiment 20001757 PARAMETER Experiment Name: At_50mM_NH4NO3_L-to-H_P Parameter: Treatment Value: 50mM NH4NO3 vs 100mM Mannitol
  misc_feature: MA Experiment ID: 20001904 Result: Down-regulated in Transcription
  misc_feature: MA Experiment 20001904 PARAMETER Experiment Name: At_Drought_Reproduction_P Parameter: Age (day) Value: 37
  misc_feature: MA Experiment 20001904 PARAMETER Experiment Name: At_Drought_Reproduction_P Parameter: Organism Value: A. thaliana
  misc_feature: MA Experiment 20001904 PARAMETER Experiment Name: At_Drought_Reproduction_P Parameter: Plant Line Value: WS
  misc_feature: MA Experiment 20001904 PARAMETER Experiment Name: At_Drought_Reproduction_P Parameter: Timepoint (day) Value: 7
  misc_feature: MA Experiment 20001904 PARAMETER Experiment Name: At_Drought_Reproduction_P Parameter: Tissue Value: Rosettes
  misc_feature: MA Experiment 20001904 PARAMETER Experiment Name: At_Drought_Reproduction_P Parameter: Treatment Value: Drought vs. No Drought
  misc_feature: MA Experiment ID: 20001911 Result: Down-regulated in Transcription
  misc_feature: MA Experiment 20001911 PARAMETER Experiment Name: At_Drought_Reproduction_P Parameter: Age (day) Value: 40
  misc_feature: MA Experiment 20001911 PARAMETER Experiment Name: At_Drought_Reproduction_P Parameter: Organism Value: A. thaliana
  misc_feature: MA Experiment 20001911 PARAMETER Experiment Name: At_Drought_Reproduction_P Parameter: Plant Line Value: WS
  misc_feature: MA Experiment 20001911 PARAMETER Experiment Name: At_Drought_Reproduction_P Parameter: Timepoint (day) Value: 10
  misc_feature: MA Experiment 20001911 PARAMETER Experiment Name: At_Drought_Reproduction_P Parameter: Tissue Value: Flowers
  misc_feature: MA Experiment 20001911 PARAMETER Experiment Name: At_Drought_Reproduction_P Parameter: Treatment Value: Drought vs. No Drought
aaaacatagtcaaatcaaattttctaagtgtctcataaaaaatgacgagattcggattagctcttttgatgattcttgtgattcaagggtttgtgatcttttcagaagcacaattgaagatgggattctacgaccaaacgtgcccttacgcagagaagatcgtacaagatgttgtcaaccaacatataaacaatgcaccctctttggctgctggcctaattaggatgcattttcatgactgcttcgttcggggttgtgatggttcgatcttaatcaacgcgacatcgagcaaccaacaagtggagaagcttgctcctccgaatctaactgtgagaggtttcgattttatcgataaagtaaagtctgctctagaatcaaagtgccctggaatcgtctcttgcgctgatatcatcacacttgctactagagactctattgttgctattgcttagggtggaccgacatggaacgttccaacggggcgcagagacggacgtatctctaactttgccgaggctatgaacaatattcctcctcctttcggaaacttcacgactctgataaccctctttggaaaccaaggacttgatgttaaagacctcgtcttgttatccggtgcccacacgattggagtgtctcattgctcctccttctcaaaccgtctcttcaatttcaccggcgttggagaccaagatccatcgctcgacagcgaatatgccgacaatctcaaatcacggagatgtttatctatcgctgacaataccacaaaagtcgaaatggatcccggtagtcgaaacaccttcgatcttagctactaccgtcttgtcctaaaacgtcgtggactttttgagtctgacgctgcattgactatgaatcctgcggcattggctcaggtcaaacgcttcgccggaggatcggagcaagagttctttgctgagttctccaactccatggagaaaatgggaaggattggggtcaaaacagggtcggatggggagattcgaagaacatgtgcatttgttaactaaaagtgtttcttactttttctttcgcaacttttttgttttgttttaaatatcttttatattggtttttatgttccttttgtcaacttttttgggtgtttggaagaatttcgagatatgtattattgtatgtggtgaatatgtgattttcaaataaatttcacgtctgtgaaaatcgttg

SEQ ID NO: 23987 - protein, 169 aa, Arabidopsis thaliana
  peptide (1)..(169): Ceres Seq. ID no. 12335320
  misc_feature (1)..(169): Homolog of NCBI NO: 21536908 NR Description: putative peroxidase [Arabidopsis thaliana]
  misc_feature (1)..(169): Homolog of NCBI NO: 15220463 NR Description: peroxidase, putative
  misc_feature (1)..(169): Homolog of NCBI NO: 15237128 NR Description: peroxidase, putative; protein id: At4g11290.1
  misc_feature (1)..(169): Homolog of NCBI NO: 1546692 NR Description: peroxidase; peroxidase ATP19a [Arabidopsis
MNNIPPPFGNFTTLITLFGNQGLDVKDLVLLSGAHTIGVSHCSSFSNRLFNFTGVGDQDPSLDSEYADNLKSRRCLSIADNTTKVEMDPGSRNTFDLSYYRLVLKRRGLFESDAALTMNPAALAQVKRFAGGSEQEFFAEFSNSMEKMGRIGVKTGSDGEIRRTCAFVN

SEQ ID NO: 23988 - protein, 136 aa, Arabidopsis thaliana
  peptide (1)..(136): Ceres Seq. ID no. 12335321
  misc_feature (6)..(136): Homolog of NCBI NO: 21536908 NR Description: putative peroxidase [Arabidopsis thaliana]
  misc_feature (6)..(136): Homolog of NCBI NO: 15220463 NR Description: peroxidase, putative
  misc_feature (1)..(136): Homolog of NCBI NO: 15237128 NR Description: peroxidase, putative; protein id: At4g11290.1
  misc_feature (1)..(136): Homolog of NCBI NO: 1546692 NR Description: peroxidase; peroxidase ATP19a [Arabidopsis
MTRFGLALLMILVIQGFVIFSEAQLKMGFYDQTCPYAEKIVQDVVNQHINNAPSLAAGLIRMHFHDCFVRGCDGSILINATSSNQQVEKLAPPNLTVRGFDFIDKVKSALESKCPGIVSCADIITLATRDSIVAIA

SEQ ID NO: 23989 - protein, 127 aa, Arabidopsis thaliana
  peptide (1)..(127): Ceres Seq. ID no. 12335322
  misc_feature (1)..(127): Homolog of NCBI NO: 21536908 NR Description: putative peroxidase [Arabidopsis thaliana]
  misc_feature (1)..(127): Homolog of NCBI NO: 15220463 NR Description: peroxidase, putative
  misc_feature (1)..(127): Homolog of NCBI NO: 15237128 NR Description: peroxidase, putative; protein id: At4g11290.1
  misc_feature (1)..(127): Homolog of NCBI NO: 1546692 NR Description: peroxidase; peroxidase ATP19a [Arabidopsis
MILVIQGFVIFSEAQLKMGFYDQTCPYAEKIVQDVVNQHINNAPSLAAGLIRMHFHDCFVRGCDGSILINATSSNQQVEKLAPPNLTVRGFDFIDKVKSALESKCPGIVSCADIITLATRDSIVAIA

SEQ ID NO: 23990 - DNA, 1101 bp, Arabidopsis thaliana
  misc_feature (1)..(1101): Ceres Seq. ID no. 12396161
  misc_feature: MA Experiment ID: 108473 Result: Down-regulated in Transcription
  misc_feature: MA Experiment 108473 PARAMETER Experiment Name: At_Drought_Flowers_cDNA_P Parameter: Timepoint (hr) Value: 7 d
  misc_feature: MA Experiment 108473 PARAMETER Experiment Name: At_Drought_Flowers_cDNA_P Parameter: Tissue Value: Flower
  misc_feature: MA Experiment 108473 PARAMETER Experiment Name: At_Drought_Flowers_cDNA_P Parameter: Treatment Value: Drought vs. No Drought
  misc_feature: MA Experiment ID: 108501 Result: Down-regulated in Transcription
  misc_feature: MA Experiment 108501 PARAMETER Experiment Name: At_ap2_floral_buds_cDNA_P Parameter: Plant Line Value: ap2 (Ler.)
  misc_feature: MA Experiment 108501 PARAMETER Experiment Name: At_ap2_floral_buds_cDNA_P Parameter: Tissue Value: Closed Flower
  misc_feature: MA Experiment ID: 20000265 Result: Up-regulated in Transcription
  misc_feature: MA Experiment 20000265 PARAMETER Experiment Name: At_Open_Flower_P Parameter: Age (day) Value: 21
  misc_feature: MA Experiment 20000265 PARAMETER Experiment Name: At_Open_Flower_P Parameter: Plant Line Value: WS
  misc_feature: MA Experiment 20000265 PARAMETER Experiment Name: At_Open_Flower_P Parameter: Tissue Value: Closed Flower vs. Whole Plant
  misc_feature: MA Experiment ID: 20000286 Result: Up-regulated in Transcription
  misc_feature: MA Experiment 20000286 PARAMETER Experiment Name: At_Open_Flower_P Parameter: Age (day) Value: 21
  misc_feature: MA Experiment 20000286 PARAMETER Experiment Name: At_Open_Flower_P Parameter: Plant Line Value: WS
  misc_feature: MA Experiment 20000286 PARAMETER Experiment Name: At_Open_Flower_P Parameter: Tissue Value: Half Open vs. Whole Plant
  misc_feature: MA Experiment ID: 20001910 Result: Down-regulated in Transcription
  misc_feature: MA Experiment 20001910 PARAMETER Experiment Name: At_Drought_Reproduction_P Parameter: Age (day) Value: 37
  misc_feature: MA Experiment 20001910 PARAMETER Experiment Name: At_Drought_Reproduction_P Parameter: Organism Value: A. thaliana
  misc_feature: MA Experiment 20001910 PARAMETER Experiment Name: At_Drought_Reproduction_P Parameter: Plant Line Value: WS
  misc_feature: MA Experiment 20001910 PARAMETER Experiment Name: At_Drought_Reproduction_P Parameter: Timepoint (day) Value: 7
  misc_feature: MA Experiment 20001910 PARAMETER Experiment Name: At_Drought_Reproduction_P Parameter: Tissue Value: Flowers
  misc_feature: MA Experiment 20001910 PARAMETER Experiment Name: At_Drought_Reproduction_P Parameter: Treatment Value: Drought vs. No Drought
aaaaaaccccaaacttcttgattctcccctccgataaccaaaaaatccctattttccgagatgaataatacacgagaagaagtaggggaattcactcaaatcttcaacgctttaatgagtcttatgaggaaatttatattcaaagttctacgcgtcggtccaatccctactaacatttctttcatcatggatggaaaccgtaggttcgccaagaaacgcaatcttgaaggcctagacgcaggacacagagctggtttcatatccgtcaaatatattcttcaatactgcaaagagattggtgtaccgtatgtcacactctacgcatttggtatggacaatttcaagagaggacctgaagaagtcaagtgtgtgatggatctaatgcttgagaaagtcgagctcacgatcgatcaagctgtatcagggaatatgaacggcgtgagaataatctttgccggcgatttgaattcgttaaacgagcgttttagagctgcgacaaagaaactgatggagcttacggaggagaacagagatctgattgttgtggtttgcgttgcttatagcacaagtgtcgagattgttcacgctgttcgagattcttgtgttagaaagagtaaaactggagatggttcttcagctttggagttgagtgatattgaagagtgtatgtatacatcggttgtgccggttccggatcttatggtaagaaccggaggaggagatcggctgagtaacttcatgacgtggcaaacttctagggcacttcttcatagaacggaggctctttggccggagttagggctatggcatttggtttgggccattctgaaattccagagaatgcaagattacttgcagaagaagaagaagctccactaaatagtttctaagttaaaccctagaatgaacttaaacccttatgtttgattacatgtttcttgtggtataagaaacaacgaaccgaaactgagaaaccacaagaaaatcctttttattatgtatgggatacaaaataacaaaaacagacataaaacatcgataattattcaatttaacgatgctaaaacactacaattagaggcttaatttaaagacagtttg

SEQ ID NO: 23991 - protein, 272 aa, Arabidopsis thaliana
  peptide (1)..(272): Ceres Seq. ID no. 12396162
  misc_feature (42)..(267): Pfam Name: Putative undecaprenyl diphosphate synthase Pfam Description: Putative undecaprenyl diphosphate synthase
  misc_feature (1)..(271): Homolog of NCBI NO: 34898408 NR Description: ESTs C72761(E2193),AU056875(S20945), correspond to a region of the predicted gene.~Similar to Thermus gene for homocitrate synthase, homoaconitate hydratase, and
  misc_feature (9)..(270): Homolog of NCBI NO: 18148934 NR Description: cis-prenyltransferase [Hevea brasiliensis]
  misc_feature (9)..(270): Homolog of NCBI NO: 16751461 NR Description: cis-prenyltransferase [Hevea brasiliensis]
  misc_feature (190)..(270): Homolog of NCBI NO: 23491567 NR Description: cis-prenyltransferase [Periploca sepium]
  misc_feature (6)..(213): Homolog of NCBI NO: 23491567 NR Description: cis-prenyltransferase [Periploca sepium]
  misc_feature (22)..(271): Homolog of NCBI NO: 9757752 NR Description: undecaprenyl pyrophosphate synthetase-like
  misc_feature (3)..(271): Homolog of NCBI NO: 15239357 NR Description: undecaprenyl pyrophosphate synthetase (UPP
  misc_feature (22)..(272): Homolog of NCBI NO: 9757753 NR Description: undecaprenyl pyrophosphate synthetase-like
  misc_feature (1)..(272): Homolog of NCBI NO: 15239358 NR Description: undecaprenyl pyrophosphate synthetase (UPP
  misc_feature (1)..(272): Homolog of NCBI NO: 21593244 NR Description: undecaprenyl diphosphate synthase [Arabidopsis
MNNTREEVGEFTQIFNALMSLMRKFIFKVLRVGPIPTNISFIMDGNRRFAKKRNLEGLDAGHRAGFISVKYILQYCKEIGVPYVTLYAFGMDNFKRGPEEVKCVMDLMLEKVELTIDQAVSGNMNGVRIIFAGDLNSLNERFRAATKKLMELTEENRDLIVVVCVAYSTSVEIVHAVRDSCVRKSKTGDGSSALELSDIEECMYTSVVPVPDLMVRTGGGDRLSNFMTWQTSRALLHRTEALWPELGLWHLVWAILKFQRMQDYLQKKKKLH

SEQ ID NO: 23992 - protein, 254 aa, Arabidopsis thaliana
  peptide (1)..(254): Ceres Seq. ID no. 12396163
  misc_feature (24)..(249): Pfam Name: Putative undecaprenyl diphosphate synthase Pfam Description: Putative undecaprenyl diphosphate synthase
  misc_feature (1)..(254): Homolog of NCBI NO: 21593244 NR Description: undecaprenyl diphosphate synthase [Arabidopsis
  misc_feature (1)..(253): Homolog of NCBI NO: 34898408 NR Description: ESTs C72761(E2193),AU056875(S20945), correspond to a region of the predicted gene.~Similar to Thermus gene for homocitrate synthase, homoaconitate hydratase, and
  misc_feature (1)..(252): Homolog of NCBI NO: 18148934 NR Description: cis-prenyltransferase [Hevea brasiliensis]
  misc_feature (1)..(252): Homolog of NCBI NO: 16751461 NR Description: cis-prenyltransferase [Hevea brasiliensis]
  misc_feature (172)..(252): Homolog of NCBI NO: 23491567 NR Description: cis-prenyltransferase [Periploca sepium]
  misc_feature (1)..(195): Homolog of NCBI NO: 23491567 NR Description: cis-prenyltransferase [Periploca sepium]
  misc_feature (4)..(253): Homolog of NCBI NO: 9757752 NR Description: undecaprenyl pyrophosphate synthetase-like
  misc_feature (1)..(253): Homolog of NCBI NO: 15239357 NR Description: undecaprenyl pyrophosphate synthetase (UPP
  misc_feature (4)..(254): Homolog of NCBI NO: 9757753 NR Description: undecaprenyl pyrophosphate synthetase-like
  misc_feature (1)..(254): Homolog of NCBI NO: 15239358 NR Description: undecaprenyl pyrophosphate synthetase (UPP
MSLMRKFIFKVLRVGPIPTNISFIMDGNRRFAKKRNLEGLDAGHRAGFISVKYILQYCKEIGVPYVTLYAFGMDNFKRGPEEVKCVMDLMLEKVELTIDQAVSGNMNGVRIIFAGDLNSLNERFRAATKKLMELTEENRDLIVVVCVAYSTSVEIVHAVRDSCVRKSKTGDGSSALELSDIEECMYTSVVPVPDLMVRTGGGDRLSNFMTWQTSRALLHRTEALWPELGLWHLVWAILKFQRMQDYLQKKKKLH

SEQ ID NO: 23993 - protein, 251 aa, Arabidopsis thaliana
  peptide (1)..(251): Ceres Seq. ID no. 12396164
  misc_feature (21)..(246): Pfam Name: Putative undecaprenyl diphosphate synthase Pfam Description: Putative undecaprenyl diphosphate synthase
  misc_feature (1)..(250): Homolog of NCBI NO: 34898408 NR Description: ESTs C72761(E2193),AU056875(S20945), correspond to a region of the predicted gene.~Similar to Thermus gene for homocitrate synthase, homoaconitate hydratase, and
  misc_feature (1)..(249): Homolog of NCBI NO: 18148934 NR Description: cis-prenyltransferase [Hevea brasiliensis]
  misc_feature (1)..(249): Homolog of NCBI NO: 16751461 NR Description: cis-prenyltransferase [Hevea brasiliensis]
  misc_feature (169)..(249): Homolog of NCBI NO: 23491567 NR Description: cis-prenyltransferase [Periploca sepium]
  misc_feature (1)..(192): Homolog of NCBI NO: 23491567 NR Description: cis-prenyltransferase [Periploca sepium]
  misc_feature (1)..(250): Homolog of NCBI NO: 9757752 NR Description: undecaprenyl pyrophosphate synthetase-like
  misc_feature (1)..(250): Homolog of NCBI NO: 15239357 NR Description: undecaprenyl pyrophosphate synthetase (UPP
  misc_feature (1)..(251): Homolog of NCBI NO: 9757753 NR Description: undecaprenyl pyrophosphate synthetase-like
  misc_feature (1)..(251): Homolog of NCBI NO: 15239358 NR Description: undecaprenyl pyrophosphate synthetase (UPP
  misc_feature (1)..(251): Homolog of NCBI NO: 21593244 NR Description: undecaprenyl diphosphate synthase [Arabidopsis
MRKFIFKVLRVGPIPTNISFIMDGNRRFAKKRNLEGLDAGHRAGFISVKYILQYCKEIGVPYVTLYAFGMDNFKRGPEEVKCVMDLMLEKVELTIDQAVSGNMNGVRIIFAGDLNSLNERFRAATKKLMELTEENRDLIVVVCVAYSTSVEIVHAVRDSCVRKSKTGDGSSALELSDIEECMYTSVVPVPDLMVRTGGGDRLSNFMTWQTSRALLHRTEALWPELGLWHLVWAILKFQRMQDYLQKKKKLH

SEQ ID NO: 23994 - DNA, 1965 bp, Arabidopsis thaliana
  misc_feature (1)..(1965): Ceres Seq. ID no. 12340033
  misc_feature: MA Experiment ID: 108488 Result: Up-regulated in Transcription
  misc_feature: MA Experiment ID: 108573 Result: Up-regulated in Transcription
  misc_feature: MA Experiment 108573 PARAMETER Experiment Name: At_Drought_cDNA_P Parameter: Timepoint (hr) Value: 6
  misc_feature: MA Experiment 108573 PARAMETER Experiment Name: At_Drought_cDNA_P Parameter: Tissue Value: Aerial
  misc_feature: MA Experiment 108573 PARAMETER Experiment Name: At_Drought_cDNA_P Parameter: Treatment Value: Drought vs. No Drought
  misc_feature: MA Experiment ID: 108576 Result: Down-regulated in Transcription
  misc_feature: MA Experiment 108576 PARAMETER Experiment Name: At_42deg_Heat_cDNA_P Parameter: Temperature (deg C) Value: 42 vs. 22
  misc_feature: MA Experiment 108576 PARAMETER Experiment Name: At_42deg_Heat_cDNA_P Parameter: Timepoint (hr) Value: 1
  misc_feature: MA Experiment 108576 PARAMETER Experiment Name: At_42deg_Heat_cDNA_P Parameter: Tissue Value: Aerial
  misc_feature: MA Experiment ID: 108607 Result: Up-regulated in Transcription
  misc_feature: MA Experiment 108607 PARAMETER Experiment Name: At_100uM_ABA_cDNA_P Parameter: Timepoint (hr) Value: 4
  misc_feature: MA Experiment 108607 PARAMETER Experiment Name: At_100uM_ABA_cDNA_P Parameter: Tissue Value: Aerial
  misc_feature: MA Experiment 108607 PARAMETER Experiment Name: At_100uM_ABA_cDNA_P Parameter: Treatment Value: 100uM ABA vs. No Treatment
  misc_feature: MA Experiment ID: 20000090 Result: Down-regulated in Transcription
  misc_feature: MA Experiment ID: 20000111 Result: Down-regulated in Transcription
  misc_feature: MA Experiment 20000111 PARAMETER Experiment Name: At_42deg_Heat_cDNA_P Parameter: Temperature (deg C) Value: 42 vs. 22
  misc_feature: MA Experiment 20000111 PARAMETER Experiment Name: At_42deg_Heat_cDNA_P Parameter: Timepoint (hr) Value: 6
  misc_feature: MA Experiment 20000111 PARAMETER Experiment Name: At_42deg_Heat_cDNA_P Parameter: Tissue Value: Aerial
  misc_feature: MA Experiment ID: 20000112 Result: Down-regulated in Transcription
  misc_feature: MA Experiment 20000112 PARAMETER Experiment Name: At_42deg_Heat_cDNA_P Parameter: Temperature (deg C) Value: 42 vs. 22
  misc_feature: MA Experiment 20000112 PARAMETER Experiment Name: At_42deg_Heat_cDNA_P Parameter: Timepoint (hr) Value: 2
  misc_feature: MA Experiment 20000112 PARAMETER Experiment Name: At_42deg_Heat_cDNA_P Parameter: Tissue Value: Aerial
  misc_feature: MA Experiment ID: 20000113 Result: Down-regulated in Transcription
  misc_feature: MA Experiment 20000113 PARAMETER Experiment Name: At_42deg_Heat_cDNA_P Parameter: Temperature (deg C) Value: 42 vs. 22
  misc_feature: MA Experiment 20000113 PARAMETER Experiment Name: At_42deg_Heat_cDNA_P Parameter: Timepoint (hr) Value: 8
  misc_feature: MA Experiment 20000113 PARAMETER Experiment Name: At_42deg_Heat_cDNA_P Parameter: Tissue Value: Aerial
  misc_feature: MA Experiment ID: 20000144 Result: Down-regulated in Transcription
  misc_feature: MA Experiment 20000144 PARAMETER Experiment Name: At_42deg_Heat_cDNA_P Parameter: Temperature (deg C) Value: 42 vs. 22
  misc_feature: MA Experiment 20000144 PARAMETER Experiment Name: At_42deg_Heat_cDNA_P Parameter: Timepoint (hr) Value: 1
  misc_feature: MA Experiment 20000144 PARAMETER Experiment Name: At_42deg_Heat_cDNA_P Parameter: Tissue Value: Aerial
  misc_feature: MA Experiment ID: 20000171 Result: Down-regulated in Transcription
  misc_feature: MA Experiment 20000171 PARAMETER Experiment Name: At_42deg_Heat_P Parameter: Age (day) Value: 14
  misc_feature: MA Experiment 20000171 PARAMETER Experiment Name: At_42deg_Heat_P Parameter: Organism Value: A. thaliana
  misc_feature: MA Experiment 20000171 PARAMETER Experiment Name: At_42deg_Heat_P Parameter: Plant Line Value: WS
  misc_feature: MA Experiment 20000171 PARAMETER Experiment Name: At_42deg_Heat_P Parameter: Temperature (deg C) Value: 42 vs. 22
  misc_feature: MA Experiment 20000171 PARAMETER Experiment Name: At_42deg_Heat_P Parameter: Timepoint (hr) Value: 1
  misc_feature: MA Experiment 20000171 PARAMETER Experiment Name: At_42deg_Heat_P Parameter: Tissue Value: Aerial
  misc_feature: MA Experiment ID: 20000173 Result: Down-regulated in Transcription
  misc_feature: MA Experiment 20000173 PARAMETER Experiment Name: At_42deg_Heat_P Parameter: Age (day) Value: 14
  misc_feature: MA Experiment 20000173 PARAMETER Experiment Name: At_42deg_Heat_P Parameter: Organism Value: A. thaliana
  misc_feature: MA Experiment 20000173 PARAMETER Experiment Name: At_42deg_Heat_P Parameter: Plant Line Value: WS
  misc_feature: MA Experiment 20000173 PARAMETER Experiment Name: At_42deg_Heat_P Parameter: Temperature (deg C) Value: 42 vs. 22
  misc_feature: MA Experiment 20000173 PARAMETER Experiment Name: At_42deg_Heat_P Parameter: Timepoint (hr) Value: 6
  misc_feature: MA Experiment 20000173 PARAMETER Experiment Name: At_42deg_Heat_P Parameter: Tissue Value: Aerial
  misc_feature: MA Experiment ID: 20000184 Result: Up-regulated in Transcription
  misc_feature: MA Experiment 20000184 PARAMETER Experiment Name: At_Shoots__P Parameter: Age (day) Value: 7
  misc_feature: MA Experiment 20000184 PARAMETER Experiment Name: At_Shoots__P Parameter: Tissue Value: Shoots vs. Whole Plant
  misc_feature: MA Experiment ID: 20000185 Result: Down-regulated in Transcription
  misc_feature: MA Experiment 20000185 PARAMETER Experiment Name: At_Roots__P Parameter: Age (day) Value: 7 vs. 21
  misc_feature: MA Experiment 20000185 PARAMETER Experiment Name: At_Roots__P Parameter: Organism Value: A. thaliana
  misc_feature: MA Experiment 20000185 PARAMETER Experiment Name: At_Roots__P Parameter: Tissue Value: Roots vs. Whole Plant
  misc_feature: MA Experiment ID: 20000234 Result: Up-regulated in Transcription
  misc_feature: MA Experiment 20000234 PARAMETER Experiment Name: At_Siliques_P Parameter: Age (day) Value: 21
  misc_feature: MA Experiment 20000234 PARAMETER Experiment Name: At_Siliques_P Parameter: Organism Value: A. thaliana
  misc_feature: MA Experiment 20000234 PARAMETER Experiment Name: At_Siliques_P Parameter: Plant Line Value: WS
  misc_feature: MA Experiment 20000234 PARAMETER Experiment Name: At_Siliques_P Parameter: Tissue Value: Less Than 5mm Siliques vs. Whole Plant
  misc_feature: MA Experiment ID: 20000235 Result: Up-regulated in Transcription
  misc_feature: MA Experiment 20000235 PARAMETER Experiment Name: At_Siliques_P Parameter: Age (day) Value: 21
  misc_feature: MA Experiment 20000235 PARAMETER Experiment Name: At_Siliques_P Parameter: Organism Value: A. thaliana
  misc_feature: MA Experiment 20000235 PARAMETER Experiment Name: At_Siliques_P Parameter: Plant Line Value: WS
  misc_feature: MA Experiment 20000235 PARAMETER Experiment Name: At_Siliques_P Parameter: Tissue Value: 5-10mm Siliques vs. Whole Plant
  misc_feature: MA Experiment ID: 20000439 Result: Down-regulated in Transcription
  misc_feature: MA Experiment 20000439 PARAMETER Experiment Name: At_Roots__P Parameter: Age (day) Value: 14 vs. 21
  misc_feature: MA Experiment 20000439 PARAMETER Experiment Name: At_Roots__P Parameter: Organism Value: A. thaliana
  misc_feature: MA Experiment 20000439 PARAMETER Experiment Name: At_Roots__P Parameter: Tissue Value: Roots vs. Whole Plant
  misc_feature: MA Experiment ID: 20001557 Result: Up-regulated in Transcription
  misc_feature: MA Experiment 20001557 PARAMETER Experiment Name: At_Drought_Soil_Dry_P Parameter: Age (day) Value: 27
  misc_feature: MA Experiment 20001557 PARAMETER Experiment Name: At_Drought_Soil_Dry_P Parameter: Organism Value: A. thaliana
  misc_feature: MA Experiment 20001557 PARAMETER Experiment Name: At_Drought_Soil_Dry_P Parameter: Plant Line Value: WS
  misc_feature: MA Experiment 20001557 PARAMETER Experiment Name: At_Drought_Soil_Dry_P Parameter: Post Timepoint (hr) Value: 3
  misc_feature: MA Experiment 20001557 PARAMETER Experiment Name: At_Drought_Soil_Dry_P Parameter: Post-Treatment Value: Re-Water vs. No Drought
  misc_feature: MA Experiment 20001557 PARAMETER Experiment Name: At_Drought_Soil_Dry_P Parameter: Timepoint (day) Value: 13
  misc_feature: MA Experiment 20001557 PARAMETER Experiment Name: At_Drought_Soil_Dry_P Parameter: Treatment Value: Drought vs. No Drought
  misc_feature: MA Experiment ID: 20001558 Result: Up-regulated in Transcription
  misc_feature: MA Experiment 20001558 PARAMETER Experiment Name: At_Drought_Soil_Dry_P Parameter: Age (day) Value: 27
  misc_feature: MA Experiment 20001558 PARAMETER Experiment Name: At_Drought_Soil_Dry_P Parameter: Organism Value: A. thaliana
  misc_feature: MA Experiment 20001558 PARAMETER Experiment Name: At_Drought_Soil_Dry_P Parameter: Plant Line Value: WS
  misc_feature: MA Experiment 20001558 PARAMETER Experiment Name: At_Drought_Soil_Dry_P Parameter: Post Timepoint (hr) Value: 6
  misc_feature: MA Experiment 20001558 PARAMETER Experiment Name: At_Drought_Soil_Dry_P Parameter: Post-Treatment Value: Re-Water vs. No Drought
  misc_feature: MA Experiment 20001558 PARAMETER Experiment Name: At_Drought_Soil_Dry_P Parameter: Timepoint (day) Value: 13
  misc_feature: MA Experiment 20001558 PARAMETER Experiment Name: At_Drought_Soil_Dry_P Parameter: Treatment Value: Drought vs. No Drought
gccaacacaactccttataagatatacacttcatcaacctatagatctcactcacataatcaacctacaaaacaaaaacaagaatgggtagatccaacgagcaagatctgctctctaccgagatcgttaatcgtgggatcgaaccatccggtcctaacgccggctcaccaacgttctcggttagggtcaggagacgtttgcctgattttcttcagtcggtgaacttgaagtacgtgaaacttggttaccactacctcataaaccatgcggtttatttggcgaccataccggttcttgtgctggtttttagtgctgaggttgggagtttaagcagagaagagatttggaagaagctttgggactatgatcttgcaactgttatcggattcttcggtgtctttgttttaaccgcttgtgtctacttcatgtctcgtcctcgctctgtttatcttattgatttcgcttgttacaagccctccgatgaacacaaggtgacaaaagaagagttcatagaactagcgagaaaatcagggaagttcgacgaagagacactcggtttcaagaagaggatcttacaagcctcaggcataggcgacgagacatacgtcccaagatccatctcttcatcagaaaacataacaacgatgaaagaaggtcgtgaagaagcctctacagtgatctttggagcactagacgaactcttcgagaagacacgtgtaaaacctaaagacgttggtgtccttgtggttaactgtagcattttcaacccgacaccgtcgttgtccgcaatggtgataaaccattacaagatgagagggaacatacttagttacaaccttggagggatgggatgttcggctggaatcatagctattgatcttgctcgtgacatgcttcagtctaaccctaatagttatgctgttgttgtgagtactgagatggttgggtataattggtacgtgggaagtgacaagtcaatggttatacctaattgtttctttaggatgggttgttctgccgttatgctctctaaccgtcgtcgtgactttcgccatgctaagtaccgtctcgagcacattgtccgaactcataaggctgctgacgaccgtagcttcaggagtgtgtaccaggaagaagatgaacaaggattcaaggggttgaagataagtagagacttaatggaagttggaggtgaagctctcaagacaaacatcactaccttaggtcctcttgtcctacctttctccgagcagcttctcttctttgctgctttgctccgccgaacattctcacctgctgccaaaacgtccacaaccacttccttctctacttccgccaccgcaaaaaccaatggaatcaagtcttcctcttccgatctgtccaagccatacatcccggactacaagctcgccttcgagcatttttgcttccacgcggcaagcaaagtagtgcttgaagagcttcaaaagaatctaggcttgagtgaagagaatatggaggcttctaggatgacacttcacaggtttggaaacacttctagcagtggaatctggtatgagttggcttacatggaggccaaggaaagtgttcgtagaggcgatagggtttggcagatcgctttcggttctggttttaagtgtaacagtgtggtgtggaaggcaatgaggaaggtgaagaagccaaccaggaacaatccttgggtggattgcatcaaccgttaccctgtgcctctctaaattatcattcttctaaattaaatcaagtaagatctctaattactccaaccaaaagatacagtttggttggatgataggagttatttactgatcattcgtatctaagtctgttataagaatggatgtggctagagtcctgttcagcttcaacttgttttattttttgtttgttctctattggatcttcataaactttgagagattaaagaaaaaaactcttctttagttc

SEQ ID NO: 23995 - protein, 550 aa, Arabidopsis thaliana
  peptide (1)..(550): Ceres Seq. ID no. 12340034
  misc_feature (331)..(416): Pfam Name: Chalcone and stilbene synthases, C-terminal domain Pfam Description: Chalcone and stilbene synthases, C-terminal
  misc_feature (414)..(547): Homolog of NCBI NO: 19351907 NR Description: putative beta-ketoacyl-CoA synthase [Antirrhinum
  misc_feature (4)..(413): Homolog of NCBI NO: 19351907 NR Description: putative beta-ketoacyl-CoA synthase [Antirrhinum
  misc_feature (4)..(550): Homolog of NCBI NO: 28864534 NR Description: fiddlehead-like protein [Tropaeolum majus]
  misc_feature (426)..(548): Homolog of NCBI NO: 18447765 NR Description: fiddlehead-like protein [Gossypium hirsutum]
  misc_feature (1)..(416): Homolog of NCBI NO: 18447765 NR Description: fiddlehead-like protein [Gossypium hirsutum]
  misc_feature (1)..(508): Homolog of NCBI NO: 8177719 NR Description: fiddlehead protein [Arabidopsis thaliana]
  misc_feature (1)..(550): Homolog of NCBI NO: 8177723 NR Description: fiddlehead protein [Arabidopsis thaliana]
  misc_feature (1)..(550): Homolog of NCBI NO: 8177711 NR Description: fiddlehead protein [Arabidopsis thaliana]
  misc_feature (1)..(550): Homolog of NCBI NO: 8177727 NR Description: fiddlehead protein [Arabidopsis thaliana]
  misc_feature (1)..(550): Homolog of NCBI NO: 15225270 NR Description: beta-ketoacyl-CoA synthase (FIDDLEHEAD)
MGRSNEQDLLSTEIVNRGIEPSGPNAGSPTFSVRVRRRLPDFLQSVNLKYVKLGYHYLINHAVYLATIPVLVLVFSAEVGSLSREEIWKKLWDYDLATVIGFFGVFVLTACVYFMSRPRSVYLIDFACYKPSDEHKVTKEEFIELARKSGKFDEETLGFKKRILQASGIGDETYVPRSISSSENITTMKEGREEASTVIFGALDELFEKTRVKPKDVGVLVVNCSIFNPTPSLSAMVINHYKMRGNILSYNLGGMGCSAGIIAIDLARDMLQSNPNSYAVVVSTEMVGYNWYVGSDKSMVIPNCFFRMGCSAVMLSNRRRDFRHAKYRLEHIVRTHKAADDRSFRSVYQEEDEQGFKGLKISRDLMEVGGEALKTNITTLGPLVLPFSEQLLFFAALLRRTFSPAAKTSTTTSFSTSATAKTNGIKSSSSDLSKPYIPDYKLAFEHFCFHAASKVVLEELQKNLGLSEENMEASRMTLHRFGNTSSSGIWYELAYMEAKESVRRGDRVWQIAFGSGFKCNSVVWKAMRKVKKPTRNNPWVDCINRYPVPL

SEQ ID NO: 23996 - protein, 436 aa, Arabidopsis thaliana
  peptide (1)..(436): Ceres Seq. ID no. 12340035
  misc_feature (217)..(302): Pfam Name: Chalcone and stilbene synthases, C-terminal domain Pfam Description: Chalcone and stilbene synthases, C-terminal
  misc_feature (300)..(433): Homolog of NCBI NO: 19351907 NR Description: putative beta-ketoacyl-CoA synthase [Antirrhinum
  misc_feature (1)..(299): Homolog of NCBI NO: 19351907 NR Description: putative beta-ketoacyl-CoA synthase [Antirrhinum
  misc_feature (1)..(436): Homolog of NCBI NO: 28864534 NR Description: fiddlehead-like protein [Tropaeolum majus]
  misc_feature (312)..(434): Homolog of NCBI NO: 18447765 NR Description: fiddlehead-like protein [Gossypium hirsutum]
  misc_feature (1)..(302): Homolog of NCBI NO: 18447765 NR Description: fiddlehead-like protein [Gossypium hirsutum]
  misc_feature (1)..(394): Homolog of NCBI NO: 8177719 NR Description: fiddlehead protein [Arabidopsis thaliana]
  misc_feature (1)..(436): Homolog of NCBI NO: 8177723 NR Description: fiddlehead protein [Arabidopsis thaliana]
  misc_feature (1)..(436): Homolog of NCBI NO: 8177711 NR Description: fiddlehead protein [Arabidopsis thaliana]
  misc_feature (1)..(436): Homolog of NCBI NO: 8177727 NR Description: fiddlehead protein [Arabidopsis thaliana]
  misc_feature (1)..(436): Homolog of NCBI NO: 15225270 NR Description: beta-ketoacyl-CoA synthase (FIDDLEHEAD)
MSRPRSVYLIDFACYKPSDEHKVTKEEFIELARKSGKFDEETLGFKKRILQASGIGDETYVPRSISSSENITTMKEGREEASTVIFGALDELFEKTRVKPKDVGVLVVNCSIFNPTPSLSAMVINHYKMRGNILSYNLGGMGCSAGIIAIDLARDMLQSNPNSYAVVVSTEMVGYNWYVGSDKSMVIPNCFFRMGCSAVMLSNRRRDFRHAKYRLEHIVRTHKAADDRSFRSVYQEEDEQGFKGLKISRDLMEVGGEALKTNITTLGPLVLPFSEQLLFFAALLRRTFSPAAKTSTTTSFSTSATAKTNGIKSSSSDLSKPYIPDYKLAFEHFCFHAASKVVLEELQKNLGLSEENMEASRMTLHRFGNTSSSGIWYELAYMEAKESVRRGDRVWQIAFGSGFKCNSVVWKAMRKVKKPTRNNPWVDCINRYPVPL

SEQ ID NO: 23997 - protein, 363 aa, Arabidopsis thaliana
  peptide (1)..(363): Ceres Seq. ID no. 12340036
  misc_feature (144)..(229): Pfam Name: Chalcone and stilbene synthases, C-terminal domain Pfam Description: Chalcone and stilbene synthases, C-terminal
  misc_feature (227)..(360): Homolog of NCBI NO: 19351907 NR Description: putative beta-ketoacyl-CoA synthase [Antirrhinum
  misc_feature (1)..(226): Homolog of NCBI NO: 19351907 NR Description: putative beta-ketoacyl-CoA synthase [Antirrhinum
  misc_feature (1)..(363): Homolog of NCBI NO: 28864534 NR Description: fiddlehead-like protein [Tropaeolum majus]
  misc_feature (239)..(361): Homolog of NCBI NO: 18447765 NR Description: fiddlehead-like protein [Gossypium hirsutum]
  misc_feature (1)..(229): Homolog of NCBI NO: 18447765 NR Description: fiddlehead-like protein [Gossypium hirsutum]
  misc_feature (1)..(321): Homolog of NCBI NO: 8177719 NR Description: fiddlehead protein [Arabidopsis thaliana]
  misc_feature (1)..(363): Homolog of NCBI NO: 8177723 NR Description: fiddlehead protein [Arabidopsis thaliana]
  misc_feature (1)..(363): Homolog of NCBI NO: 8177711 NR Description: fiddlehead protein [Arabidopsis thaliana]
  misc_feature (1)..(363): Homolog of NCBI NO: 8177727 NR Description: fiddlehead protein [Arabidopsis thaliana]
  misc_feature (1)..(363): Homolog of NCBI NO: 15225270 NR Description: beta-ketoacyl-CoA synthase (FIDDLEHEAD)
MKEGREEASTVIFGALDELFEKTRVKPKDVGVLVVNCSIFNPTPSLSAMVINHYKMRGNILSYNLGGMGCSAGIIAIDLARDMLQSNPNSYAVVVSTEMVGYNWYVGSDKSMVIPNCFFRMGCSAVMLSNRRRDFRHAKYRLEHIVRTHKAADDRSFRSVYQEEDEQGFKGLKISRDLMEVGGEALKTNITTLGPLVLPFSEQLLFFAALLRRTFSPAAKTSTTTSFSTSATAKTNGIKSSSSDLSKPYIPDYKLAFEHFCFHAASKVVLEELQKNLGLSEENMEASRMTLHRFGNTSSSGIWYELAYMEAKESVRRGDRVWQIAFGSGFKCNSVVWKAMRKVKKPTRNNPWVDCINRYPVPL

SEQ ID NO: 23998 - DNA, 1454 bp, Arabidopsis thaliana
  misc_feature (1)..(1454): Ceres Seq. ID no. 12376228
  misc_feature: MA Experiment ID: 108434 Result: Up-regulated in Transcription
  misc_feature: MA Experiment 108434 PARAMETER Experiment Name: At_Root_Tips_cDNA_P Parameter: Tissue Value: Root Tips
  misc_feature: MA Experiment ID: 108461 Result: Down-regulated in Transcription
  misc_feature: MA Experiment 108461 PARAMETER Experiment Name: At_Germinating_Seeds_cDNA_P Parameter: Age (day) Value: 1 vs. 0
  misc_feature: MA Experiment 108461 PARAMETER Experiment Name: At_Germinating_Seeds_cDNA_P Parameter: Tissue Value: Germinating Seeds
  misc_feature: MA Experiment ID: 108462 Result: Down-regulated in Transcription
  misc_feature: MA Experiment 108462 PARAMETER Experiment Name: At_Germinating_Seeds_cDNA_P Parameter: Age (day) Value: 2 vs. 0
  misc_feature: MA Experiment 108462 PARAMETER Experiment Name: At_Germinating_Seeds_cDNA_P Parameter: Tissue Value: Germinating Seeds
  misc_feature: MA Experiment ID: 108464 Result: Down-regulated in Transcription
  misc_feature: MA Experiment 108464 PARAMETER Experiment Name: At_Germinating_Seeds_cDNA_P Parameter: Age (day) Value: 4 vs. 0
  misc_feature: MA Experiment 108464 PARAMETER Experiment Name: At_Germinating_Seeds_cDNA_P Parameter: Tissue Value: Germinating Seeds
  misc_feature: MA Experiment ID: 108595 Result: Down-regulated in Transcription
  misc_feature: MA Experiment 108595 PARAMETER Experiment Name: At_Ler-pi_Ovule_cDNA_P Parameter: Plant Line Value: null
  misc_feature: MA Experiment ID: 20000113 Result: Down-regulated in Transcription
  misc_feature: MA Experiment 20000113 PARAMETER Experiment Name: At_42deg_Heat_cDNA_P Parameter: Temperature (deg C) Value: 42 vs. 22
  misc_feature: MA Experiment 20000113 PARAMETER Experiment Name: At_42deg_Heat_cDNA_P Parameter: Timepoint (hr) Value: 8
  misc_feature: MA Experiment 20000113 PARAMETER Experiment Name: At_42deg_Heat_cDNA_P Parameter: Tissue Value: Aerial
actttaaaacaaaaaaaaagttgataaattgcttcagtgtcaaattctgagatctgtaaaagatgagcgacggagacgacgctgctagacgccgtaccgcggcggtgactgattaccggaagaagctccttcatcacaaggagctcgaatcccgtgtccgaacagctagggagaatttaagagcagctaagaaggaattcaacaaaactgaggatgatttgaagtctcttcaaagcgttggccagattattggagaagtactacgtcctcttgataacgagcgattgattgttaaggcaagtagtggccctcgttatgtggtgggttgtcgtagcaaggtggacaaggaaaagcttacttctggaactcgagttgtcctggatatgactacgctgacaattatgcgagcccttcctcgtgaagttgatcctgttgtttataacatgttgcatgaagatccaggcaacattagttactcagctgtgggtggtttaggtgatcagatcagagaacttagggaatctattgagctgcctctcatgaatcctgaacttttccttagagttgggattaaacctcctaagggtgtccttctgtatggacctccgggtactggaaaaactctactagctagggctattgccagcaatatcgacgccaacttcttgaaggttgtatctagtgcaatcatagacaaatacattggagaaagtgctaggttgattcgagaaatgtttaactatgctcgtgaacatcagccttgtatcattttcatggatgaaatcgatgctattggtggacgccgttttagtgaaggaactagtgctgatcgtgaaattcaaagaacacttatggagttacttaaccagcttgatgggtttgaccaacttggaaaggtgaaaatgataatggccaccaacaggccggatgttcttgatccagcacttctccgtccgggtaggttagatagaaagatcgagatcccgttgccaaatgaacaatcaagaatggaaatcctcaagatccacgcatctggcattgccaagcatggagaaatagactatgaggctatcgtgaaacttggagagggtttcaatggtgccgatctgcgtaacatatgcactgaagctggaatgttcgcaatcagagcagagcgtgactatgtaatacatgaagacttcatgaaggctgtgagaaagctgagcgaggccaagaagcttgagtcgagctctcactataacgcggattttgggaaagagtaagaaaagaataagctcagagaagaagagagggcctaaagggcagtgaaaaactctgttatttacttcgaaaaacaagctgatgattctgtttcagtttctcaatgttttgttttgaggttctagtaaacacaaaaattcttgttttagtaatgacaacaattttctgtttatgcatcatcctatatctttttt

SEQ ID NO: 23999 - protein, 399 aa, Arabidopsis thaliana
  peptide (1)..(399): Ceres Seq. ID no. 12376229
  misc_feature (175)..(362): Pfam Name: ATPase family associated with various cellular Pfam Description: ATPase family associated with various cellular
  misc_feature (27)..(383): Homolog of NCBI NO: 20093057 NR Description: proteasome-activating nucleotidase
  misc_feature (11)..(392): Homolog of NCBI NO: 2960216 NR Description: 26S proteasome regulatory ATPase subunit 10b
  misc_feature (11)..(392): Homolog of NCBI NO: 6434958 NR Description: 26S proteasome regulatory complex subunit p42D
  misc_feature (11)..(392): Homolog of NCBI NO: 17945503 NR Description: RE23388p [Drosophila melanogaster]
  misc_feature (11)..(392): Homolog of NCBI NO: 24640100 NR Description: CG3455-PA [Drosophila melanogaster]
  misc_feature (26)..(399): Homolog of NCBI NO: 17298147 NR Description: 26S proteasome regulatory particle triple-A
  misc_feature (1)..(399): Homolog of NCBI NO: 11094192 NR Description: 26S proteasome regulatory particle triple-A
  misc_feature (1)..(399): Homolog of NCBI NO: 24745880 NR Description: 26S proteasome AAA-ATPase subunit RPT4a [Solanum
  misc_feature (1)..(399): Homolog of NCBI NO: 15239140 NR Description: 26S proteasome AAA-ATPase subunit RPT4a
  misc_feature (1)..(399): Homolog of NCBI NO: 15219503 NR Description: 26S proteasome regulatory particle triple-A
MSDGDDAARRRTAAVTDYRKKLLHHKELESRVRTARENLRAAKKEFNKTEDDLKSLQSVGQIIGEVLRPLDNERLIVKASSGPRYVVGCRSKVDKEKLTSGTRVVLDMTTLTIMRALPREVDPVVYNMLHEDPGNISYSAVGGLGDQIRELRESIELPLMNPELFLRVGIKPPKGVLLYGPPGTGKTLLARAIASNIDANFLKVVSSAIIDKYIGESARLIREMFNYAREHQPCIIFMDEIDAIGGRRFSEGTSADREIQRTLMELLNQLDGFDQLGKVKMIMATNRPDVLDPALLRPGRLDRKIEIPLPNEQSRMEILKIHASGIAKHGEIDYEAIVKLGEGFNGADLRNICTEAGMFAIRAERDYVIHEDFMKAVRKLSEAKKLESSSHYNADFGKE

SEQ ID NO: 24000 - protein, 292 aa, Arabidopsis thaliana
  peptide (1)..(292): Ceres Seq. ID no. 12376230
  misc_feature (68)..(255): Pfam Name: ATPase family associated with various cellular Pfam Description: ATPase family associated with various cellular
  misc_feature (1)..(276): Homolog of NCBI NO: 20093057 NR Description: proteasome-activating nucleotidase
  misc_feature (1)..(285): Homolog of NCBI NO: 2960216 NR Description: 26S proteasome regulatory ATPase subunit 10b
  misc_feature (1)..(285): Homolog of NCBI NO: 6434958 NR Description: 26S proteasome regulatory complex subunit p42D
  misc_feature (1)..(285): Homolog of NCBI NO: 17945503 NR Description: RE23388p [Drosophila melanogaster]
  misc_feature (1)..(285): Homolog of NCBI NO: 24640100 NR Description: CG3455-PA [Drosophila melanogaster]
  misc_feature (1)..(292): Homolog of NCBI NO: 17298147 NR Description: 26S proteasome regulatory particle triple-A
  misc_feature (1)..(292): Homolog of NCBI NO: 11094192 NR Description: 26S proteasome regulatory particle triple-A
  misc_feature (1)..(292): Homolog of NCBI NO: 24745880 NR Description: 26S proteasome AAA-ATPase subunit RPT4a [Solanum
  misc_feature (1)..(292): Homolog of NCBI NO: 15239140 NR Description: 26S proteasome AAA-ATPase subunit RPT4a
  misc_feature (1)..(292): Homolog of NCBI NO: 15219503 NR Description: 26S proteasome regulatory particle triple-A
MTTLTIMRALPREVDPVVYNMLHEDPGNISYSAVGGLGDQIRELRESIELPLMNPELFLRVGIKPPKGVLLYGPPGTGKTLLARAIASNIDANFLKVVSSAIIDKYIGESARLIREMFNYAREHQPCIIFMDEIDAIGGRRFSEGTSADREIQRTLMELLNQLDGFDQLGKVKMIMATNRPDVLDPALLRPGRLDRKIEIPLPNEQSRMEILKIHASGIAKHGEIDYEAIVKLGEGFNGADLRNICTEAGMFAIRAERDYVIHEDFMKAVRKLSEAKKLESSSHYNADFGKE

SEQ ID NO: 24001 - protein, 286 aa, Arabidopsis thaliana
  peptide (1)..(286): Ceres Seq. ID no. 12376231
  misc_feature (62)..(249): Pfam Name: ATPase family associated with various cellular Pfam Description: ATPase family associated with various cellular
  misc_feature (1)..(270): Homolog of NCBI NO: 20093057 NR Description: proteasome-activating nucleotidase
  misc_feature (1)..(279): Homolog of NCBI NO: 2960216 NR Description: 26S proteasome regulatory ATPase subunit 10b
  misc_feature (1)..(279): Homolog of NCBI NO: 6434958 NR Description: 26S proteasome regulatory complex subunit p42D
  misc_feature (1)..(279): Homolog of NCBI NO: 17945503 NR Description: RE23388p [Drosophila melanogaster]
  misc_feature (1)..(279): Homolog of NCBI NO: 24640100 NR Description: CG3455-PA [Drosophila melanogaster]
  misc_feature (1)..(286): Homolog of NCBI NO: 17298147 NR Description: 26S proteasome regulatory particle triple-A
  misc_feature (1)..(286): Homolog of NCBI NO: 11094192 NR Description: 26S proteasome regulatory particle triple-A
  misc_feature (1)..(286): Homolog of NCBI NO: 24745880 NR Description: 26S proteasome AAA-ATPase subunit RPT4a [Solanum
  misc_feature (1)..(286): Homolog of NCBI NO: 15239140 NR Description: 26S proteasome AAA-ATPase subunit RPT4a
  misc_feature (1)..(286): Homolog of NCBI NO: 15219503 NR Description: 26S proteasome regulatory particle triple-A
MRALPREVDPVVYNMLHEDPGNISYSAVGGLGDQIRELRESIELPLMNPELFLRVGIKPPKGVLLYGPPGTGKTLLARAIASNIDANFLKVVSSAIIDKYIGESARLIREMFNYAREHQPCIIFMDEIDAIGGRRFSEGTSADREIQRTLMELLNQLDGFDQLGKVKMIMATNRPDVLDPALLRPGRLDRKIEIPLPNEQSRMEILKIHASGIAKHGEIDYEAIVKLGEGFNGADLRNICTEAGMFAIRAERDYVIHEDFMKAVRKLSEAKKLESSSHYNADFGKE

SEQ ID NO: 24002 - DNA, 1736 bp, Arabidopsis thaliana
  misc_feature (1)..(1736): Ceres Seq. ID no. 12601746
  misc_feature: MA Experiment ID: 108434 Result: Down-regulated in Transcription
  misc_feature: MA Experiment 108434 PARAMETER Experiment Name: At_Root_Tips_cDNA_P Parameter: Tissue Value: Root Tips
  misc_feature: MA Experiment ID: 108435 Result: Down-regulated in Transcription
  misc_feature: MA Experiment 108435 PARAMETER Experiment Name: At_stm_Mutants_cDNA_P Parameter: Plant Line Value: wt Landsburg vs stm
  misc_feature: MA Experiment 108435 PARAMETER Experiment Name: At_stm_Mutants_cDNA_P Parameter: Tissue Value: Shoot Apical Meristem Region
  misc_feature: MA Experiment ID: 108573 Result: Up-regulated in Transcription
  misc_feature: MA Experiment 108573 PARAMETER Experiment Name: At_Drought_cDNA_P Parameter: Timepoint (hr) Value: 6
  misc_feature: MA Experiment 108573 PARAMETER Experiment Name: At_Drought_cDNA_P Parameter: Tissue Value: Aerial
  misc_feature: MA Experiment 108573 PARAMETER Experiment Name: At_Drought_cDNA_P Parameter: Treatment Value: Drought vs. No Drought
  misc_feature: MA Experiment ID: 108595 Result: Down-regulated in Transcription
  misc_feature: MA Experiment 108595 PARAMETER Experiment Name: At_Ler-pi_Ovule_cDNA_P Parameter: Plant Line Value: null
  misc_feature: MA Experiment ID: 20000088 Result: Up-regulated in Transcription
  misc_feature: MA Experiment 20000088 PARAMETER Experiment Name: At_100uM_ABA_Mutants_cDNA_P Parameter: Plant Line Value: Landsberg
  misc_feature: MA Experiment 20000088 PARAMETER Experiment Name: At_100uM_ABA_Mutants_cDNA_P Parameter: Timepoint (hr) Value: 6
  misc_feature: MA Experiment 20000088 PARAMETER Experiment Name: At_100uM_ABA_Mutants_cDNA_P Parameter: Tissue Value: Aerial
  misc_feature: MA Experiment 20000088 PARAMETER Experiment Name: At_100uM_ABA_Mutants_cDNA_P Parameter: Treatment Value: 100uM ABA vs. No Treatment
  misc_feature: MA Experiment ID: 20000090 Result: Up-regulated in Transcription
  misc_feature: MA Experiment ID: 20000227 Result: Down-regulated in Transcription
  misc_feature: MA Experiment 20000227 PARAMETER Experiment Name: At_Root-Tips-vs-Tops_P Parameter: Tissue Value: Root Tips vs. Root Tops
  misc_feature: MA Experiment ID: 20000439 Result: Down-regulated in Transcription
  misc_feature: MA Experiment 20000439 PARAMETER Experiment Name: At_Roots__P Parameter: Age (day) Value: 14 vs. 21
  misc_feature: MA Experiment 20000439 PARAMETER Experiment Name: At_Roots__P Parameter: Organism Value: A. thaliana
  misc_feature: MA Experiment 20000439 PARAMETER Experiment Name: At_Roots__P Parameter: Tissue Value: Roots vs. Whole Plant
  misc_feature: MA Experiment ID: 20000496 Result: Up-regulated in Transcription
  misc_feature: MA Experiment 20000496 PARAMETER Experiment Name: At_Guard_Cells_P Parameter: Harvest Date Value: 7/19/2002
  misc_feature: MA Experiment 20000496 PARAMETER Experiment Name: At_Guard_Cells_P Parameter: Organism Value: Canola
  misc_feature: MA Experiment 20000496 PARAMETER Experiment Name: At_Guard_Cells_P Parameter: Tissue Value: Guard Cells vs. Leaves
atccattctctgccgaactagtcgtcaatcgaaatcccaaagatcagcgatggtgactctaaacgcttcttctcctctcacgaccaagtcgttcctcccctaccgtcacgctcctcgccgtccaatctctttctcccctgtcttcgccgttcattcgactgaccccaagaaatctacccaatcagcctccgcttcggttaaatggagtctagagagttggaagtcgaagaaagctttgcaattgccggattatcctgatcagaaggatgttgattcggttctacagacgctttcttcttttcctcctatagttttcgctggtgaggctaggaaactagaggataagcttggtcaagcggctatgggtcaagcctttatgcttcaaggtggtgattgtgctgagagtttcaaggaatttaacgctaataacattagagacacctttagggttcttcttcagatgggtgttgttctcatgttcggtggccagttaccagttatcaaggtgggaagaatggctggtcagtttgcgaagccgagatcagacccatttgaggagaaagatggtgtgaagctgccgagttacagaggagataacataaatggtgatgcttttgatgagaaatcgaggattcctgatcctcataggatggttagagcgtacacacagtctgtggctacgttgaatctcttgagagcatttgctactggaggttatgcagctatgcagagagttagccagtggaaccttgatttcacgcaacatagtgaacagggtgacaggtaccgtgaattggctaatagagttgatgaggctttgggattcatgggtgcagctggacttactagtgctcacccgatcatgactactactgagttttggacatcccatgagtgtttgttattgccttatgagcaagcactcacaagagaggattcaacatctggactttactatgattgctctgcgcacatgctttgggttggagaacgaactcgccaacttgatggtgctcatgttgagtttctgaggggaatcgctaaccccctcggaatcaaggtgagtgataaaatggtccctagtgaactggttaagctgatagagatactaaaccctcagaacaagcctggaaggattacggttatagtgagaatgggagctgagaatatgcgggtcaagcttcctaatttgatcagagcagtccgtggagccggtcagattgtgacttgggttagtgatccaatgcacggaaacacaatcatggctcctggtgggctaaaaactcgttctttcgatgcaatcagggcggaattgagagcgttcttcgacgtccatgatcaagaagggagtttccctggcggggttcatttagaaatgactggtcaaaacgtgacagaatgtgtcggagggtcacgcaccatcacttacaacgatctaagctcacgctaccacactcactgtgacccaagactcaacgcatctcagtctctggagcttgcattcatcattgcagagcgtctgcgaaagagaaggcttggttccgggaatcttccgtcatctattggagtctagagaacaagaaaatacttatccgagctaggatgtgtgtgtatagaggctgatctctacttattaagttgccaagttaaatgagcttgtgtactgttaaaagtaagatattgttgtttttgtgtgttgggttatgattttgtttgaaataagtggctgactttat

SEQ ID NO: 24003 - protein, 523 aa, Arabidopsis thaliana
  peptide (1)..(523): Ceres Seq. ID no. 12601747
  misc_feature (67)..(504): Pfam Name: Class-II DAHP synthetase family Pfam Description: Class-II DAHP synthetase family
  misc_feature (67)..(504): Pfam Name: Class-II DAHP synthetase family Pfam Description: Class-II DAHP synthetase family
  misc_feature (11)..(519): Homolog of NCBI NO: 7488957 NR Description: probable 2-dehydro-3-deoxy-phosphoheptonate
  misc_feature (40)..(514): Homolog of NCBI NO: 24745903 NR Description: 3-deoxy-D-arabino-heptulosonate 7-phosphate
  misc_feature (40)..(514): Homolog of NCBI NO: 584777 NR Description: Phospho-2-dehydro-3-deoxyheptonate aldolase 1, precursor (Phospho-2-keto-3-deoxyheptonate aldolase 1) (DAHP
  misc_feature (40)..(514): Homolog of NCBI NO: 2546988 NR Description: 2-dehydro-3-deoxyphosphoheptonate aldolase
  misc_feature (40)..(514): Homolog of NCBI NO: 584778 NR Description: Phospho-2-dehydro-3-deoxyheptonate aldolase 2, precursor (Phospho-2-keto-3-deoxyheptonate aldolase 2) (DAHP
  misc_feature (11)..(519): Homolog of NCBI NO: 7488957 NR Description: probable 2-dehydro-3-deoxy-phosphoheptonate
  misc_feature (40)..(514): Homolog of NCBI NO: 584777 NR Description: Phospho-2-dehydro-3-deoxyheptonate aldolase 1, precursor (Phospho-2-keto-3-deoxyheptonate aldolase 1) (DAHP
  misc_feature (40)..(514): Homolog of NCBI NO: 584778 NR Description: Phospho-2-dehydro-3-deoxyheptonate aldolase 2, precursor (Phospho-2-keto-3-deoxyheptonate aldolase 2) (DAHP
  misc_feature (17)..(523): Homolog of NCBI NO: 15234217 NR Description: 2-dehydro-3-deoxyphosphoheptonate aldolase
  misc_feature (17)..(523): Homolog of NCBI NO: 166690 NR Description: 3-deoxy-D-arabino-heptulosonate 7-phosphate
  misc_feature (17)..(523): Homolog of NCBI NO: 21593248 NR Description: 2-dehydro-3-deoxyphosphoheptonate aldolase
  misc_feature (21)..(511): Homolog of NCBI NO: 2398681 NR Description: 3-deoxy-D-arabino-heptulosonate 7-phosphate
  misc_feature (3)..(514): Homolog of NCBI NO: 2398679 NR Description: 3-deoxy-D-arabino-heptulosonate 7-phosphate
  misc_feature (40)..(514): Homolog of NCBI NO: 2546988 NR Description: 2-dehydro-3-deoxyphosphoheptonate aldolase
  misc_feature (40)..(514): Homolog of NCBI NO: 24745903 NR Description: 3-deoxy-D-arabino-heptulosonate 7-phosphate
  misc_feature (3)..(514): Homolog of NCBI NO: 2398679 NR Description: 3-deoxy-D-arabino-heptulosonate 7-phosphate
  misc_feature (21)..(511): Homolog of NCBI NO: 2398681 NR Description: 3-deoxy-D-arabino-heptulosonate 7-phosphate
  misc_feature (17)..(523): Homolog of NCBI NO: 21593248 NR Description: 2-dehydro-3-deoxyphosphoheptonate aldolase
  misc_feature (17)..(523): Homolog of NCBI NO: 166690 NR Description: 3-deoxy-D-arabino-heptulosonate 7-phosphate
  misc_feature (17)..(523): Homolog of NCBI NO: 15234217 NR Description: 2-dehydro-3-deoxyphosphoheptonate aldolase
SILCRTSRQSKSQRSAMVTLNASSPLTTKSFLPYRHAPRRPISFSPVFAVHSTDPKKSTQSASASVKWSLESWKSKKALQLPDYPDQKDVDSVLQTLSSFPPIVFAGEARKLEDKLGQAAMGQAFMLQGGDCAESFKEFNANNIRDTFRVLLQMGVVLMFGGQLPVIKVGRMAGQFAKPRSDPFEEKDGVKLPSYRGDNINGDAFDEKSRIPDPHRMVRAYTQSVATLNLLRAFATGGYAAMQRVSQWNLDFTQHSEQGDRYRELANRVDEALGFMGAAGLTSAHPIMTTTEFWTSHECLLLPYEQALTREDSTSGLYYDCSAHMLWVGERTRQLDGAHVEFLRGIANPLGIKVSDKMVPSELVKLIEILNPQNKPGRITVIVRMGAENMRVKLPNLIRAVRGAGQIVTWVSDPMHGNTIMAPGGLKTRSFDAIRAELRAFFDVHDQEGSFPGGVHLEMTGQNVTECVGGSRTITYNDLSSRYHTHCDPRLNASQSLELAFIIAERLRKRRLGSGNLPSSIGV

SEQ ID NO: 24004 - protein, 507 aa, Arabidopsis thaliana
  peptide (1)..(507): Ceres Seq. ID no. 12601748
  misc_feature (51)..(488): Pfam Name: Class-II DAHP synthetase family Pfam Description: Class-II DAHP synthetase family
  misc_feature (51)..(488): Pfam Name: Class-II DAHP synthetase family Pfam Description: Class-II DAHP synthetase family
  misc_feature (1)..(503): Homolog of NCBI NO: 7488957 NR Description: probable 2-dehydro-3-deoxy-phosphoheptonate
  misc_feature (24)..(498): Homolog of NCBI NO: 24745903 NR Description: 3-deoxy-D-arabino-heptulosonate 7-phosphate
  misc_feature (24)..(498): Homolog of NCBI NO: 584777 NR Description: Phospho-2-dehydro-3-deoxyheptonate aldolase 1, precursor (Phospho-2-keto-3-deoxyheptonate aldolase 1) (DAHP
  misc_feature (24)..(498): Homolog of NCBI NO: 2546988 NR Description: 2-dehydro-3-deoxyphosphoheptonate aldolase
  misc_feature (24)..(498): Homolog of NCBI NO: 584778 NR Description: Phospho-2-dehydro-3-deoxyheptonate aldolase 2, precursor (Phospho-2-keto-3-deoxyheptonate aldolase 2) (DAHP
  misc_feature (24)..(498): Homolog of NCBI NO: 24745903 NR Description: 3-deoxy-D-arabino-heptulosonate 7-phosphate
  misc_feature (24)..(498): Homolog of NCBI NO: 2546988 NR Description: 2-dehydro-3-deoxyphosphoheptonate aldolase
  misc_feature (1)..(498): Homolog of NCBI NO: 2398679 NR Description: 3-deoxy-D-arabino-heptulosonate 7-phosphate
  misc_feature (1)..(503): Homolog of NCBI NO: 7488957 NR Description: probable 2-dehydro-3-deoxy-phosphoheptonate
  misc_feature (1)..(507): Homolog of NCBI NO: 15234217 NR Description: 2-dehydro-3-deoxyphosphoheptonate aldolase
  misc_feature (1)..(507): Homolog of NCBI NO: 166690 NR Description: 3-deoxy-D-arabino-heptulosonate 7-phosphate
  misc_feature (1)..(507): Homolog of NCBI NO: 21593248 NR Description: 2-dehydro-3-deoxyphosphoheptonate aldolase
  misc_feature (5)..(495): Homolog of NCBI NO: 2398681 NR Description: 3-deoxy-D-arabino-heptulosonate 7-phosphate
  misc_feature (24)..(498): Homolog of NCBI NO: 584778 NR Description: Phospho-2-dehydro-3-deoxyheptonate aldolase 2, precursor (Phospho-2-keto-3-deoxyheptonate aldolase 2) (DAHP
  misc_feature (24)..(498): Homolog of NCBI NO: 584777 NR Description: Phospho-2-dehydro-3-deoxyheptonate aldolase 1, precursor (Phospho-2-keto-3-deoxyheptonate aldolase 1) (DAHP
  misc_feature (1)..(498): Homolog of NCBI NO: 2398679 NR Description: 3-deoxy-D-arabino-heptulosonate 7-phosphate
  misc_feature (5)..(495): Homolog of NCBI NO: 2398681 NR Description: 3-deoxy-D-arabino-heptulosonate 7-phosphate
  misc_feature (1)..(507): Homolog of NCBI NO: 21593248 NR Description: 2-dehydro-3-deoxyphosphoheptonate aldolase
  misc_feature (1)..(507): Homolog of NCBI NO: 166690 NR Description: 3-deoxy-D-arabino-heptulosonate 7-phosphate
  misc_feature (1)..(507): Homolog of NCBI NO: 15234217 NR Description: 2-dehydro-3-deoxyphosphoheptonate aldolase
MVTLNASSPLTTKSFLPYRHAPRRPISFSPVFAVHSTDPKKSTQSASASVKWSLESWKSKKALQLPDYPDQKDVDSVLQTLSSFPPIVFAGEARKLEDKLGQAAMGQAFMLQGGDCAESFKEFNANNIRDTFRVLLQMGVVLMFGGQLPVIKVGRMAGQFAKPRSDPFEEKDGVKLPSYRGDNINGDAFDEKSRIPDPHRMVRAYTQSVATLNLLRAFATGGYAAMQRVSQWNLDFTQHSEQGDRYRELANRVDEALGFMGAAGLTSAHPIMTTTEFWTSHECLLLPYEQALTREDSTSGLYYDCSAHMLWVGERTRQLDGAHVEFLRGIANPLGIKVSDKMVPSELVKLIEILNPQNKPGRITVIVRMGAENMRVKLPNLIRAVRGAGQIVTWVSDPMHGNTIMAPGGLKTRSFDAIRAELRAFFDVHDQEGSFPGGVHLEMTGQNVTECVGGSRTITYNDLSSRYHTHCDPRLNASQSLELAFIIAERLRKRRLGSGNLPSSIGV

SEQ ID NO: 24005 - protein, 403 aa, Arabidopsis thaliana
  peptide (1)..(403): Ceres Seq. ID no. 12601749
  misc_feature (1)..(384): Pfam Name: Class-II DAHP synthetase family Pfam Description: Class-II DAHP synthetase family
  misc_feature (1)..(384): Pfam Name: Class-II DAHP synthetase family Pfam Description: Class-II DAHP synthetase family
  misc_feature (1)..(399): Homolog of NCBI NO: 7488957 NR Description: probable 2-dehydro-3-deoxy-phosphoheptonate
  misc_feature (1)..(394): Homolog of NCBI NO: 24745903 NR Description: 3-deoxy-D-arabino-heptulosonate 7-phosphate
  misc_feature (1)..(394): Homolog of NCBI NO: 584777 NR Description: Phospho-2-dehydro-3-deoxyheptonate aldolase 1, precursor (Phospho-2-keto-3-deoxyheptonate aldolase 1) (DAHP
  misc_feature (1)..(394): Homolog of NCBI NO: 2546988 NR Description: 2-dehydro-3-deoxyphosphoheptonate aldolase
  misc_feature (1)..(394): Homolog of NCBI NO: 584778 NR Description: Phospho-2-dehydro-3-deoxyheptonate aldolase 2, precursor (Phospho-2-keto-3-deoxyheptonate aldolase 2) (DAHP
  misc_feature (1)..(399): Homolog of NCBI NO: 7488957 NR Description: probable 2-dehydro-3-deoxy-phosphoheptonate
  misc_feature (1)..(394): Homolog of NCBI NO: 584777 NR Description: Phospho-2-dehydro-3-deoxyheptonate aldolase 1, precursor (Phospho-2-keto-3-deoxyheptonate aldolase 1) (DAHP
  misc_feature (1)..(394): Homolog of NCBI NO: 584778 NR Description: Phospho-2-dehydro-3-deoxyheptonate aldolase 2, precursor (Phospho-2-keto-3-deoxyheptonate aldolase 2) (DAHP
  misc_feature (1)..(403): Homolog of NCBI NO: 15234217 NR Description: 2-dehydro-3-deoxyphosphoheptonate aldolase
  misc_feature (1)..(403): Homolog of NCBI NO: 166690 NR Description: 3-deoxy-D-arabino-heptulosonate 7-phosphate
  misc_feature (1)..(403): Homolog of NCBI NO: 21593248 NR Description: 2-dehydro-3-deoxyphosphoheptonate aldolase
  misc_feature (1)..(391): Homolog of NCBI NO: 2398681 NR Description: 3-deoxy-D-arabino-heptulosonate 7-phosphate
  misc_feature (1)..(394): Homolog of NCBI NO: 2398679 NR Description: 3-deoxy-D-arabino-heptulosonate 7-phosphate
  misc_feature (1)..(394): Homolog of NCBI NO: 2546988 NR Description: 2-dehydro-3-deoxyphosphoheptonate aldolase
  misc_feature (1)..(394): Homolog of NCBI NO: 24745903 NR Description: 3-deoxy-D-arabino-heptulosonate 7-phosphate
  misc_feature (1)..(394): Homolog of NCBI NO: 2398679 NR Description: 3-deoxy-D-arabino-heptulosonate 7-phosphate
  misc_feature (1)..(391): Homolog of NCBI NO: 2398681 NR Description: 3-deoxy-D-arabino-heptulosonate 7-phosphate
  misc_feature (1)..(403): Homolog of NCBI NO: 21593248 NR Description: 2-dehydro-3-deoxyphosphoheptonate aldolase
  misc_feature (1)..(403): Homolog of NCBI NO: 166690 NR Description: 3-deoxy-D-arabino-heptulosonate 7-phosphate
  misc_feature (1)..(403): Homolog of NCBI NO: 15234217 NR Description: 2-dehydro-3-deoxyphosphoheptonate aldolase
MGQAFMLQGGDCAESFKEFNANNIRDTFRVLLQMGVVLMFGGQLPVIKVGRMAGQFAKPRSDPFEEKDGVKLPSYRGDNINGDAFDEKSRIPDPHRMVRAYTQSVATLNLLRAFATGGYAAMQRVSQWNLDFTQHSEQGDRYRELANRVDEALGFMGAAGLTSAHPIMTTTEFWTSHECLLLPYEQALTREDSTSGLYYDCSAHMLWVGERTRQLDGAHVEFLRGIANPLGIKVSDKMVPSELVKLIEILNPQNKPGRITVIVRMGAENMRVKLPNLIRAVRGAGQIVTWVSDPMHGNTIMAPGGLKTRSFDAIRAELRAFFDVHDQEGSFPGGVHLEMTGQNVTECVGGSRTITYNDLSSRYHTHCDPRLNASQSLELAFIIAERLRKRRLGSGNLPSSIGV

SEQ ID NO: 24006 - DNA, 2643 bp, Arabidopsis thaliana
  misc_feature (1)..(2643): Ceres Seq. ID no. 13508995
  misc_feature: MA Experiment ID: 20000180 Result: Down-regulated in Transcription
  misc_feature: MA Experiment 20000180 PARAMETER Experiment Name: At_Germinating_Seeds_P Parameter: Age (hr) Value: 24 vs. 0
  misc_feature: MA Experiment 20000180 PARAMETER Experiment Name: At_Germinating_Seeds_P Parameter: Tissue Value: Germinating Seeds
  misc_feature: MA Experiment ID: 20000227 Result: Up-regulated in Transcription
  misc_feature: MA Experiment 20000227 PARAMETER Experiment Name: At_Root-Tips-vs-Tops_P Parameter: Tissue Value: Root Tips vs. Root Tops
  misc_feature: MA Experiment ID: 20000234 Result: Up-regulated in Transcription
  misc_feature: MA Experiment 20000234 PARAMETER Experiment Name: At_Siliques_P Parameter: Age (day) Value: 21
  misc_feature: MA Experiment 20000234 PARAMETER Experiment Name: At_Siliques_P Parameter: Organism Value: A. thaliana
  misc_feature: MA Experiment 20000234 PARAMETER Experiment Name: At_Siliques_P Parameter: Plant Line Value: WS
  misc_feature: MA Experiment 20000234 PARAMETER Experiment Name: At_Siliques_P Parameter: Tissue Value: Less Than 5mm Siliques vs. Whole Plant
  misc_feature: MA Experiment ID: 20001557 Result: Up-regulated in Transcription
  misc_feature: MA Experiment 20001557 PARAMETER Experiment Name: At_Drought_Soil_Dry_P Parameter: Age (day) Value: 27
  misc_feature: MA Experiment 20001557 PARAMETER Experiment Name: At_Drought_Soil_Dry_P Parameter: Organism Value: A. thaliana
  misc_feature: MA Experiment 20001557 PARAMETER Experiment Name: At_Drought_Soil_Dry_P Parameter: Plant Line Value: WS
  misc_feature: MA Experiment 20001557 PARAMETER Experiment Name: At_Drought_Soil_Dry_P Parameter: Post Timepoint (hr) Value: 3
  misc_feature: MA Experiment 20001557 PARAMETER Experiment Name: At_Drought_Soil_Dry_P Parameter: Post-Treatment Value: Re-Water vs. No Drought
  misc_feature: MA Experiment 20001557 PARAMETER Experiment Name: At_Drought_Soil_Dry_P Parameter: Timepoint (day) Value: 13
  misc_feature: MA Experiment 20001557 PARAMETER Experiment Name: At_Drought_Soil_Dry_P Parameter: Treatment Value: Drought vs. No Drought
  misc_feature: MA Experiment ID: 20001558 Result: Up-regulated in Transcription
  misc_feature: MA Experiment 20001558 PARAMETER Experiment Name: At_Drought_Soil_Dry_P Parameter: Age (day) Value: 27
  misc_feature: MA Experiment 20001558 PARAMETER Experiment Name: At_Drought_Soil_Dry_P Parameter: Organism Value: A. thaliana
  misc_feature: MA Experiment 20001558 PARAMETER Experiment Name: At_Drought_Soil_Dry_P Parameter: Plant Line Value: WS
  misc_feature: MA Experiment 20001558 PARAMETER Experiment Name: At_Drought_Soil_Dry_P Parameter: Post Timepoint (hr) Value: 6
  misc_feature: MA Experiment 20001558 PARAMETER Experiment Name: At_Drought_Soil_Dry_P Parameter: Post-Treatment Value: Re-Water vs. No Drought
  misc_feature: MA Experiment 20001558 PARAMETER Experiment Name: At_Drought_Soil_Dry_P Parameter: Timepoint (day) Value: 13
  misc_feature: MA Experiment 20001558 PARAMETER Experiment Name: At_Drought_Soil_Dry_P Parameter: Treatment Value: Drought vs. No Drought
atgctgctgatacatatcagaagtactcgaaagatcttagctttggggcgtcatgtttttccttctaatgccttcttctccgtctcttctcgaccttctctgtcttcctcggacgaagtggcggctcatgatgtcgcatctttgctaaaaacccccaattgggagaagaacagttctcttaaatctctagtctctcacatgaatccaaatgtcgcttcacaggtcatttcgcttcaacgcagtgacaacgatatttgcgttcgctttttcatgtgggtctgcaagcattcgtcgtattgtttcgacccaactcagaaaaatcagcttttgaaactgattgtttcttccggattgtatcgagttgcgcatgctgttattgttgcgttgatcaaggaatgtagtagatgcgagaaagagatgttgaaactaatgtattgttttgatgagctgagagaagtttttgggttccggttaaattacccttgttacagctctcttttgatgtccttagctaaacttgatttaggatttttggcttacgtgacttatagaagaatggaagctgacggatttgttgttggtatgattgattacagaaccattgtcaatgctctgtgtaagaatggatacacggaagccgctgagatgttcatgtctaagattcttaaaattgggtttgtgttagattcccatataggcacttctttgttactgggtttttgccgtggattgaatctcagagatgcactcaaggtgtttgatgtaatgtctaaggaggtaacttgtgcaccgaactctgttagttactccattttgattcacgggttgtgtgaagtagggagacttgaagaagcatttggcctaaaagatcaaatgggtgagaaaggttgccaaccaagcacacgtacatatactgtgcttattaaagccttgtgcgatagaggtttgattgataaagcttttaacttgtttgatgagatgattcctagagggtgtaaaccaaacgtccacacttacactgttttgattgatgggttgtgtagagacggaaagattgaagaggctaatggggtttgtcgaaagatggttaaagacaggatatttcctagtgtaataacttacaatgcgttgataaatggctactgcaaagatggacgggttgttcccgcttttgagcttcttactgtaatggagaagagggcttgcaaaccaaatgtaagaacttttaacgagcttatggaagggttgtgtagagtcgggaaaccgtacaaggctgtgcaccttttgaagagaatgctggacaatggcctgtcacctgacattgtgagctataatgttttgatcgatgggctttgtagagaaggccatatgaatacggcttacaagctacttagctcgatgaactgctttgacattgagcctgattgtcttacattcaccgctataataaatgctttctgcaaacaagggaaggctgacgttgctagcgcgtttttaggtttgatgcttagaaaaggaataagcctagatgaagtaacaggtacaactcttatcgatggtgtctgtaaagtcggtaaaacccgtgacgcattgtttatcctggagacattggttaaaatgagaattttgacaactcctcactccctgaatgtgattcttgatatgctcagtaaaggttgtaaagtgaaggaggaattagcaatgcttgggaaaatcaataagcttggtttagttccttctgtggtgacatacacaacattggttgatgggttgattcgatcaggtgatattactggttccttcaggatcctagaactgatgaagttaagtgggtgtttgccgaatgtctatccatacacaatcatcataaatggtctttgtcaatttggaagagtcgaggaagcagagaagcttctttctgctatgcaagattcaggagtttcaccaaaccatgtcacttataccgttatggtgaaaggatatgtcaacaatggaaaactagaccgtgctcttgaaacagtaagagcaatggttgaaagaggatatgaactaaatgaccgtatctattcttcattgttacagggatttgtcttatctcaaaagggtattgataattcagaagagagtacagtttccgatattgctcttagagaaaccgatcctgaatgtatcaacgaactcatatctgtggttgaacaacttggtgggtgtatcagcgggttatgtattttcttggtcacacggttatgcaaagagggaagaacggatgagtccaacgatctagtccaaaatgtactcgagagaggtgtttttcttgagaaggccatggacatcattatggaatcttattgcagcaagaagaaacacaccaagtgtatggagctgataacacttgttctcaaatccggatttgtcccgagtttcaaatccttctgcctagtgattcaaggtttgaagaaggaaggagatgcagagcgggcgcgggagcttgtaatggagcttcttacctcaaatggagttgtagagaaaagtggagtgttgacttatgttgagtgtctcatggaaggagatgaaactggtgattgcagtgaagtcatagatttggttgatcaattgcactgcagagaaagacccaccttctaa

SEQ ID NO: 24007 - protein, 880 aa, Arabidopsis thaliana
  peptide (1)..(880): Ceres Seq. ID no. 13508996
  misc_feature (442)..(476): Pfam Name: PPR repeat Pfam Description: PPR repeat
  misc_feature (198)..(873): Homolog of NCBI NO: 37535672 NR Description: putative chloroplast RNA processing protein
  misc_feature (109)..(730): Homolog of NCBI NO: 34896698 NR Description: putative pentatricopeptide repeat protein
  misc_feature (163)..(696): Homolog of NCBI NO: 32527604 NR Description: pentatricopeptide repeat-containing protein
  misc_feature (191)..(681): Homolog of NCBI NO: 15218325 NR Description: pentatricopeptide (PPR) repeat-containing protein
  misc_feature (107)..(724): Homolog of NCBI NO: 15238562 NR Description: pentatricopeptide (PPR) repeat-containing protein
  misc_feature (183)..(873): Homolog of NCBI NO: 37535708 NR Description: putative membrane-associated protein
  misc_feature (145)..(873): Homolog of NCBI NO: 33859440 NR Description: PPR protein [Oryza sativa (indica
  misc_feature (234)..(835): Homolog of NCBI NO: 34015356 NR Description: putative fertility restorer
  misc_feature (28)..(770): Homolog of NCBI NO: 34015232 NR Description: putative fertility restorer
  misc_feature (37)..(835): Homolog of NCBI NO: 15238505 NR Description: pentatricopeptide (PPR) repeat-containing protein
MLLIHIRSTRKILALGRHVFPSNAFFSVSSRPSLSSSDEVAAHDVASLLKTPNWEKNSSLKSLVSHMNPNVASQVISLQRSDNDICVRFFMWVCKHSSYCFDPTQKNQLLKLIVSSGLYRVAHAVIVALIKECSRCEKEMLKLMYCFDELREVFGFRLNYPCYSSLLMSLAKLDLGFLAYVTYRRMEADGFVVGMIDYRTIVNALCKNGYTEAAEMFMSKILKIGFVLDSHIGTSLLLGFCRGLNLRDALKVFDVMSKEVTCAPNSVSYSILIHGLCEVGRLEEAFGLKDQMGEKGCQPSTRTYTVLIKALCDRGLIDKAFNLFDEMIPRGCKPNVHTYTVLIDGLCRDGKIEEANGVCRKMVKDRIFPSVITYNALINGYCKDGRVVPAFELLTVMEKRACKPNVRTFNELMEGLCRVGKPYKAVHLLKRMLDNGLSPDIVSYNVLIDGLCREGHMNTAYKLLSSMNCFDIEPDCLTFTAIINAFCKQGKADVASAFLGLMLRKGISLDEVTGTTLIDGVCKVGKTRDALFILETLVKMRILTTPHSLNVILDMLSKGCKVKEELAMLGKINKLGLVPSVVTYTTLVDGLIRSGDITGSFRILELMKLSGCLPNVYPYTIIINGLCQFGRVEEAEKLLSAMQDSGVSPNHVTYTVMVKGYVNNGKLDRALETVRAMVERGYELNDRIYSSLLQGFVLSQKGIDNSEESTVSDIALRETDPECINELISVVEQLGGCISGLCIFLVTRLCKEGRTDESNDLVQNVLERGVFLEKAMDIIMESYCSKKKHTKCMELITLVLKSGFVPSFKSFCLVIQGLKKEGDAERARELVMELLTSNGVVEKSGVLTYVECLMEGDETGDCSEVIDLVDQLHCRERPTF

SEQ ID NO: 24008 - protein, 814 aa, Arabidopsis thaliana
  peptide (1)..(814): Ceres Seq. ID no. 13508997
  misc_feature (376)..(410): Pfam Name: PPR repeat Pfam Description: PPR repeat
  misc_feature (132)..(807): Homolog of NCBI NO: 37535672 NR Description: putative chloroplast RNA processing protein
  misc_feature (43)..(664): Homolog of NCBI NO: 34896698 NR Description: putative pentatricopeptide repeat protein
  misc_feature (97)..(630): Homolog of NCBI NO: 32527604 NR Description: pentatricopeptide repeat-containing protein
  misc_feature (125)..(615): Homolog of NCBI NO: 15218325 NR Description: pentatricopeptide (PPR) repeat-containing protein
  misc_feature (41)..(658): Homolog of NCBI NO: 15238562 NR Description: pentatricopeptide (PPR) repeat-containing protein
  misc_feature (117)..(807): Homolog of NCBI NO: 37535708 NR Description: putative membrane-associated protein
  misc_feature (79)..(807): Homolog of NCBI NO: 33859440 NR Description: PPR protein [Oryza sativa (indica
  misc_feature (168)..(769): Homolog of NCBI NO: 34015356 NR Description: putative fertility restorer
  misc_feature (1)..(704): Homolog of NCBI NO: 34015232 NR Description: putative fertility restorer
  misc_feature (1)..(769): Homolog of NCBI NO: 15238505 NR Description: pentatricopeptide (PPR) repeat-containing protein
MNPNVASQVISLQRSDNDICVRFFMWVCKHSSYCFDPTQKNQLLKLIVSSGLYRVAHAVIVALIKECSRCEKEMLKLMYCFDELREVFGFRLNYPCYSSLLMSLAKLDLGFLAYVTYRRMEADGFVVGMIDYRTIVNALCKNGYTEAAEMFMSKILKIGFVLDSHIGTSLLLGFCRGLNLRDALKVFDVMSKEVTCAPNSVSYSILIHGLCEVGRLEEAFGLKDQMGEKGCQPSTRTYTVLIKALCDRGLIDKAFNLFDEMIPRGCKPNVHTYTVLIDGLCRDGKIEEANGVCRKMVKDRIFPSVITYNALINGYCKDGRVVPAFELLTVMEKRACKPNVRTFNELMEGLCRVGKPYKAVHLLKRMLDNGLSPDIVSYNVLIDGLCREGHMNTAYKLLSSMNCFDIEPDCLTFTAIINAFCKQGKADVASAFLGLMLRKGISLDEVTGTTLIDGVCKVGKTRDALFILETLVKMRILTTPHSLNVILDMLSKGCKVKEELAMLGKINKLGLVPSVVTYTTLVDGLIRSGDITGSFRILELMKLSGCLPNVYPYTIIINGLCQFGRVEEAEKLLSAMQDSGVSPNHVTYTVMVKGYVNNGKLDRALETVRAMVERGYELNDRIYSSLLQGFVLSQKGIDNSEESTVSDIALRETDPECINELISVVEQLGGCISGLCIFLVTRLCKEGRTDESNDLVQNVLERGVFLEKAMDIIMESYCSKKKHTKCMELITLVLKSGFVPSFKSFCLVIQGLKKEGDAERARELVMELLTSNGVVEKSGVLTYVECLMEGDETGDCSEVIDLVDQLHCRERPTF

SEQ ID NO: 24009 - protein, 790 aa, Arabidopsis thaliana
  peptide (1)..(790): Ceres Seq. ID no. 13508998
  misc_feature (352)..(386): Pfam Name: PPR repeat Pfam Description: PPR repeat
  misc_feature (108)..(783): Homolog of NCBI NO: 37535672 NR Description: putative chloroplast RNA processing protein
  misc_feature (19)..(640): Homolog of NCBI NO: 34896698 NR Description: putative pentatricopeptide repeat protein
  misc_feature (73)..(606): Homolog of NCBI NO: 32527604 NR Description: pentatricopeptide repeat-containing protein
  misc_feature (101)..(591): Homolog of NCBI NO: 15218325 NR Description: pentatricopeptide (PPR) repeat-containing protein
  misc_feature (17)..(634): Homolog of NCBI NO: 15238562 NR Description: pentatricopeptide (PPR) repeat-containing protein
  misc_feature (93)..(783): Homolog of NCBI NO: 37535708 NR Description: putative membrane-associated protein
  misc_feature (55)..(783): Homolog of NCBI NO: 33859440 NR Description: PPR protein [Oryza sativa (indica
  misc_feature (144)..(745): Homolog of NCBI NO: 34015356 NR Description: putative fertility restorer
  misc_feature (1)..(680): Homolog of NCBI NO: 34015232 NR Description: putative fertility restorer
  misc_feature (1)..(745): Homolog of NCBI NO: 15238505 NR Description: pentatricopeptide (PPR) repeat-containing protein
MWVCKHSSYCFDPTQKNQLLKLIVSSGLYRVAHAVIVALIKECSRCEKEMLKLMYCFDELREVFGFRLNYPCYSSLLMSLAKLDLGFLAYVTYRRMEADGFVVGMIDYRTIVNALCKNGYTEAAEMFMSKILKIGFVLDSHIGTSLLLGFCRGLNLRDALKVFDVMSKEVTCAPNSVSYSILIHGLCEVGRLEEAFGLKDQMGEKGCQPSTRTYTVLIKALCDRGLIDKAFNLFDEMIPRGCKPNVHTYTVLIDGLCRDGKIEEANGVCRKMVKDRIFPSVITYNALINGYCKDGRVVPAFELLTVMEKRACKPNVRTFNELMEGLCRVGKPYKAVHLLKRMLDNGLSPDIVSYNVLIDGLCREGHMNTAYKLLSSMNCFDIEPDCLTFTAIINAFCKQGKADVASAFLGLMLRKGISLDEVTGTTLIDGVCKVGKTRDALFILETLVKMRILTTPHSLNVILDMLSKGCKVKEELAMLGKINKLGLVPSVVTYTTLVDGLIRSGDITGSFRILELMKLSGCLPNVYPYTIIINGLCQFGRVEEAEKLLSAMQDSGVSPNHVTYTVMVKGYVNNGKLDRALETVRAMVERGYELNDRIYSSLLQGFVLSQKGIDNSEESTVSDIALRETDPECINELISVVEQLGGCISGLCIFLVTRLCKEGRTDESNDLVQNVLERGVFLEKAMDIIMESYCSKKKHTKCMELITLVLKSGFVPSFKSFCLVIQGLKKEGDAERARELVMELLTSNGVVEKSGVLTYVECLMEGDETGDCSEVIDLVDQLHCRERPTF

SEQ ID NO: 24010 - DNA, 1685 bp, Arabidopsis thaliana
  misc_feature (1)..(1685): Ceres Seq. ID no. 13497411
  misc_feature: MA Experiment ID: 108434 Result: Up-regulated in Transcription
  misc_feature: MA Experiment 108434 PARAMETER Experiment Name: At_Root_Tips_cDNA_P Parameter: Tissue Value: Root Tips
  misc_feature: MA Experiment ID: 108573 Result: Up-regulated in Transcription
  misc_feature: MA Experiment 108573 PARAMETER Experiment Name: At_Drought_cDNA_P Parameter: Timepoint (hr) Value: 6
  misc_feature: MA Experiment 108573 PARAMETER Experiment Name: At_Drought_cDNA_P Parameter: Tissue Value: Aerial
  misc_feature: MA Experiment 108573 PARAMETER Experiment Name: At_Drought_cDNA_P Parameter: Treatment Value: Drought vs. No Drought
  misc_feature: MA Experiment ID: 108574 Result: Down-regulated in Transcription
  misc_feature: MA Experiment 108574 PARAMETER Experiment Name: At_Wounding__cDNA_P Parameter: Timepoint (hr) Value: 1
  misc_feature: MA Experiment 108574 PARAMETER Experiment Name: At_Wounding__cDNA_P Parameter: Tissue Value: Aerial
  misc_feature: MA Experiment 108574 PARAMETER Experiment Name: At_Wounding__cDNA_P Parameter: Treatment Value: Wounding vs. No Wounding
  misc_feature: MA Experiment ID: 108576 Result: Down-regulated in Transcription
  misc_feature: MA Experiment 108576 PARAMETER Experiment Name: At_42deg_Heat_cDNA_P Parameter: Temperature (deg C) Value: 42 vs. 22
  misc_feature: MA Experiment 108576 PARAMETER Experiment Name: At_42deg_Heat_cDNA_P Parameter: Timepoint (hr) Value: 1
  misc_feature: MA Experiment 108576 PARAMETER Experiment Name: At_42deg_Heat_cDNA_P Parameter: Tissue Value: Aerial
  misc_feature: MA Experiment ID: 108577 Result: Down-regulated in Transcription
  misc_feature: MA Experiment 108577 PARAMETER Experiment Name: At_42deg_Heat_cDNA_P Parameter: Temperature (deg C) Value: 42 vs. 22
  misc_feature: MA Experiment 108577 PARAMETER Experiment Name: At_42deg_Heat_cDNA_P Parameter: Timepoint (hr) Value: 6
  misc_feature: MA Experiment 108577 PARAMETER Experiment Name: At_42deg_Heat_cDNA_P Parameter: Tissue Value: Aerial
  misc_feature: MA Experiment ID: 108579 Result: Down-regulated in Transcription
  misc_feature: MA Experiment 108579 PARAMETER Experiment Name: At_4deg_Cold_cDNA_P Parameter: Temperature (deg C) Value: 4 vs. 22
  misc_feature: MA Experiment 108579 PARAMETER Experiment Name: At_4deg_Cold_cDNA_P Parameter: Timepoint (hr) Value: 6
  misc_feature: MA Experiment 108579 PARAMETER Experiment Name: At_4deg_Cold_cDNA_P Parameter: Tissue Value: Aerial
  misc_feature: MA Experiment ID: 108595 Result: Down-regulated in Transcription
  misc_feature: MA Experiment 108595 PARAMETER Experiment Name: At_Ler-pi_Ovule_cDNA_P Parameter: Plant Line Value: null
  misc_feature: MA Experiment ID: 108608 Result: Down-regulated in Transcription
  misc_feature: MA Experiment 108608 PARAMETER Experiment Name: At_100uM_ABA_cDNA_P Parameter: Timepoint (hr) Value: 1
  misc_feature: MA Experiment 108608 PARAMETER Experiment Name: At_100uM_ABA_cDNA_P Parameter: Tissue Value: Aerial
  misc_feature: MA Experiment 108608 PARAMETER Experiment Name: At_100uM_ABA_cDNA_P Parameter: Treatment Value: 100uM ABA vs. No Treatment
  misc_feature: MA Experiment ID: 20000069 Result: Down-regulated in Transcription
  misc_feature: MA Experiment 20000069 PARAMETER Experiment Name: At_100uM_ABA_Mutants_cDNA_P Parameter: Plant Line Value: CS23
  misc_feature: MA Experiment 20000069 PARAMETER Experiment Name: At_100uM_ABA_Mutants_cDNA_P Parameter: Timepoint (hr) Value: 6
  misc_feature: MA Experiment 20000069 PARAMETER Experiment Name: At_100uM_ABA_Mutants_cDNA_P Parameter: Tissue Value: Aerial
  misc_feature: MA Experiment 20000069 PARAMETER Experiment Name: At_100uM_ABA_Mutants_cDNA_P Parameter: Treatment Value: 100uM ABA vs. No Treatment
  misc_feature: MA Experiment ID: 20000072 Result: Down-regulated in Transcription
  misc_feature: MA Experiment 20000072 PARAMETER Experiment Name: At_100uM_ABA_Mutants_cDNA_P Parameter: Plant Line Value: CS8105
  misc_feature: MA Experiment 20000072 PARAMETER Experiment Name: At_100uM_ABA_Mutants_cDNA_P Parameter: Timepoint (hr) Value: 6
  misc_feature: MA Experiment 20000072 PARAMETER Experiment Name: At_100uM_ABA_Mutants_cDNA_P Parameter: Tissue Value: Aerial
  misc_feature: MA Experiment 20000072 PARAMETER Experiment Name: At_100uM_ABA_Mutants_cDNA_P Parameter: Treatment Value: 100uM ABA vs. No Treatment
  misc_feature: MA Experiment ID: 20000086 Result: Down-regulated in Transcription
  misc_feature: MA Experiment 20000086 PARAMETER Experiment Name: At_100uM_ABA_Mutants_cDNA_P Parameter: Plant Line Value: CS22
  misc_feature: MA Experiment 20000086 PARAMETER Experiment Name: At_100uM_ABA_Mutants_cDNA_P Parameter: Timepoint (hr) Value: 6
  misc_feature: MA Experiment 20000086 PARAMETER Experiment Name: At_100uM_ABA_Mutants_cDNA_P Parameter: Tissue Value: Aerial
  misc_feature: MA Experiment 20000086 PARAMETER Experiment Name: At_100uM_ABA_Mutants_cDNA_P Parameter: Treatment Value: 100uM ABA vs. No Treatment
  misc_feature: MA Experiment ID: 20000087 Result: Down-regulated in Transcription
  misc_feature: MA Experiment 20000087 PARAMETER Experiment Name: At_100uM_ABA_Mutants_cDNA_P Parameter: Plant Line Value: WS
  misc_feature: MA Experiment 20000087 PARAMETER Experiment Name: At_100uM_ABA_Mutants_cDNA_P Parameter: Timepoint (hr) Value: 6
  misc_feature: MA Experiment 20000087 PARAMETER Experiment Name: At_100uM_ABA_Mutants_cDNA_P Parameter: Tissue Value: Aerial
  misc_feature: MA Experiment 20000087 PARAMETER Experiment Name: At_100uM_ABA_Mutants_cDNA_P Parameter: Treatment Value: 100uM ABA vs. No Treatment
  misc_feature: MA Experiment ID: 20000090 Result: Down-regulated in Transcription
  misc_feature: MA Experiment ID: 20000144 Result: Down-regulated in Transcription
  misc_feature: MA Experiment 20000144 PARAMETER Experiment Name: At_42deg_Heat_cDNA_P Parameter: Temperature (deg C) Value: 42 vs. 22
  misc_feature: MA Experiment 20000144 PARAMETER Experiment Name: At_42deg_Heat_cDNA_P Parameter: Timepoint (hr) Value: 1
  misc_feature: MA Experiment 20000144 PARAMETER Experiment Name: At_42deg_Heat_cDNA_P Parameter: Tissue Value: Aerial
  misc_feature: MA Experiment ID: 20000166 Result: Down-regulated in Transcription
  misc_feature: MA Experiment 20000166 PARAMETER Experiment Name: At_100uM_ABA_P Parameter: Age (day) Value: 14
  misc_feature: MA Experiment 20000166 PARAMETER Experiment Name: At_100uM_ABA_P Parameter: Organism Value: A. thaliana
  misc_feature: MA Experiment 20000166 PARAMETER Experiment Name: At_100uM_ABA_P Parameter: Plant Line Value: WS
  misc_feature: MA Experiment 20000166 PARAMETER Experiment Name: At_100uM_ABA_P Parameter: Timepoint (hr) Value: 1
  misc_feature: MA Experiment 20000166 PARAMETER Experiment Name: At_100uM_ABA_P Parameter: Tissue Value: Aerial
  misc_feature: MA Experiment 20000166 PARAMETER Experiment Name: At_100uM_ABA_P Parameter: Treatment Value: 100uM ABA vs. No Treatment
  misc_feature: MA Experiment ID: 20000171 Result: Down-regulated in Transcription
  misc_feature: MA Experiment 20000171 PARAMETER Experiment Name: At_42deg_Heat_P Parameter: Age (day) Value: 14
  misc_feature: MA Experiment 20000171 PARAMETER Experiment Name: At_42deg_Heat_P Parameter: Organism Value: A. thaliana
  misc_feature: MA Experiment 20000171 PARAMETER Experiment Name: At_42deg_Heat_P Parameter: Plant Line Value: WS
  misc_feature: MA Experiment 20000171 PARAMETER Experiment Name: At_42deg_Heat_P Parameter: Temperature (deg C) Value: 42 vs. 22
  misc_feature: MA Experiment 20000171 PARAMETER Experiment Name: At_42deg_Heat_P Parameter: Timepoint (hr) Value: 1
  misc_feature: MA Experiment 20000171 PARAMETER Experiment Name: At_42deg_Heat_P Parameter: Tissue Value: Aerial
  misc_feature: MA Experiment ID: 20000184 Result: Down-regulated in Transcription
  misc_feature: MA Experiment 20000184 PARAMETER Experiment Name: At_Shoots__P Parameter: Age (day) Value: 7
  misc_feature: MA Experiment 20000184 PARAMETER Experiment Name: At_Shoots__P Parameter: Tissue Value: Shoots vs. Whole Plant
  misc_feature: MA Experiment ID: 20000227 Result: Down-regulated in Transcription
  misc_feature: MA Experiment 20000227 PARAMETER Experiment Name: At_Root-Tips-vs-Tops_P Parameter: Tissue Value: Root Tips vs. Root Tops
  misc_feature: MA Experiment ID: 20000234 Result: Down-regulated in Transcription
  misc_feature: MA Experiment 20000234 PARAMETER Experiment Name: At_Siliques_P Parameter: Age (day) Value: 21
  misc_feature: MA Experiment 20000234 PARAMETER Experiment Name: At_Siliques_P Parameter: Organism Value: A. thaliana
  misc_feature: MA Experiment 20000234 PARAMETER Experiment Name: At_Siliques_P Parameter: Plant Line Value: WS
  misc_feature: MA Experiment 20000234 PARAMETER Experiment Name: At_Siliques_P Parameter: Tissue Value: Less Than 5mm Siliques vs. Whole Plant
  misc_feature: MA Experiment ID: 20000235 Result: Down-regulated in Transcription
  misc_feature: MA Experiment 20000235 PARAMETER Experiment Name: At_Siliques_P Parameter: Age (day) Value: 21
  misc_feature: MA Experiment 20000235 PARAMETER Experiment Name: At_Siliques_P Parameter: Organism Value: A. thaliana
  misc_feature: MA Experiment 20000235 PARAMETER Experiment Name: At_Siliques_P Parameter: Plant Line Value: WS
  misc_feature: MA Experiment 20000235 PARAMETER Experiment Name: At_Siliques_P Parameter: Tissue Value: 5-10mm Siliques vs. Whole Plant
  misc_feature: MA Experiment ID: 20000264 Result: Down-regulated in Transcription
  misc_feature: MA Experiment 20000264 PARAMETER Experiment Name: At_Open_Flower_P Parameter: Age (day) Value: 21
  misc_feature: MA Experiment 20000264 PARAMETER Experiment Name: At_Open_Flower_P Parameter: Plant Line Value: WS
  misc_feature: MA Experiment 20000264 PARAMETER Experiment Name: At_Open_Flower_P Parameter: Tissue Value: Open Flower vs. Whole Plant
  misc_feature: MA Experiment ID: 20000265 Result: Down-regulated in Transcription
  misc_feature: MA Experiment 20000265 PARAMETER Experiment Name: At_Open_Flower_P Parameter: Age (day) Value: 21
  misc_feature: MA Experiment 20000265 PARAMETER Experiment Name: At_Open_Flower_P Parameter: Plant Line Value: WS
  misc_feature: MA Experiment 20000265 PARAMETER Experiment Name: At_Open_Flower_P Parameter: Tissue Value: Closed Flower vs. Whole Plant
  misc_feature: MA Experiment ID: 20000286 Result: Down-regulated in Transcription
  misc_feature: MA Experiment 20000286 PARAMETER Experiment Name: At_Open_Flower_P Parameter: Age (day) Value: 21
  misc_feature: MA Experiment 20000286 PARAMETER Experiment Name: At_Open_Flower_P Parameter: Plant Line Value: WS
  misc_feature: MA Experiment 20000286 PARAMETER Experiment Name: At_Open_Flower_P Parameter: Tissue Value: Half Open vs. Whole Plant
  misc_feature: MA Experiment ID: 20001247 Result: Up-regulated in Transcription
  misc_feature: MA Experiment 20001247 PARAMETER Experiment Name: At_Far-red-induction_P Parameter: Age (day) Value: 7
  misc_feature: MA Experiment 20001247 PARAMETER Experiment Name: At_Far-red-induction_P Parameter: Light Value: Far-red vs. White
  misc_feature: MA Experiment 20001247 PARAMETER Experiment Name: At_Far-red-induction_P Parameter: Organism Value: A. thaliana
  misc_feature: MA Experiment 20001247 PARAMETER Experiment Name: At_Far-red-induction_P Parameter: Plant Line Value: Columbia
  misc_feature: MA Experiment 20001247 PARAMETER Experiment Name: At_Far-red-induction_P Parameter: Timepoint (hr) Value: 1
  misc_feature: MA Experiment 20001247 PARAMETER Experiment Name: At_Far-red-induction_P Parameter: Tissue Value: Whole Plant
  misc_feature: MA Experiment ID: 20001450 Result: Up-regulated in Transcription
  misc_feature: MA Experiment 20001450 PARAMETER Experiment Name: At_Far-red-induction_P Parameter: Age (day) Value: 7
  misc_feature: MA Experiment 20001450 PARAMETER Experiment Name: At_Far-red-induction_P Parameter: Light Value: Far-red vs. White
  misc_feature: MA Experiment 20001450 PARAMETER Experiment Name: At_Far-red-induction_P Parameter: Organism Value: A. thaliana
  misc_feature: MA Experiment 20001450 PARAMETER Experiment Name: At_Far-red-induction_P Parameter: Plant Line Value: Columbia
  misc_feature: MA Experiment 20001450 PARAMETER Experiment Name: At_Far-red-induction_P Parameter: Timepoint (hr) Value: 8
  misc_feature: MA Experiment 20001450 PARAMETER Experiment Name: At_Far-red-induction_P Parameter: Tissue Value: Whole Plant
  misc_feature: MA Experiment ID: 20001451 Result: Up-regulated in Transcription
  misc_feature: MA Experiment 20001451 PARAMETER Experiment Name: At_Far-red-induction_P Parameter: Age (day) Value: 7
  misc_feature: MA Experiment 20001451 PARAMETER Experiment Name: At_Far-red-induction_P Parameter: Light Value: Far-red vs. White
  misc_feature: MA Experiment 20001451 PARAMETER Experiment Name: At_Far-red-induction_P Parameter: Organism Value: A. thaliana
  misc_feature: MA Experiment 20001451 PARAMETER Experiment Name: At_Far-red-induction_P Parameter: Plant Line Value: Columbia
  misc_feature: MA Experiment 20001451 PARAMETER Experiment Name: At_Far-red-induction_P Parameter: Timepoint (hr) Value: 24
  misc_feature: MA Experiment 20001451 PARAMETER Experiment Name: At_Far-red-induction_P Parameter: Tissue Value: Whole Plant
  misc_feature: MA Experiment ID: 20001556 Result: Down-regulated in Transcription
  misc_feature: MA Experiment 20001556 PARAMETER Experiment Name: At_Drought_Soil_Dry_P Parameter: Age (day) Value: 26
  misc_feature: MA Experiment 20001556 PARAMETER Experiment Name: At_Drought_Soil_Dry_P Parameter: Organism Value: A. thaliana
  misc_feature: MA Experiment 20001556 PARAMETER Experiment Name: At_Drought_Soil_Dry_P Parameter: Plant Line Value: WS
  misc_feature: MA Experiment 20001556 PARAMETER Experiment Name: At_Drought_Soil_Dry_P Parameter: Post Timepoint (hr) Value: None
  misc_feature: MA Experiment 20001556 PARAMETER Experiment Name: At_Drought_Soil_Dry_P Parameter: Post-Treatment Value: None
  misc_feature: MA Experiment 20001556 PARAMETER Experiment Name: At_Drought_Soil_Dry_P Parameter: Timepoint (day) Value: 12
  misc_feature: MA Experiment 20001556 PARAMETER Experiment Name: At_Drought_Soil_Dry_P Parameter: Treatment Value: Drought vs. No Drought
  misc_feature: MA Experiment ID: 20001560 Result: Down-regulated in Transcription
  misc_feature: MA Experiment 20001560 PARAMETER Experiment Name: At_Drought_Soil_Dry_P Parameter: Age (day) Value: 28
  misc_feature: MA Experiment 20001560 PARAMETER Experiment Name: At_Drought_Soil_Dry_P Parameter: Organism Value: A. thaliana
  misc_feature: MA Experiment 20001560 PARAMETER Experiment Name: At_Drought_Soil_Dry_P Parameter: Plant Line Value: WS
  misc_feature: MA Experiment 20001560 PARAMETER Experiment Name: At_Drought_Soil_Dry_P Parameter: Post Timepoint (hr) Value: None
  misc_feature: MA Experiment 20001560 PARAMETER Experiment Name: At_Drought_Soil_Dry_P Parameter: Post-Treatment Value: None
  misc_feature: MA Experiment 20001560 PARAMETER Experiment Name: At_Drought_Soil_Dry_P Parameter: Timepoint (day) Value: 14
  misc_feature: MA Experiment 20001560 PARAMETER Experiment Name: At_Drought_Soil_Dry_P Parameter: Treatment Value: Drought vs. No Drought
ctcctatttctctcttctctctctctttaagtgagcttcgccgttaaactttctccggtaccgggaaattaacgaagaaagcgaaaagtcactgttacactaatatcacaaatctctctctgtctctctctctctctttgtcgaagtcgtgcgtgatgctagttacggtggtgaagcagcggttagtgtactctcgccggagaaattggttatgaccggaatctcacctccgtgatcgaagaaactgttttcgtttttttatcgttacgaagaaatggaaaaacaggcgaagctaacgaggacacagtcgtcgttactccggtcatcgtcgaatctccgttcgtcatatcaaagcttatcttcaatcgtcgaaggcgagcaagatctagaagccggagagaaagaagagaaacagagaagaaaaccacctaaaccattcggttcaccaaatcctaaaaccggtttaaccagaatcaatcccggtttagctttcacaatggtatctctctctttcctaagtctctcatcgttcttcttcttcgtcgtcttctcacaaaccgatgagattctcacatcggagaatcttttactagctttaatcttcgtcgctgtagctctcttcttcgcttccaagaacatctctctactaaaccaaaccgtaatcgcaatcaaaaacttagggttccaaaacagagactcgaaatcaaaaccggtacaatggtacatcggagacgattcaaaaccggagaagaaggtaatcaagagattcgttaaagaaggagttcaattctacagtaatggagatttctacgaaggtgaatttaacaaagggaagtgtaacggaagtggtgtgtattactatttcgtgagaggacgttatgaaggagattggctagatgggagatatgatggtcatgggattgagagttgggctagaggaagtagatataaaggtcaatataggcaaggtcttagacatggttttggtgtttatagattctacactggtgattgttatgctggtgagtggtttaatggtcaaagccatggttttggtgttcaatcttgttctgatggtagctcttaccttggtgagtctagatttggtgttaagcatggtcttggttcttaccatttcagaaatggagataagtatgcaggagagtactttggagacaagattcatgggtttggtgtgtatcgatttgctaatggacactgttatgaaggagcatggcatgaaggtcgtaagcaagggtttggtgcttactcgtttagaaatggtgatgctaaatctggtgaatgggattcaggggttcttgtgacttcacttcctcttacgagtgagccagtttcaagagctgttcaggcggctcgagaaacagcgaataaggcagtgaatcggagacgagtagatgagcaggtgagccgagctgtggctgcagctaataaggctgctacggctgcaagagtggctgctgtgagagccgttcagaatcaaatggatggtaaattttgtcaaagttgaaaaaaggaaaatgtaaaaaatcttttttttaccggtttctctgtaaccctgaatcgaaagtttgtttcagaggtttgtaacagagagttaattttcgatctttttactaatgtaacaaaactgtaaatagttgaagaagaagctttgtttttgttgt

SEQ ID NO: 24011 - protein, 417 aa, Arabidopsis thaliana
  peptide (1)..(417): Ceres Seq. ID no. 13497412
  misc_feature (294)..(316): Pfam Name: MORN repeat Pfam Description: MORN repeat
  misc_feature (169)..(346): Homolog of NCBI NO: 23481997 NR Description: MORN repeat, putative [Plasmodium yoelii yoelii]
  misc_feature (168)..(350): Homolog of NCBI NO: 40062709 NR Description: MORN repeat protein [uncultured bacterium 314]
  misc_feature (168)..(344): Homolog of NCBI NO: 40062709 NR Description: MORN repeat protein [uncultured bacterium 314]
  misc_feature (105)..(409): Homolog of NCBI NO: 15235967 NR Description: expressed protein [Arabidopsis thaliana]
  misc_feature (71)..(409): Homolog of NCBI NO: 18403768 NR Description: expressed protein [Arabidopsis thaliana]
  misc_feature (71)..(409): Homolog of NCBI NO: 21928129 NR Description: AT4g17080/dl4570w [Arabidopsis thaliana]
  misc_feature (46)..(410): Homolog of NCBI NO: 37536922 NR Description: putative phosphatidylinositol-4-phosphate
  misc_feature (4)..(417): Homolog of NCBI NO: 15217439 NR Description: hypothetical protein [Arabidopsis thaliana]
  misc_feature (1)..(417): Homolog of NCBI NO: 21593251 NR Description: phosphatidylinositol-4-phosphate 5-kinase,
  misc_feature (1)..(417): Homolog of NCBI NO: 15219142 NR Description: phosphatidylinositol-4-phosphate 5-kinase
MEKQAKLTRTQSSLLRSSSNLRSSYQSLSSIVEGEQDLEAGEKEEKQRRKPPKPFGSPNPKTGLTRINPGLAFTMVSLSFLSLSSFFFFVVFSQTDEILTSENLLLALIFVAVALFFASKNISLLNQTVIAIKNLGFQNRDSKSKPVQWYIGDDSKPEKKVIKRFVKEGVQFYSNGDFYEGEFNKGKCNGSGVYYYFVRGRYEGDWLDGRYDGHGIESWARGSRYKGQYRQGLRHGFGVYRFYTGDCYAGEWFNGQSHGFGVQSCSDGSSYLGESRFGVKHGLGSYHFRNGDKYAGEYFGDKIHGFGVYRFANGHCYEGAWHEGRKQGFGAYSFRNGDAKSGEWDSGVLVTSLPLTSEPVSRAVQAARETANKAVNRRRVDEQVSRAVAAANKAATAARVAAVRAVQNQMDGKFCQS

SEQ ID NO: 24012 - protein, 343 aa, Arabidopsis thaliana
  peptide (1)..(343): Ceres Seq. ID no. 13497413
  misc_feature (220)..(242): Pfam Name: MORN repeat Pfam Description: MORN repeat
  misc_feature (95)..(272): Homolog of NCBI NO: 23481997 NR Description: MORN repeat, putative [Plasmodium yoelii yoelii]
  misc_feature (94)..(276): Homolog of NCBI NO: 40062709 NR Description: MORN repeat protein [uncultured bacterium 314]
  misc_feature (94)..(270): Homolog of NCBI NO: 40062709 NR Description: MORN repeat protein [uncultured bacterium 314]
  misc_feature (31)..(335): Homolog of NCBI NO: 15235967 NR Description: expressed protein [Arabidopsis thaliana]
  misc_feature (1)..(335): Homolog of NCBI NO: 18403768 NR Description: expressed protein [Arabidopsis thaliana]
  misc_feature (1)..(335): Homolog of NCBI NO: 21928129 NR Description: AT4g17080/dl4570w [Arabidopsis thaliana]
  misc_feature (1)..(336): Homolog of NCBI NO: 37536922 NR Description: putative phosphatidylinositol-4-phosphate
  misc_feature (1)..(343): Homolog of NCBI NO: 15217439 NR Description: hypothetical protein [Arabidopsis thaliana]
  misc_feature (1)..(343): Homolog of NCBI NO: 21593251 NR Description: phosphatidylinositol-4-phosphate 5-kinase,
  misc_feature (1)..(343): Homolog of NCBI NO: 15219142 NR Description: phosphatidylinositol-4-phosphate 5-kinase
MVSLSFLSLSSFFFFVVFSQTDEILTSENLLLALIFVAVALFFASKNISLLNQTVIAIKNLGFQNRDSKSKPVQWYIGDDSKPEKKVIKRFVKEGVQFYSNGDFYEGEFNKGKCNGSGVYYYFVRGRYEGDWLDGRYDGHGIESWARGSRYKGQYRQGLRHGFGVYRFYTGDCYAGEWFNGQSHGFGVQSCSDGSSYLGESRFGVKHGLGSYHFRNGDKYAGEYFGDKIHGFGVYRFANGHCYEGAWHEGRKQGFGAYSFRNGDAKSGEWDSGVLVTSLPLTSEPVSRAVQAARETANKAVNRRRVDEQVSRAVAAANKAATAARVAAVRAVQNQMDGKFCQS

SEQ ID NO: 24013 - DNA, 1211 bp, Arabidopsis thaliana
  misc_feature (1)..(1211): Ceres Seq. ID no. 12335720
  misc_feature: MA Experiment ID: 108501 Result: Up-regulated in Transcription
  misc_feature: MA Experiment 108501 PARAMETER Experiment Name: At_ap2_floral_buds_cDNA_P Parameter: Plant Line Value: ap2 (Ler.)
  misc_feature: MA Experiment 108501 PARAMETER Experiment Name: At_ap2_floral_buds_cDNA_P Parameter: Tissue Value: Closed Flower
  misc_feature: MA Experiment ID: 108595 Result: Up-regulated in Transcription
  misc_feature: MA Experiment 108595 PARAMETER Experiment Name: At_Ler-pi_Ovule_cDNA_P Parameter: Plant Line Value: null
  misc_feature: MA Experiment ID: 108667 Result: Down-regulated in Transcription
  misc_feature: MA Experiment 108667 PARAMETER Experiment Name: At_2mM_SA_cDNA_P Parameter: Plant Line Value: WS
  misc_feature: MA Experiment 108667 PARAMETER Experiment Name: At_2mM_SA_cDNA_P Parameter: Timepoint (hr) Value: 1
  misc_feature: MA Experiment 108667 PARAMETER Experiment Name: At_2mM_SA_cDNA_P Parameter: Treatment Value: 2mM SA vs. No Treatment
  misc_feature: MA Experiment ID: 20000089 Result: Down-regulated in Transcription
  misc_feature: MA Experiment ID: 20000169 Result: Up-regulated in Transcription
  misc_feature: MA Experiment 20000169 PARAMETER Experiment Name: At_100uM_ABA_P Parameter: Age (day) Value: 14
  misc_feature: MA Experiment 20000169 PARAMETER Experiment Name: At_100uM_ABA_P Parameter: Organism Value: A. thaliana
  misc_feature: MA Experiment 20000169 PARAMETER Experiment Name: At_100uM_ABA_P Parameter: Plant Line Value: WS
  misc_feature: MA Experiment 20000169 PARAMETER Experiment Name: At_100uM_ABA_P Parameter: Timepoint (hr) Value: 6
  misc_feature: MA Experiment 20000169 PARAMETER Experiment Name: At_100uM_ABA_P Parameter: Tissue Value: Aerial
  misc_feature: MA Experiment 20000169 PARAMETER Experiment Name: At_100uM_ABA_P Parameter: Treatment Value: 100uM ABA vs. No Treatment
  misc_feature: MA Experiment ID: 20000227 Result: Up-regulated in Transcription
  misc_feature: MA Experiment 20000227 PARAMETER Experiment Name: At_Root-Tips-vs-Tops_P Parameter: Tissue Value: Root Tips vs. Root Tops
  misc_feature: MA Experiment ID: 20000234 Result: Up-regulated in Transcription
  misc_feature: MA Experiment 20000234 PARAMETER Experiment Name: At_Siliques_P Parameter: Age (day) Value: 21
  misc_feature: MA Experiment 20000234 PARAMETER Experiment Name: At_Siliques_P Parameter: Organism Value: A. thaliana
  misc_feature: MA Experiment 20000234 PARAMETER Experiment Name: At_Siliques_P Parameter: Plant Line Value: WS
  misc_feature: MA Experiment 20000234 PARAMETER Experiment Name: At_Siliques_P Parameter: Tissue Value: Less Than 5mm Siliques vs. Whole Plant
  misc_feature: MA Experiment ID: 20000235 Result: Up-regulated in Transcription
  misc_feature: MA Experiment 20000235 PARAMETER Experiment Name: At_Siliques_P Parameter: Age (day) Value: 21
  misc_feature: MA Experiment 20000235 PARAMETER Experiment Name: At_Siliques_P Parameter: Organism Value: A. thaliana
  misc_feature: MA Experiment 20000235 PARAMETER Experiment Name: At_Siliques_P Parameter: Plant Line Value: WS
  misc_feature: MA Experiment 20000235 PARAMETER Experiment Name: At_Siliques_P Parameter: Tissue Value: 5-10mm Siliques vs. Whole Plant
  misc_feature: MA Experiment ID: 20000264 Result: Up-regulated in Transcription
  misc_feature: MA Experiment 20000264 PARAMETER Experiment Name: At_Open_Flower_P Parameter: Age (day) Value: 21
  misc_feature: MA Experiment 20000264 PARAMETER Experiment Name: At_Open_Flower_P Parameter: Plant Line Value: WS
  misc_feature: MA Experiment 20000264 PARAMETER Experiment Name: At_Open_Flower_P Parameter: Tissue Value: Open Flower vs. Whole Plant
  misc_feature: MA Experiment ID: 20000444 Result: Up-regulated in Transcription
  misc_feature: MA Experiment 20000444 PARAMETER Experiment Name: At_100uM_NAA__P Parameter: Age (day) Value: 14
  misc_feature: MA Experiment 20000444 PARAMETER Experiment Name: At_100uM_NAA__P Parameter: Organism Value: A. thaliana
  misc_feature: MA Experiment 20000444 PARAMETER Experiment Name: At_100uM_NAA__P Parameter: Plant Line Value: WS
  misc_feature: MA Experiment 20000444 PARAMETER Experiment Name: At_100uM_NAA__P Parameter: Timepoint (hr) Value: 1
  misc_feature: MA Experiment 20000444 PARAMETER Experiment Name: At_100uM_NAA__P Parameter: Tissue Value: Aerial
  misc_feature: MA Experiment 20000444 PARAMETER Experiment Name: At_100uM_NAA__P Parameter: Treatment Value: 100uM NAA vs. No Treatment
  misc_feature: MA Experiment ID: 20000445 Result: Up-regulated in Transcription
  misc_feature: MA Experiment 20000445 PARAMETER Experiment Name: At_100uM_NAA__P Parameter: Age (day) Value: 14
  misc_feature: MA Experiment 20000445 PARAMETER Experiment Name: At_100uM_NAA__P Parameter: Organism Value: A. thaliana
  misc_feature: MA Experiment 20000445 PARAMETER Experiment Name: At_100uM_NAA__P Parameter: Plant Line Value: WS
  misc_feature: MA Experiment 20000445 PARAMETER Experiment Name: At_100uM_NAA__P Parameter: Timepoint (hr) Value: 6
  misc_feature: MA Experiment 20000445 PARAMETER Experiment Name: At_100uM_NAA__P Parameter: Tissue Value: Aerial
  misc_feature: MA Experiment 20000445 PARAMETER Experiment Name: At_100uM_NAA__P Parameter: Treatment Value: 100uM NAA vs. No Treatment
  misc_feature: MA Experiment ID: 20000451 Result: Down-regulated in Transcription
  misc_feature: MA Experiment 20000451 PARAMETER Experiment Name: At_CS6879_Shoots-Roots_P Parameter: Age (day) Value: 14
  misc_feature: MA Experiment 20000451 PARAMETER Experiment Name: At_CS6879_Shoots-Roots_P Parameter: Organism Value: A. thaliana
  misc_feature: MA Experiment 20000451 PARAMETER Experiment Name: At_CS6879_Shoots-Roots_P Parameter: Plant Line Value: CS6879 vs. WS
  misc_feature: MA Experiment 20000451 PARAMETER Experiment Name: At_CS6879_Shoots-Roots_P Parameter: Tissue Value: Roots
  misc_feature: MA Experiment ID: 20000527 Result: Down-regulated in Transcription
  misc_feature: MA Experiment 20000527 PARAMETER Experiment Name: At_10percent_PEG_P Parameter: Age (day) Value: 20
  misc_feature: MA Experiment 20000527 PARAMETER Experiment Name: At_10percent_PEG_P Parameter: Organism Value: A. thaliana
  misc_feature: MA Experiment 20000527 PARAMETER Experiment Name: At_10percent_PEG_P Parameter: Plant Line Value: WS
  misc_feature: MA Experiment 20000527 PARAMETER Experiment Name: At_10percent_PEG_P Parameter: Timepoint (day) Value: 20
  misc_feature: MA Experiment 20000527 PARAMETER Experiment Name: At_10percent_PEG_P Parameter: Tissue Value: Whole Plant
  misc_feature: MA Experiment 20000527 PARAMETER Experiment Name: At_10percent_PEG_P Parameter: Treatment Value: 10percent PEG vs. No Treatment
  misc_feature: MA Experiment ID: 20000794 Result: Down-regulated in Transcription
  misc_feature: MA Experiment 20000794 PARAMETER Experiment Name: At_Petals_P Parameter: Age (day) Value: 23-25 days
  misc_feature: MA Experiment 20000794 PARAMETER Experiment Name: At_Petals_P Parameter: Plant Line Value: WS
  misc_feature: MA Experiment 20000794 PARAMETER Experiment Name: At_Petals_P Parameter: Tissue Value: Petals vs. Whole plant
  misc_feature: MA Experiment ID: 20001247 Result: Up-regulated in Transcription
  misc_feature: MA Experiment 20001247 PARAMETER Experiment Name: At_Far-red-induction_P Parameter: Age (day) Value: 7
  misc_feature: MA Experiment 20001247 PARAMETER Experiment Name: At_Far-red-induction_P Parameter: Light Value: Far-red vs. White
  misc_feature: MA Experiment 20001247 PARAMETER Experiment Name: At_Far-red-induction_P Parameter: Organism Value: A. thaliana
  misc_feature: MA Experiment 20001247 PARAMETER Experiment Name: At_Far-red-induction_P Parameter: Plant Line Value: Columbia
  misc_feature: MA Experiment 20001247 PARAMETER Experiment Name: At_Far-red-induction_P Parameter: Timepoint (hr) Value: 1
  misc_feature: MA Experiment 20001247 PARAMETER Experiment Name: At_Far-red-induction_P Parameter: Tissue Value: Whole Plant
  misc_feature: MA Experiment ID: 20001248 Result: Up-regulated in Transcription
  misc_feature: MA Experiment 20001248 PARAMETER Experiment Name: At_Far-red-induction_P Parameter: Age (day) Value: 7
  misc_feature: MA Experiment 20001248 PARAMETER Experiment Name: At_Far-red-induction_P Parameter: Light Value: Far-red vs. White
  misc_feature: MA Experiment 20001248 PARAMETER Experiment Name: At_Far-red-induction_P Parameter: Organism Value: A. thaliana
  misc_feature: MA Experiment 20001248 PARAMETER Experiment Name: At_Far-red-induction_P Parameter: Plant Line Value: Columbia
  misc_feature: MA Experiment 20001248 PARAMETER Experiment Name: At_Far-red-induction_P Parameter: Timepoint (hr) Value: 4
  misc_feature: MA Experiment 20001248 PARAMETER Experiment Name: At_Far-red-induction_P Parameter: Tissue Value: Whole Plant
  misc_feature: MA Experiment ID: 20001450 Result: Up-regulated in Transcription
  misc_feature: MA Experiment 20001450 PARAMETER Experiment Name: At_Far-red-induction_P Parameter: Age (day) Value: 7
  misc_feature: MA Experiment 20001450 PARAMETER Experiment Name: At_Far-red-induction_P Parameter: Light Value: Far-red vs. White
  misc_feature: MA Experiment 20001450 PARAMETER Experiment Name: At_Far-red-induction_P Parameter: Organism Value: A. thaliana
  misc_feature: MA Experiment 20001450 PARAMETER Experiment Name: At_Far-red-induction_P Parameter: Plant Line Value: Columbia
  misc_feature: MA Experiment 20001450 PARAMETER Experiment Name: At_Far-red-induction_P Parameter: Timepoint (hr) Value: 8
  misc_feature: MA Experiment 20001450 PARAMETER Experiment Name: At_Far-red-induction_P Parameter: Tissue Value: Whole Plant
  misc_feature: MA Experiment ID: 20001557 Result: Down-regulated in Transcription
  misc_feature: MA Experiment 20001557 PARAMETER Experiment Name: At_Drought_Soil_Dry_P Parameter: Age (day) Value: 27
  misc_feature: MA Experiment 20001557 PARAMETER Experiment Name: At_Drought_Soil_Dry_P Parameter: Organism Value: A. thaliana
  misc_feature: MA Experiment 20001557 PARAMETER Experiment Name: At_Drought_Soil_Dry_P Parameter: Plant Line Value: WS
  misc_feature: MA Experiment 20001557 PARAMETER Experiment Name: At_Drought_Soil_Dry_P Parameter: Post Timepoint (hr) Value: 3
  misc_feature: MA Experiment 20001557 PARAMETER Experiment Name: At_Drought_Soil_Dry_P Parameter: Post-Treatment Value: Re-Water vs. No Drought
  misc_feature: MA Experiment 20001557 PARAMETER Experiment Name: At_Drought_Soil_Dry_P Parameter: Timepoint (day) Value: 13
  misc_feature: MA Experiment 20001557 PARAMETER Experiment Name: At_Drought_Soil_Dry_P Parameter: Treatment Value: Drought vs. No Drought
  misc_feature: MA Experiment ID: 20001558 Result: Down-regulated in Transcription
  misc_feature: MA Experiment 20001558 PARAMETER Experiment Name: At_Drought_Soil_Dry_P Parameter: Age (day) Value: 27
  misc_feature: MA Experiment 20001558 PARAMETER Experiment Name: At_Drought_Soil_Dry_P Parameter: Organism Value: A. thaliana
  misc_feature: MA Experiment 20001558 PARAMETER Experiment Name: At_Drought_Soil_Dry_P Parameter: Plant Line Value: WS
  misc_feature: MA Experiment 20001558 PARAMETER Experiment Name: At_Drought_Soil_Dry_P Parameter: Post Timepoint (hr) Value: 6
  misc_feature: MA Experiment 20001558 PARAMETER Experiment Name: At_Drought_Soil_Dry_P Parameter: Post-Treatment Value: Re-Water vs. No Drought
  misc_feature: MA Experiment 20001558 PARAMETER Experiment Name: At_Drought_Soil_Dry_P Parameter: Timepoint (day) Value: 13
  misc_feature: MA Experiment 20001558 PARAMETER Experiment Name: At_Drought_Soil_Dry_P Parameter: Treatment Value: Drought vs. No Drought
  misc_feature: MA Experiment ID: 20001905 Result: Down-regulated in Transcription
  misc_feature: MA Experiment 20001905 PARAMETER Experiment Name: At_Drought_Reproduction_P Parameter: Age (day) Value: 40
  misc_feature: MA Experiment 20001905 PARAMETER Experiment Name: At_Drought_Reproduction_P Parameter: Organism Value: A. thaliana
  misc_feature: MA Experiment 20001905 PARAMETER Experiment Name: At_Drought_Reproduction_P Parameter: Plant Line Value: WS
  misc_feature: MA Experiment 20001905 PARAMETER Experiment Name: At_Drought_Reproduction_P Parameter: Timepoint (day) Value: 10
  misc_feature: MA Experiment 20001905 PARAMETER Experiment Name: At_Drought_Reproduction_P Parameter: Tissue Value: Rosettes
  misc_feature: MA Experiment 20001905 PARAMETER Experiment Name: At_Drought_Reproduction_P Parameter: Treatment Value: Drought vs. No Drought
  misc_feature: Phenotype: ROSETTE LEAVES Curled-Curled 5
  misc_feature: Phenotype: WHOLE PLANT Size-Small
  misc_feature: Phenotype: FERTILITY Fertility-Reduced
  misc_feature: Phenotype: ROSETTE LEAVES Curled-Curled 5
  misc_feature: Phenotype: WHOLE PLANT Size-Small
  misc_feature: Phenotype: ROSETTE LEAVES Curled-Curled 4
  misc_feature: Phenotype: ROSETTE LEAVES Other
  misc_feature: Phenotype: WHOLE PLANT Size-Small
  misc_feature: Phenotype: ROSETTE LEAVES Other
  misc_feature: Phenotype: WHOLE PLANT Size-Small
  misc_feature: Phenotype: ROSETTE LEAVES Curled-Curled 1
  misc_feature: Phenotype: ROSETTE LEAVES Shape-Serrate
  misc_feature: Phenotype: WHOLE PLANT Color-Dark Green
  misc_feature: Phenotype: WHOLE PLANT Size-Small
  misc_feature: Phenotype: FLOWERS Other
  misc_feature: Phenotype: ROSETTE LEAVES Curled-Curled 1
  misc_feature: Phenotype: WHOLE PLANT Size-Small
  misc_feature: Phenotype: FERTILITY Fertility-Reduced
  misc_feature: Phenotype: ROSETTE LEAVES Curled-Curled 3
  misc_feature: Phenotype: WHOLE PLANT Size-Small
  misc_feature: Phenotype: ROSETTE LEAVES Curled-Curled 5
  misc_feature: Phenotype: WHOLE PLANT Size-Small
  misc_feature: Phenotype: ROSETTE LEAVES Other
  misc_feature: Phenotype: WHOLE PLANT Color-Dark Green
  misc_feature: Phenotype: WHOLE PLANT Size-Small
  misc_feature: Phenotype: FLOWERS Other
  misc_feature: Phenotype: ROSETTE LEAVES Curled-Curled 4
  misc_feature: Phenotype: WHOLE PLANT Size-Small
aaaaagagaatgggttctaagggagacaacgttgctgtatgtaacatgaagctcgagagacttctcagcatgaaaggtggcaaaggacaagacagctacgccaataactctcaagctcaggcaatgcatgcacggtccatgcttcacctcctagaggaaacacttgaaaatgttcacctcaactcctccgccagtccgccaccgttcacgacggttgatcttggctgttcctccggcgcaaatactgtccacataatcgatttcatagtcaaacatatctctaagaggtttgatgctgccggaatcgaccctccggagttcacagctttcttctccgatctcccaagcaacgacttcaacacgcttttccagcttcttccaccacttgtctctaacacttgcatggaggagtgtcttgctgccgacgggaaccgctcctacttcgtcgctggtgttcccggatcgttttaccggcgactttttccagcgagaaccattgactttttccactctgccttctccttgcattggctctctcaggtgccggaaagtgtgacggataggagatcggcggcgtacaatagagggagagttttcatacacggtgccggagagaagacaacaacggcatacaaacggcagtttcaggccgacttagcggagtttttgagggcaagagcggcagaggttaagagaggtggggccatgttcctggtctgtcttggtcgtacctctgtggatcccaccgaccagggtggtgccggtctactcttcggcactcattttcaggacgcttgggacgaccttgtccgcgagggtttggtagcagcagagaaacgagatggattcaatatcccggtgtacgcaccaagcttgcaagatttcaaggaagtagttgacgccaacggctcatttgcaattgataagctggtagtatacaaaggagggagtccacttgtggtgaatgagccagacgatgcatcagaagttggtcgtgcctttgctagtagttgtcggagtgtggccggagtgctcgtggaagctcacataggcgaagagctaagcaataaactgttctcacgagttgaaagccgagccactagccatgccaaagatgtcttggtgaatttgcagttcttccacattgtcgcttctttgtcttttacttaattagtaccaaataatatgaaaaagaaatatgttcgtgtgcc

SEQ ID NO: 24014 - protein, 389 aa, Arabidopsis thaliana
  peptide (1)..(389): Ceres Seq. ID no. 12335721
  misc_feature (51)..(389): Pfam Name: SAM dependent carboxyl methyltransferase Pfam Description: SAM dependent carboxyl methyltransferase
  misc_feature (18)..(382): Homolog of NCBI NO: 30696725 NR Description: S-adenosyl-L-methionine:carboxyl
  misc_feature (18)..(382): Homolog of NCBI NO: 10177828 NR Description: S-adenosyl-L-methionine:salicylic acid carboxyl
  misc_feature (24)..(95): Homolog of NCBI NO: 32488664 NR Description: OSJNBa0087O24.14 [Oryza sativa (japonica
  misc_feature (174)..(387): Homolog of NCBI NO: 32488664 NR Description: OSJNBa0087O24.14 [Oryza sativa (japonica
  misc_feature (18)..(387): Homolog of NCBI NO: 32488665 NR Description: OSJNBa0087O24.15 [Oryza sativa (japonica
  misc_feature (19)..(387): Homolog of NCBI NO: 32488662 NR Description: OSJNBa0087O24.12 [Oryza sativa (japonica
  misc_feature (18)..(387): Homolog of NCBI NO: 32488666 NR Description: OSJNBa0087O24.16 [Oryza sativa (japonica
  misc_feature (7)..(387): Homolog of NCBI NO: 32488655 NR Description: OSJNBa0087O24.5 [Oryza sativa (japonica
  misc_feature (16)..(389): Homolog of NCBI NO: 21593254 NR Description: S-adenosyl-L-methionine:salicylic acid carboxyl
  misc_feature (4)..(389): Homolog of NCBI NO: 15240487 NR Description: S-adenosyl-L-methionine:carboxyl
KKRMGSKGDNVAVCNMKLERLLSMKGGKGQDSYANNSQAQAMHARSMLHLLEETLENVHLNSSASPPPFTTVDLGCSSGANTVHIIDFIVKHISKRFDAAGIDPPEFTAFFSDLPSNDFNTLFQLLPPLVSNTCMEECLAADGNRSYFVAGVPGSFYRRLFPARTIDFFHSAFSLHWLSQVPESVTDRRSAAYNRGRVFIHGAGEKTTTAYKRQFQADLAEFLRARAAEVKRGGAMFLVCLGRTSVDPTDQGGAGLLFGTHFQDAWDDLVREGLVAAEKRDGFNIPVYAPSLQDFKEVVDANGSFAIDKLVVYKGGSPLVVNEPDDASEVGRAFASSCRSVAGVLVEAHIGEELSNKLFSRVESRATSHAKDVLVNLQFFHIVASLSFT

SEQ ID NO: 24015 - protein, 386 aa, Arabidopsis thaliana
  peptide (1)..(386): Ceres Seq. ID no. 12335722
  misc_feature (48)..(386): Pfam Name: SAM dependent carboxyl methyltransferase Pfam Description: SAM dependent carboxyl methyltransferase
  misc_feature (15)..(379): Homolog of NCBI NO: 30696725 NR Description: S-adenosyl-L-methionine:carboxyl
  misc_feature (15)..(379): Homolog of NCBI NO: 10177828 NR Description: S-adenosyl-L-methionine:salicylic acid carboxyl
  misc_feature (21)..(92): Homolog of NCBI NO: 32488664 NR Description: OSJNBa0087O24.14 [Oryza sativa (japonica
  misc_feature (171)..(384): Homolog of NCBI NO: 32488664 NR Description: OSJNBa0087O24.14 [Oryza sativa (japonica
  misc_feature (15)..(384): Homolog of NCBI NO: 32488665 NR Description: OSJNBa0087O24.15 [Oryza sativa (japonica
  misc_feature (16)..(384): Homolog of NCBI NO: 32488662 NR Description: OSJNBa0087O24.12 [Oryza sativa (japonica
  misc_feature (15)..(384): Homolog of NCBI NO: 32488666 NR Description: OSJNBa0087O24.16 [Oryza sativa (japonica
  misc_feature (4)..(384): Homolog of NCBI NO: 32488655 NR Description: OSJNBa0087O24.5 [Oryza sativa (japonica
  misc_feature (13)..(386): Homolog of NCBI NO: 21593254 NR Description: S-adenosyl-L-methionine:salicylic acid carboxyl
  misc_feature (1)..(386): Homolog of NCBI NO: 15240487 NR Description: S-adenosyl-L-methionine:carboxyl
MGSKGDNVAVCNMKLERLLSMKGGKGQDSYANNSQAQAMHARSMLHLLEETLENVHLNSSASPPPFTTVDLGCSSGANTVHIIDFIVKHISKRFDAAGIDPPEFTAFFSDLPSNDFNTLFQLLPPLVSNTCMEECLAADGNRSYFVAGVPGSFYRRLFPARTIDFFHSAFSLHWLSQVPESVTDRRSAAYNRGRVFIHGAGEKTTTAYKRQFQADLAEFLRARAAEVKRGGAMFLVCLGRTSVDPTDQGGAGLLFGTHFQDAWDDLVREGLVAAEKRDGFNIPVYAPSLQDFKEVVDANGSFAIDKLVVYKGGSPLVVNEPDDASEVGRAFASSCRSVAGVLVEAHIGEELSNKLFSRVESRATSHAKDVLVNLQFFHIVASLSFT

SEQ ID NO: 24016 - protein, 374 aa, Arabidopsis thaliana
  peptide (1)..(374): Ceres Seq. ID no. 12335723
  misc_feature (36)..(374): Pfam Name: SAM dependent carboxyl methyltransferase Pfam Description: SAM dependent carboxyl methyltransferase
  misc_feature (3)..(367): Homolog of NCBI NO: 30696725 NR Description: S-adenosyl-L-methionine:carboxyl
  misc_feature (3)..(367): Homolog of NCBI NO: 10177828 NR Description: S-adenosyl-L-methionine:salicylic acid carboxyl
  misc_feature (9)..(80): Homolog of NCBI NO: 32488664 NR Description: OSJNBa0087O24.14 [Oryza sativa (japonica
  misc_feature (159)..(372): Homolog of NCBI NO: 32488664 NR Description: OSJNBa0087O24.14 [Oryza sativa (japonica
  misc_feature (3)..(372): Homolog of NCBI NO: 32488665 NR Description: OSJNBa0087O24.15 [Oryza sativa (japonica
  misc_feature (4)..(372): Homolog of NCBI NO: 32488662 NR Description: OSJNBa0087O24.12 [Oryza sativa (japonica
  misc_feature (3)..(372): Homolog of NCBI NO: 32488666 NR Description: OSJNBa0087O24.16 [Oryza sativa (japonica
  misc_feature (1)..(372): Homolog of NCBI NO: 32488655 NR Description: OSJNBa0087O24.5 [Oryza sativa (japonica
  misc_feature (1)..(374): Homolog of NCBI NO: 21593254 NR Description: S-adenosyl-L-methionine:salicylic acid carboxyl
  misc_feature (1)..(374): Homolog of NCBI NO: 15240487 NR Description: S-adenosyl-L-methionine:carboxyl
MKLERLLSMKGGKGQDSYANNSQAQAMHARSMLHLLEETLENVHLNSSASPPPFTTVDLGCSSGANTVHIIDFIVKHISKRFDAAGIDPPEFTAFFSDLPSNDFNTLFQLLPPLVSNTCMEECLAADGNRSYFVAGVPGSFYRRLFPARTIDFFHSAFSLHWLSQVPESVTDRRSAAYNRGRVFIHGAGEKTTTAYKRQFQADLAEFLRARAAEVKRGGAMFLVCLGRTSVDPTDQGGAGLLFGTHFQDAWDDLVREGLVAAEKRDGFNIPVYAPSLQDFKEVVDANGSFAIDKLVVYKGGSPLVVNEPDDASEVGRAFASSCRSVAGVLVEAHIGEELSNKLFSRVESRATSHAKDVLVNLQFFHIVASLSFT

SEQ ID NO: 24017 - DNA, 1463 bp, Arabidopsis thaliana
  misc_feature (1)..(1463): Ceres Seq. ID no. 12422532
  misc_feature: MA Experiment ID: 108579 Result: Down-regulated in Transcription
  misc_feature: MA Experiment 108579 PARAMETER Experiment Name: At_4deg_Cold_cDNA_P Parameter: Temperature (deg C) Value: 4 vs. 22
  misc_feature: MA Experiment 108579 PARAMETER Experiment Name: At_4deg_Cold_cDNA_P Parameter: Timepoint (hr) Value: 6
  misc_feature: MA Experiment 108579 PARAMETER Experiment Name: At_4deg_Cold_cDNA_P Parameter: Tissue Value: Aerial
  misc_feature: MA Experiment ID: 20000264 Result: Down-regulated in Transcription
  misc_feature: MA Experiment 20000264 PARAMETER Experiment Name: At_Open_Flower_P Parameter: Age (day) Value: 21
  misc_feature: MA Experiment 20000264 PARAMETER Experiment Name: At_Open_Flower_P Parameter: Plant Line Value: WS
  misc_feature: MA Experiment 20000264 PARAMETER Experiment Name: At_Open_Flower_P Parameter: Tissue Value: Open Flower vs. Whole Plant
  misc_feature: MA Experiment ID: 20000265 Result: Down-regulated in Transcription
  misc_feature: MA Experiment 20000265 PARAMETER Experiment Name: At_Open_Flower_P Parameter: Age (day) Value: 21
  misc_feature: MA Experiment 20000265 PARAMETER Experiment Name: At_Open_Flower_P Parameter: Plant Line Value: WS
  misc_feature: MA Experiment 20000265 PARAMETER Experiment Name: At_Open_Flower_P Parameter: Tissue Value: Closed Flower vs. Whole Plant
aagttcctacgcgaagttttcaacagattcgccggagaatcttcgaatcaacggcggagaaatggctctatcacgcctctcatcacgatccaacatcatcactcgtcccttctccgccgccttcagccgattaatctcaacggacacaactccgatcacaatcgagacttcgcttcctttcacagctcacttatgtgatccaccgtcacgctccgtcgaatcatcgagtcaagagcttctcgatttcttcagaaccatggcgttgatgcgacgtatggaaatcgcagccgattcgctttacaaagcgaagctaatccgagggttttgtcatctctacgacggccaagaagctgtagctataggcatggaagctgcgattacaaagaaagacgcgattattactgcttatcgtgatcactgtattttcttaggtcgtggtggttcgcttcatgaggttttctcagagcttatgggaagacaagctggttgttctaaagggaaaggtggatctatgcacttctataagaaggaatcgtcgttttacggtggtcatgggattgttggtgctcaggttccattaggttgtggtattgcttttgctcagaagtataataaggaagaggctgtcacatttgctttgtatggtgatggtgctgcgaatcagggacagttgtttgaagctttgaatatttctgctctttgggatttgcctgcaattttggtctgcgagaacaatcactatggaatgggaactgctgaatggagagccgctaagagtccatcttactacaagcgtggtgattatgttcctggactcaaggtagatggtatggatgcatttgctgtcaaacaagcttgcaaatttgctaagcagcatgcgttggagaaggggccaataattcttgagatggacacatacaggtaccacggtcactccatgtctgatcctgggagcacataccgtacccgagatgagatatctggtgtgaggcaggaacgggatccaattgagagaataaagaagctggtactatctcatgacctagcaaccgagaaagagcttaaggatatggagaaggaaattagaaaagaagtagatgacgccattgccaaagctaaggattgcccaatgccagagccttctgagctctttaccaatgtgtatgtgaagggatttggcaccgagtcatttggacctgacagaaaagaagtcaaagcttcccttccatgatcatggagctcttgttcgttaaactgccacgtgtcatgagaaagttggctgatagagaaatctatgaatatgaataaagatctgattgtatactctctctctcccccccccccccccttctgagttttaatctctctgtatctttgtttacaaacataaggagaaacatgttattcttgtgaagctttagtagtctcgtgtttaatattcaagcaatcgagttgagatctct

SEQ ID NO: 24018 - protein, 409 aa, Arabidopsis thaliana
  peptide (1)..(409): Ceres Seq. ID no. 12422533
  misc_feature (23)..(409): Homolog of NCBI NO: 28465343 NR Description: pyruvate dehydrogenase E1alpha subunit [Beta
  misc_feature (23)..(409): Homolog of NCBI NO: 3851005 NR Description: pyruvate dehydrogenase E1 alpha subunit [Zea mays]
  misc_feature (21)..(409): Homolog of NCBI NO: 12003246 NR Description: pyruvate dehydrogenase [Lycopersicon esculentum]
  misc_feature (21)..(409): Homolog of NCBI NO: 1709453 NR Description: Pyruvate dehydrogenase E1 component alpha
  misc_feature (21)..(409): Homolog of NCBI NO: 23306664 NR Description: pyruvate dehydrogenase E1a-like subunit IAR4
  misc_feature (21)..(409): Homolog of NCBI NO: 15221692 NR Description: pyruvate dehydrogenase E1 alpha subunit
  misc_feature (21)..(409): Homolog of NCBI NO: 1709449 NR Description: Pyruvate dehydrogenase E1 component alpha
  misc_feature (21)..(409): Homolog of NCBI NO: 2117533 NR Description: pyruvate dehydrogenase (lipoamide) (EC 1.2.4.1)
  misc_feature (21)..(409): Homolog of NCBI NO: 13430788 NR Description: putative pyruvate dehydrogenase e1 alpha subunit
  misc_feature (21)..(409): Homolog of NCBI NO: 15218940 NR Description: pyruvate dehydrogenase e1 alpha subunit, putative
SSYAKFSTDSPENLRINGGEMALSRLSSRSNIITRPFSAAFSRLISTDTTPITIETSLPFTAHLCDPPSRSVESSSQELLDFFRTMALMRRMEIAADSLYKAKLIRGFCHLYDGQEAVAIGMEAAITKKDAIITAYRDHCIFLGRGGSLHEVFSELMGRQAGCSKGKGGSMHFYKKESSFYGGHGIVGAQVPLGCGIAFAQKYNKEEAVTFALYGDGAANQGQLFEALNISALWDLPAILVCENNHYGMGTAEWRAAKSPSYYKRGDYVPGLKVDGMDAFAVKQACKFAKQHALEKGPIILEMDTYRYHGHSMSDPGSTYRTRDEISGVRQERDPIERIKKLVLSHDLATEKELKDMEKEIRKEVDDAIAKAKDCPMPEPSELFTNVYVKGFGTESFGPDRKEVKASLP

SEQ ID NO: 24019 - protein, 389 aa, Arabidopsis thaliana
  peptide (1)..(389): Ceres Seq. ID no. 12422534
  misc_feature (3)..(389): Homolog of NCBI NO: 28465343 NR Description: pyruvate dehydrogenase E1alpha subunit [Beta
  misc_feature (3)..(389): Homolog of NCBI NO: 3851005 NR Description: pyruvate dehydrogenase E1 alpha subunit [Zea mays]
  misc_feature (1)..(389): Homolog of NCBI NO: 12003246 NR Description: pyruvate dehydrogenase [Lycopersicon esculentum]
  misc_feature (1)..(389): Homolog of NCBI NO: 1709453 NR Description: Pyruvate dehydrogenase E1 component alpha
  misc_feature (1)..(389): Homolog of NCBI NO: 23306664 NR Description: pyruvate dehydrogenase E1a-like subunit IAR4
  misc_feature (1)..(389): Homolog of NCBI NO: 15221692 NR Description: pyruvate dehydrogenase E1 alpha subunit
  misc_feature (1)..(389): Homolog of NCBI NO: 1709449 NR Description: Pyruvate dehydrogenase E1 component alpha
  misc_feature (1)..(389): Homolog of NCBI NO: 2117533 NR Description: pyruvate dehydrogenase (lipoamide) (EC 1.2.4.1)
  misc_feature (1)..(389): Homolog of NCBI NO: 13430788 NR Description: putative pyruvate dehydrogenase e1 alpha subunit
  misc_feature (1)..(389): Homolog of NCBI NO: 15218940 NR Description: pyruvate dehydrogenase e1 alpha subunit, putative
MALSRLSSRSNIITRPFSAAFSRLISTDTTPITIETSLPFTAHLCDPPSRSVESSSQELLDFFRTMALMRRMEIAADSLYKAKLIRGFCHLYDGQEAVAIGMEAAITKKDAIITAYRDHCIFLGRGGSLHEVFSELMGRQAGCSKGKGGSMHFYKKESSFYGGHGIVGAQVPLGCGIAFAQKYNKEEAVTFALYGDGAANQGQLFEALNISALWDLPAILVCENNHYGMGTAEWRAAKSPSYYKRGDYVPGLKVDGMDAFAVKQACKFAKQHALEKGPIILEMDTYRYHGHSMSDPGSTYRTRDEISGVRQERDPIERIKKLVLSHDLATEKELKDMEKEIRKEVDDAIAKAKDCPMPEPSELFTNVYVKGFGTESFGPDRKEVKASLP

SEQ ID NO: 24020 - protein, 324 aa, Arabidopsis thaliana
  peptide (1)..(324): Ceres Seq. ID no. 12422535
  misc_feature (1)..(324): Homolog of NCBI NO: 28465343 NR Description: pyruvate dehydrogenase E1alpha subunit [Beta
  misc_feature (1)..(324): Homolog of NCBI NO: 3851005 NR Description: pyruvate dehydrogenase E1 alpha subunit [Zea mays]
  misc_feature (1)..(324): Homolog of NCBI NO: 12003246 NR Description: pyruvate dehydrogenase [Lycopersicon esculentum]
  misc_feature (1)..(324): Homolog of NCBI NO: 1709453 NR Description: Pyruvate dehydrogenase E1 component alpha
  misc_feature (1)..(324): Homolog of NCBI NO: 23306664 NR Description: pyruvate dehydrogenase E1a-like subunit IAR4
  misc_feature (1)..(324): Homolog of NCBI NO: 15221692 NR Description: pyruvate dehydrogenase E1 alpha subunit
  misc_feature (1)..(324): Homolog of NCBI NO: 1709449 NR Description: Pyruvate dehydrogenase E1 component alpha
  misc_feature (1)..(324): Homolog of NCBI NO: 2117533 NR Description: pyruvate dehydrogenase (lipoamide) (EC 1.2.4.1)
  misc_feature (1)..(324): Homolog of NCBI NO: 13430788 NR Description: putative pyruvate dehydrogenase e1 alpha subunit
  misc_feature (1)..(324): Homolog of NCBI NO: 15218940 NR Description: pyruvate dehydrogenase e1 alpha subunit, putative
MALMRRMEIAADSLYKAKLIRGFCHLYDGQEAVAIGMEAAITKKDAIITAYRDHCIFLGRGGSLHEVFSELMGRQAGCSKGKGGSMHFYKKESSFYGGHGIVGAQVPLGCGIAFAQKYNKEEAVTFALYGDGAANQGQLFEALNISALWDLPAILVCENNHYGMGTAEWRAAKSPSYYKRGDYVPGLKVDGMDAFAVKQACKFAKQHALEKGPIILEMDTYRYHGHSMSDPGSTYRTRDEISGVRQERDPIERIKKLVLSHDLATEKELKDMEKEIRKEVDDAIAKAKDCPMPEPSELFTNVYVKGFGTESFGPDRKEVKASLP

SEQ ID NO: 24021 - DNA, 1292 bp, Arabidopsis thaliana
  misc_feature (1)..(1292): Ceres Seq. ID no. 13494202
  misc_feature: MA Experiment ID: 108469 Result: Down-regulated in Transcription
  misc_feature: MA Experiment ID: 108569 Result: Up-regulated in Transcription
  misc_feature: MA Experiment 108569 PARAMETER Experiment Name: At_0.001%_MeJA__cDNA_P Parameter: Timepoint (hr) Value: 6
  misc_feature: MA Experiment 108569 PARAMETER Experiment Name: At_0.001%_MeJA__cDNA_P Parameter: Tissue Value: Aerial
  misc_feature: MA Experiment 108569 PARAMETER Experiment Name: At_0.001%_MeJA__cDNA_P Parameter: Treatment Value: 0.001% MeJA vs. No Treatment
  misc_feature: MA Experiment ID: 108573 Result: Up-regulated in Transcription
  misc_feature: MA Experiment 108573 PARAMETER Experiment Name: At_Drought_cDNA_P Parameter: Timepoint (hr) Value: 6
  misc_feature: MA Experiment 108573 PARAMETER Experiment Name: At_Drought_cDNA_P Parameter: Tissue Value: Aerial
  misc_feature: MA Experiment 108573 PARAMETER Experiment Name: At_Drought_cDNA_P Parameter: Treatment Value: Drought vs. No Drought
  misc_feature: MA Experiment ID: 108585 Result: Up-regulated in Transcription
  misc_feature: MA Experiment 108585 PARAMETER Experiment Name: At_5mM_NaNP_cDNA_P Parameter: Timepoint (hr) Value: 6
  misc_feature: MA Experiment 108585 PARAMETER Experiment Name: At_5mM_NaNP_cDNA_P Parameter: Tissue Value: Aerial
  misc_feature: MA Experiment 108585 PARAMETER Experiment Name: At_5mM_NaNP_cDNA_P Parameter: Treatment Value: null
ctacacgaattcgattctctcttatctcgacgagaaaaccctactgcgaaaaaactccgatctctctggcgagaagtaaattttttatctctgagcttggtttcaccatttctctatctctatctcctcgctgggttacggtttggtaaggtcagtgttctctaaggctgaaatttgggggtttctcagtctcgatgtggtcgtgctccgttaggattcttcacaatcattagggttatatttcttacaaactgatgctcattttctcttccctgtctatggctttatctgtgatccttcaaaagcttagtgtcttcggccctggtttgaatccttctttcccttactgcatcgccaatcactcctttgcctcccgttaattgagttgctctctttcaacttaattacattagtctgcttcctttgctgtctagtctggatagtgttgcaaatcaagtagtatcttctttagacattcttggctgagagatttacactaaaagcatagaataagaaacccctgtttggttagtatctacccgagtctcgtagtcctacacagatccggatcctagtttcgaagctagttcttgtttagctgaagctcagacccaaaatgctccaagaaccgtcggctgcattctccctccggcgtaactcattcagacgccgatctcccagatcaaatgtcgatgacagaggctggaatccgctccatatcaaagccagaaaaggcgatctgaaatctgtcaagcagcttctcgaccaaggaatggatgtgaatgctctagcatggggacccaaatcaaaaggagtgagtgcacttcaccttgcagcagagggaggtcacattgaagtcatggatttactcctagaacgtggggccaacattgatgctaaaacatggggctcatgcgggtggactcctctccacgctgcagccaaagagcggaagagagaagcagtgaagtttctggtggagaacggcgcattcttggcagatgatataactgataccaggtttaatccgccggtgcattactgtcacggccttgaatgggcgtacgaggaaatgaagaagcttaacagcgagtcttcttcttcatctggtggagacacatcttccagttctgacaactgaacttcttcttggttgtttctcggtgtgttttgttttgttttctagttgagactacttatcagaactattatggttggtgtttgatcttatgggctatgtgaaacattgaaactgcggatacattcatgtaatcttcagtgtgttattttac

SEQ ID NO: 24022 - protein, 174 aa, Arabidopsis thaliana
  peptide (1)..(174): Ceres Seq. ID no. 13494203
  misc_feature (28)..(60): Pfam Name: Ankyrin repeat Pfam Description: Ankyrin repeat
  misc_feature (6)..(133): Homolog of NCBI NO: 30678058 NR Description: ankyrin -related [Arabidopsis thaliana]
  misc_feature (6)..(133): Homolog of NCBI NO: 25295712 NR Description: probable ankyrin [imported] - Arabidopsis
  misc_feature (26)..(125): Homolog of NCBI NO: 28373666 NR Description: Chain A, Sank E3_5: An Artificial Ankyrin Repeat
  misc_feature (24)..(141): Homolog of NCBI NO: 28274852 NR Description: ankyrin repeat protein E4_2 [synthetic construct]
  misc_feature (29)..(126): Homolog of NCBI NO: 28373835 NR Description: Chain A, 3ank: A Designed Ankyrin Repeat Protein
  misc_feature (29)..(141): Homolog of NCBI NO: 28373837 NR Description: Chain A, 4ank: A Designed Ankyrin Repeat Protein
  misc_feature (26)..(126): Homolog of NCBI NO: 28373837 NR Description: Chain A, 4ank: A Designed Ankyrin Repeat Protein
  misc_feature (1)..(174): Homolog of NCBI NO: 18415625 NR Description: expressed protein [Arabidopsis thaliana]
  misc_feature (1)..(174): Homolog of NCBI NO: 11357401 NR Description: hypothetical protein F13G24.40 - Arabidopsis
  misc_feature (1)..(174): Homolog of NCBI NO: 15240185 NR Description: expressed protein [Arabidopsis thaliana]
MLQEPSAAFSLRRNSFRRRSPRSNVDDRGWNPLHIKARKGDLKSVKQLLDQGMDVNALAWGPKSKGVSALHLAAEGGHIEVMDLLLERGANIDAKTWGSCGWTPLHAAAKERKREAVKFLVENGAFLADDITDTRFNPPVHYCHGLEWAYEEMKKLNSESSSSSGGDTSSSSDN

SEQ ID NO: 24023 - protein, 122 aa, Arabidopsis thaliana
  peptide (1)..(122): Ceres Seq. ID no. 13494204
  misc_feature (1)..(81): Homolog of NCBI NO: 30678058 NR Description: ankyrin -related [Arabidopsis thaliana]
  misc_feature (1)..(81): Homolog of NCBI NO: 25295712 NR Description: probable ankyrin [imported] - Arabidopsis
  misc_feature (1)..(73): Homolog of NCBI NO: 28373666 NR Description: Chain A, Sank E3_5: An Artificial Ankyrin Repeat
  misc_feature (1)..(89): Homolog of NCBI NO: 28274852 NR Description: ankyrin repeat protein E4_2 [synthetic construct]
  misc_feature (1)..(74): Homolog of NCBI NO: 28373835 NR Description: Chain A, 3ank: A Designed Ankyrin Repeat Protein
  misc_feature (1)..(89): Homolog of NCBI NO: 28373837 NR Description: Chain A, 4ank: A Designed Ankyrin Repeat Protein
  misc_feature (1)..(74): Homolog of NCBI NO: 28373837 NR Description: Chain A, 4ank: A Designed Ankyrin Repeat Protein
  misc_feature (1)..(122): Homolog of NCBI NO: 18415625 NR Description: expressed protein [Arabidopsis thaliana]
  misc_feature (1)..(122): Homolog of NCBI NO: 11357401 NR Description: hypothetical protein F13G24.40 - Arabidopsis
  misc_feature (1)..(122): Homolog of NCBI NO: 15240185 NR Description: expressed protein [Arabidopsis thaliana]
MDVNALAWGPKSKGVSALHLAAEGGHIEVMDLLLERGANIDAKTWGSCGWTPLHAAAKERKREAVKFLVENGAFLADDITDTRFNPPVHYCHGLEWAYEEMKKLNSESSSSSGGDTSSSSDN

SEQ ID NO: 24024 - protein, 93 aa, Arabidopsis thaliana
  peptide (1)..(93): Ceres Seq. ID no. 13494205
  misc_feature (1)..(52): Homolog of NCBI NO: 30678058 NR Description: ankyrin -related [Arabidopsis thaliana]
  misc_feature (1)..(52): Homolog of NCBI NO: 25295712 NR Description: probable ankyrin [imported] - Arabidopsis
  misc_feature (1)..(44): Homolog of NCBI NO: 28373666 NR Description: Chain A, Sank E3_5: An Artificial Ankyrin Repeat
  misc_feature (1)..(60): Homolog of NCBI NO: 28274852 NR Description: ankyrin repeat protein E4_2 [synthetic construct]
  misc_feature (1)..(45): Homolog of NCBI NO: 28373835 NR Description: Chain A, 3ank: A Designed Ankyrin Repeat Protein
  misc_feature (1)..(60): Homolog of NCBI NO: 28373837 NR Description: Chain A, 4ank: A Designed Ankyrin Repeat Protein
  misc_feature (1)..(45): Homolog of NCBI NO: 28373837 NR Description: Chain A, 4ank: A Designed Ankyrin Repeat Protein
  misc_feature (1)..(93): Homolog of NCBI NO: 18415625 NR Description: expressed protein [Arabidopsis thaliana]
  misc_feature (1)..(93): Homolog of NCBI NO: 11357401 NR Description: hypothetical protein F13G24.40 - Arabidopsis
  misc_feature (1)..(93): Homolog of NCBI NO: 15240185 NR Description: expressed protein [Arabidopsis thaliana]
MDLLLERGANIDAKTWGSCGWTPLHAAAKERKREAVKFLVENGAFLADDITDTRFNPPVHYCHGLEWAYEEMKKLNSESSSSSGGDTSSSSDN

SEQ ID NO: 24025 - DNA, 1054 bp, Arabidopsis thaliana
  misc_feature (1)..(1054): Ceres Seq. ID no. 12422566
  misc_feature: MA Experiment ID: 108434 Result: Down-regulated in Transcription
  misc_feature: MA Experiment 108434 PARAMETER Experiment Name: At_Root_Tips_cDNA_P Parameter: Tissue Value: Root Tips
  misc_feature: MA Experiment ID: 108574 Result: Down-regulated in Transcription
  misc_feature: MA Experiment 108574 PARAMETER Experiment Name: At_Wounding__cDNA_P Parameter: Timepoint (hr) Value: 1
  misc_feature: MA Experiment 108574 PARAMETER Experiment Name: At_Wounding__cDNA_P Parameter: Tissue Value: Aerial
  misc_feature: MA Experiment 108574 PARAMETER Experiment Name: At_Wounding__cDNA_P Parameter: Treatment Value: Wounding vs. No Wounding
  misc_feature: MA Experiment ID: 108579 Result: Down-regulated in Transcription
  misc_feature: MA Experiment 108579 PARAMETER Experiment Name: At_4deg_Cold_cDNA_P Parameter: Temperature (deg C) Value: 4 vs. 22
  misc_feature: MA Experiment 108579 PARAMETER Experiment Name: At_4deg_Cold_cDNA_P Parameter: Timepoint (hr) Value: 6
  misc_feature: MA Experiment 108579 PARAMETER Experiment Name: At_4deg_Cold_cDNA_P Parameter: Tissue Value: Aerial
  misc_feature: MA Experiment ID: 108585 Result: Up-regulated in Transcription
  misc_feature: MA Experiment 108585 PARAMETER Experiment Name: At_5mM_NaNP_cDNA_P Parameter: Timepoint (hr) Value: 6
  misc_feature: MA Experiment 108585 PARAMETER Experiment Name: At_5mM_NaNP_cDNA_P Parameter: Tissue Value: Aerial
  misc_feature: MA Experiment 108585 PARAMETER Experiment Name: At_5mM_NaNP_cDNA_P Parameter: Treatment Value: null
  misc_feature: MA Experiment ID: 108595 Result: Down-regulated in Transcription
  misc_feature: MA Experiment 108595 PARAMETER Experiment Name: At_Ler-pi_Ovule_cDNA_P Parameter: Plant Line Value: null
  misc_feature: MA Experiment ID: 20000072 Result: Down-regulated in Transcription
  misc_feature: MA Experiment 20000072 PARAMETER Experiment Name: At_100uM_ABA_Mutants_cDNA_P Parameter: Plant Line Value: CS8105
  misc_feature: MA Experiment 20000072 PARAMETER Experiment Name: At_100uM_ABA_Mutants_cDNA_P Parameter: Timepoint (hr) Value: 6
  misc_feature: MA Experiment 20000072 PARAMETER Experiment Name: At_100uM_ABA_Mutants_cDNA_P Parameter: Tissue Value: Aerial
  misc_feature: MA Experiment 20000072 PARAMETER Experiment Name: At_100uM_ABA_Mutants_cDNA_P Parameter: Treatment Value: 100uM ABA vs. No Treatment
  misc_feature: MA Experiment ID: 20000111 Result: Down-regulated in Transcription
  misc_feature: MA Experiment 20000111 PARAMETER Experiment Name: At_42deg_Heat_cDNA_P Parameter: Temperature (deg C) Value: 42 vs. 22
  misc_feature: MA Experiment 20000111 PARAMETER Experiment Name: At_42deg_Heat_cDNA_P Parameter: Timepoint (hr) Value: 6
  misc_feature: MA Experiment 20000111 PARAMETER Experiment Name: At_42deg_Heat_cDNA_P Parameter: Tissue Value: Aerial
  misc_feature: MA Experiment ID: 20000171 Result: Down-regulated in Transcription
  misc_feature: MA Experiment 20000171 PARAMETER Experiment Name: At_42deg_Heat_P Parameter: Age (day) Value: 14
  misc_feature: MA Experiment 20000171 PARAMETER Experiment Name: At_42deg_Heat_P Parameter: Organism Value: A. thaliana
  misc_feature: MA Experiment 20000171 PARAMETER Experiment Name: At_42deg_Heat_P Parameter: Plant Line Value: WS
  misc_feature: MA Experiment 20000171 PARAMETER Experiment Name: At_42deg_Heat_P Parameter: Temperature (deg C) Value: 42 vs. 22
  misc_feature: MA Experiment 20000171 PARAMETER Experiment Name: At_42deg_Heat_P Parameter: Timepoint (hr) Value: 1
  misc_feature: MA Experiment 20000171 PARAMETER Experiment Name: At_42deg_Heat_P Parameter: Tissue Value: Aerial
  misc_feature: MA Experiment ID: 20000173 Result: Down-regulated in Transcription
  misc_feature: MA Experiment 20000173 PARAMETER Experiment Name: At_42deg_Heat_P Parameter: Age (day) Value: 14
  misc_feature: MA Experiment 20000173 PARAMETER Experiment Name: At_42deg_Heat_P Parameter: Organism Value: A. thaliana
  misc_feature: MA Experiment 20000173 PARAMETER Experiment Name: At_42deg_Heat_P Parameter: Plant Line Value: WS
  misc_feature: MA Experiment 20000173 PARAMETER Experiment Name: At_42deg_Heat_P Parameter: Temperature (deg C) Value: 42 vs. 22
  misc_feature: MA Experiment 20000173 PARAMETER Experiment Name: At_42deg_Heat_P Parameter: Timepoint (hr) Value: 6
  misc_feature: MA Experiment 20000173 PARAMETER Experiment Name: At_42deg_Heat_P Parameter: Tissue Value: Aerial
  misc_feature: MA Experiment ID: 20000213 Result: Down-regulated in Transcription
  misc_feature: MA Experiment 20000213 PARAMETER Experiment Name: At_4deg_Cold_P Parameter: Timepoint (hr) Value: 2
  misc_feature: MA Experiment ID: 20000234 Result: Down-regulated in Transcription
  misc_feature: MA Experiment 20000234 PARAMETER Experiment Name: At_Siliques_P Parameter: Age (day) Value: 21
  misc_feature: MA Experiment 20000234 PARAMETER Experiment Name: At_Siliques_P Parameter: Organism Value: A. thaliana
  misc_feature: MA Experiment 20000234 PARAMETER Experiment Name: At_Siliques_P Parameter: Plant Line Value: WS
  misc_feature: MA Experiment 20000234 PARAMETER Experiment Name: At_Siliques_P Parameter: Tissue Value: Less Than 5mm Siliques vs. Whole Plant
  misc_feature: MA Experiment ID: 20000235 Result: Down-regulated in Transcription
  misc_feature: MA Experiment 20000235 PARAMETER Experiment Name: At_Siliques_P Parameter: Age (day) Value: 21
  misc_feature: MA Experiment 20000235 PARAMETER Experiment Name: At_Siliques_P Parameter: Organism Value: A. thaliana
  misc_feature: MA Experiment 20000235 PARAMETER Experiment Name: At_Siliques_P Parameter: Plant Line Value: WS
  misc_feature: MA Experiment 20000235 PARAMETER Experiment Name: At_Siliques_P Parameter: Tissue Value: 5-10mm Siliques vs. Whole Plant
  misc_feature: MA Experiment ID: 20000264 Result: Down-regulated in Transcription
  misc_feature: MA Experiment 20000264 PARAMETER Experiment Name: At_Open_Flower_P Parameter: Age (day) Value: 21
  misc_feature: MA Experiment 20000264 PARAMETER Experiment Name: At_Open_Flower_P Parameter: Plant Line Value: WS
  misc_feature: MA Experiment 20000264 PARAMETER Experiment Name: At_Open_Flower_P Parameter: Tissue Value: Open Flower vs. Whole Plant
  misc_feature: MA Experiment ID: 20000265 Result: Down-regulated in Transcription
  misc_feature: MA Experiment 20000265 PARAMETER Experiment Name: At_Open_Flower_P Parameter: Age (day) Value: 21
  misc_feature: MA Experiment 20000265 PARAMETER Experiment Name: At_Open_Flower_P Parameter: Plant Line Value: WS
  misc_feature: MA Experiment 20000265 PARAMETER Experiment Name: At_Open_Flower_P Parameter: Tissue Value: Closed Flower vs. Whole Plant
  misc_feature: MA Experiment ID: 20000286 Result: Down-regulated in Transcription
  misc_feature: MA Experiment 20000286 PARAMETER Experiment Name: At_Open_Flower_P Parameter: Age (day) Value: 21
  misc_feature: MA Experiment 20000286 PARAMETER Experiment Name: At_Open_Flower_P Parameter: Plant Line Value: WS
  misc_feature: MA Experiment 20000286 PARAMETER Experiment Name: At_Open_Flower_P Parameter: Tissue Value: Half Open vs. Whole Plant
  misc_feature: MA Experiment ID: 20000327 Result: Down-regulated in Transcription
  misc_feature: MA Experiment 20000327 PARAMETER Experiment Name: At_42deg_Heat_Sub_P Parameter: Age (day) Value: 14
  misc_feature: MA Experiment 20000327 PARAMETER Experiment Name: At_42deg_Heat_Sub_P Parameter: Organism Value: A. thaliana
  misc_feature: MA Experiment 20000327 PARAMETER Experiment Name: At_42deg_Heat_Sub_P Parameter: Plant Line Value: WS
  misc_feature: MA Experiment 20000327 PARAMETER Experiment Name: At_42deg_Heat_Sub_P Parameter: Temperature (deg C) Value: 42 vs. 22
  misc_feature: MA Experiment 20000327 PARAMETER Experiment Name: At_42deg_Heat_Sub_P Parameter: Timepoint (hr) Value: 1
  misc_feature: MA Experiment 20000327 PARAMETER Experiment Name: At_42deg_Heat_Sub_P Parameter: Tissue Value: Aerial
  misc_feature: MA Experiment ID: 20000328 Result: Down-regulated in Transcription
  misc_feature: MA Experiment 20000328 PARAMETER Experiment Name: At_42deg_Heat_Sub_P Parameter: Age (day) Value: 14
  misc_feature: MA Experiment 20000328 PARAMETER Experiment Name: At_42deg_Heat_Sub_P Parameter: Organism Value: A. thaliana
  misc_feature: MA Experiment 20000328 PARAMETER Experiment Name: At_42deg_Heat_Sub_P Parameter: Plant Line Value: WS
  misc_feature: MA Experiment 20000328 PARAMETER Experiment Name: At_42deg_Heat_Sub_P Parameter: Temperature (deg C) Value: 42 vs. 22
  misc_feature: MA Experiment 20000328 PARAMETER Experiment Name: At_42deg_Heat_Sub_P Parameter: Timepoint (hr) Value: 6
  misc_feature: MA Experiment 20000328 PARAMETER Experiment Name: At_42deg_Heat_Sub_P Parameter: Tissue Value: Aerial
  misc_feature: MA Experiment ID: 20000332 Result: Down-regulated in Transcription
  misc_feature: MA Experiment 20000332 PARAMETER Experiment Name: At_4deg_Cold_Sub_P Parameter: Age (day) Value: 14
  misc_feature: MA Experiment 20000332 PARAMETER Experiment Name: At_4deg_Cold_Sub_P Parameter: Organism Value: A. thaliana
  misc_feature: MA Experiment 20000332 PARAMETER Experiment Name: At_4deg_Cold_Sub_P Parameter: Plant Line Value: WS
  misc_feature: MA Experiment 20000332 PARAMETER Experiment Name: At_4deg_Cold_Sub_P Parameter: Temperature (deg C) Value: 4 vs. 22
  misc_feature: MA Experiment 20000332 PARAMETER Experiment Name: At_4deg_Cold_Sub_P Parameter: Timepoint (hr) Value: 2
  misc_feature: MA Experiment 20000332 PARAMETER Experiment Name: At_4deg_Cold_Sub_P Parameter: Tissue Value: Aerial
  misc_feature: MA Experiment ID: 20000355 Result: Down-regulated in Transcription
  misc_feature: MA Experiment 20000355 PARAMETER Experiment Name: At_Siliques_Sub_P Parameter: Age (day) Value: 21
  misc_feature: MA Experiment 20000355 PARAMETER Experiment Name: At_Siliques_Sub_P Parameter: Organism Value: A. thaliana
  misc_feature: MA Experiment 20000355 PARAMETER Experiment Name: At_Siliques_Sub_P Parameter: Plant Line Value: WS
  misc_feature: MA Experiment 20000355 PARAMETER Experiment Name: At_Siliques_Sub_P Parameter: Tissue Value: Less Than 5mm Siliques vs. Whole Plant
  misc_feature: MA Experiment ID: 20000440 Result: Down-regulated in Transcription
  misc_feature: MA Experiment 20000440 PARAMETER Experiment Name: At_Closed-Flower__Sub_P Parameter: Tissue Value: Closed Flower vs. Whole Plant
  misc_feature: MA Experiment ID: 20000794 Result: Down-regulated in Transcription
  misc_feature: MA Experiment 20000794 PARAMETER Experiment Name: At_Petals_P Parameter: Age (day) Value: 23-25 days
  misc_feature: MA Experiment 20000794 PARAMETER Experiment Name: At_Petals_P Parameter: Plant Line Value: WS
  misc_feature: MA Experiment 20000794 PARAMETER Experiment Name: At_Petals_P Parameter: Tissue Value: Petals vs. Whole plant
  misc_feature: MA Experiment ID: 20001450 Result: Up-regulated in Transcription
  misc_feature: MA Experiment 20001450 PARAMETER Experiment Name: At_Far-red-induction_P Parameter: Age (day) Value: 7
  misc_feature: MA Experiment 20001450 PARAMETER Experiment Name: At_Far-red-induction_P Parameter: Light Value: Far-red vs. White
  misc_feature: MA Experiment 20001450 PARAMETER Experiment Name: At_Far-red-induction_P Parameter: Organism Value: A. thaliana
  misc_feature: MA Experiment 20001450 PARAMETER Experiment Name: At_Far-red-induction_P Parameter: Plant Line Value: Columbia
  misc_feature: MA Experiment 20001450 PARAMETER Experiment Name: At_Far-red-induction_P Parameter: Timepoint (hr) Value: 8
  misc_feature: MA Experiment 20001450 PARAMETER Experiment Name: At_Far-red-induction_P Parameter: Tissue Value: Whole Plant
  misc_feature: MA Experiment ID: 20001451 Result: Up-regulated in Transcription
  misc_feature: MA Experiment 20001451 PARAMETER Experiment Name: At_Far-red-induction_P Parameter: Age (day) Value: 7
  misc_feature: MA Experiment 20001451 PARAMETER Experiment Name: At_Far-red-induction_P Parameter: Light Value: Far-red vs. White
  misc_feature: MA Experiment 20001451 PARAMETER Experiment Name: At_Far-red-induction_P Parameter: Organism Value: A. thaliana
  misc_feature: MA Experiment 20001451 PARAMETER Experiment Name: At_Far-red-induction_P Parameter: Plant Line Value: Columbia
  misc_feature: MA Experiment 20001451 PARAMETER Experiment Name: At_Far-red-induction_P Parameter: Timepoint (hr) Value: 24
  misc_feature: MA Experiment 20001451 PARAMETER Experiment Name: At_Far-red-induction_P Parameter: Tissue Value: Whole Plant
  misc_feature: MA Experiment ID: 20001555 Result: Down-regulated in Transcription
  misc_feature: MA Experiment 20001555 PARAMETER Experiment Name: At_Drought_Soil_Dry_P Parameter: Age (day) Value: 24
  misc_feature: MA Experiment 20001555 PARAMETER Experiment Name: At_Drought_Soil_Dry_P Parameter: Organism Value: A. thaliana
  misc_feature: MA Experiment 20001555 PARAMETER Experiment Name: At_Drought_Soil_Dry_P Parameter: Plant Line Value: WS
  misc_feature: MA Experiment 20001555 PARAMETER Experiment Name: At_Drought_Soil_Dry_P Parameter: Post Timepoint (hr) Value: None
  misc_feature: MA Experiment 20001555 PARAMETER Experiment Name: At_Drought_Soil_Dry_P Parameter: Post-Treatment Value: None
  misc_feature: MA Experiment 20001555 PARAMETER Experiment Name: At_Drought_Soil_Dry_P Parameter: Timepoint (day) Value: 10
  misc_feature: MA Experiment 20001555 PARAMETER Experiment Name: At_Drought_Soil_Dry_P Parameter: Treatment Value: Drought vs. No Drought
  misc_feature: MA Experiment ID: 20001556 Result: Down-regulated in Transcription
  misc_feature: MA Experiment 20001556 PARAMETER Experiment Name: At_Drought_Soil_Dry_P Parameter: Age (day) Value: 26
  misc_feature: MA Experiment 20001556 PARAMETER Experiment Name: At_Drought_Soil_Dry_P Parameter: Organism Value: A. thaliana
  misc_feature: MA Experiment 20001556 PARAMETER Experiment Name: At_Drought_Soil_Dry_P Parameter: Plant Line Value: WS
  misc_feature: MA Experiment 20001556 PARAMETER Experiment Name: At_Drought_Soil_Dry_P Parameter: Post Timepoint (hr) Value: None
  misc_feature: MA Experiment 20001556 PARAMETER Experiment Name: At_Drought_Soil_Dry_P Parameter: Post-Treatment Value: None
  misc_feature: MA Experiment 20001556 PARAMETER Experiment Name: At_Drought_Soil_Dry_P Parameter: Timepoint (day) Value: 12
  misc_feature: MA Experiment 20001556 PARAMETER Experiment Name: At_Drought_Soil_Dry_P Parameter: Treatment Value: Drought vs. No Drought
  misc_feature: MA Experiment ID: 20001557 Result: Down-regulated in Transcription
  misc_feature: MA Experiment 20001557 PARAMETER Experiment Name: At_Drought_Soil_Dry_P Parameter: Age (day) Value: 27
  misc_feature: MA Experiment 20001557 PARAMETER Experiment Name: At_Drought_Soil_Dry_P Parameter: Organism Value: A. thaliana
  misc_feature: MA Experiment 20001557 PARAMETER Experiment Name: At_Drought_Soil_Dry_P Parameter: Plant Line Value: WS
  misc_feature: MA Experiment 20001557 PARAMETER Experiment Name: At_Drought_Soil_Dry_P Parameter: Post Timepoint (hr) Value: 3
  misc_feature: MA Experiment 20001557 PARAMETER Experiment Name: At_Drought_Soil_Dry_P Parameter: Post-Treatment Value: Re-Water vs. No Drought
  misc_feature: MA Experiment 20001557 PARAMETER Experiment Name: At_Drought_Soil_Dry_P Parameter: Timepoint (day) Value: 13
  misc_feature: MA Experiment 20001557 PARAMETER Experiment Name: At_Drought_Soil_Dry_P Parameter: Treatment Value: Drought vs. No Drought
  misc_feature: MA Experiment ID: 20001558 Result: Down-regulated in Transcription
  misc_feature: MA Experiment 20001558 PARAMETER Experiment Name: At_Drought_Soil_Dry_P Parameter: Age (day) Value: 27
  misc_feature: MA Experiment 20001558 PARAMETER Experiment Name: At_Drought_Soil_Dry_P Parameter: Organism Value: A. thaliana
  misc_feature: MA Experiment 20001558 PARAMETER Experiment Name: At_Drought_Soil_Dry_P Parameter: Plant Line Value: WS
  misc_feature: MA Experiment 20001558 PARAMETER Experiment Name: At_Drought_Soil_Dry_P Parameter: Post Timepoint (hr) Value: 6
  misc_feature: MA Experiment 20001558 PARAMETER Experiment Name: At_Drought_Soil_Dry_P Parameter: Post-Treatment Value: Re-Water vs. No Drought
  misc_feature: MA Experiment 20001558 PARAMETER Experiment Name: At_Drought_Soil_Dry_P Parameter: Timepoint (day) Value: 13
  misc_feature: MA Experiment 20001558 PARAMETER Experiment Name: At_Drought_Soil_Dry_P Parameter: Treatment Value: Drought vs. No Drought
  misc_feature: MA Experiment ID: 20001559 Result: Down-regulated in Transcription
  misc_feature: MA Experiment 20001559 PARAMETER Experiment Name: At_Drought_Soil_Dry_P Parameter: Age (day) Value: 28
  misc_feature: MA Experiment 20001559 PARAMETER Experiment Name: At_Drought_Soil_Dry_P Parameter: Organism Value: A. thaliana
  misc_feature: MA Experiment 20001559 PARAMETER Experiment Name: At_Drought_Soil_Dry_P Parameter: Plant Line Value: WS
  misc_feature: MA Experiment 20001559 PARAMETER Experiment Name: At_Drought_Soil_Dry_P Parameter: Post Timepoint (hr) Value: 29
  misc_feature: MA Experiment 20001559 PARAMETER Experiment Name: At_Drought_Soil_Dry_P Parameter: Post-Treatment Value: Re-Water vs. No Drought
  misc_feature: MA Experiment 20001559 PARAMETER Experiment Name: At_Drought_Soil_Dry_P Parameter: Timepoint (day) Value: 14
  misc_feature: MA Experiment 20001559 PARAMETER Experiment Name: At_Drought_Soil_Dry_P Parameter: Treatment Value: Drought vs. No Drought
  misc_feature: MA Experiment ID: 20001904 Result: Down-regulated in Transcription
  misc_feature: MA Experiment 20001904 PARAMETER Experiment Name: At_Drought_Reproduction_P Parameter: Age (day) Value: 37
  misc_feature: MA Experiment 20001904 PARAMETER Experiment Name: At_Drought_Reproduction_P Parameter: Organism Value: A. thaliana
  misc_feature: MA Experiment 20001904 PARAMETER Experiment Name: At_Drought_Reproduction_P Parameter: Plant Line Value: WS
  misc_feature: MA Experiment 20001904 PARAMETER Experiment Name: At_Drought_Reproduction_P Parameter: Timepoint (day) Value: 7
  misc_feature: MA Experiment 20001904 PARAMETER Experiment Name: At_Drought_Reproduction_P Parameter: Tissue Value: Rosettes
  misc_feature: MA Experiment 20001904 PARAMETER Experiment Name: At_Drought_Reproduction_P Parameter: Treatment Value: Drought vs. No Drought
  misc_feature: MA Experiment ID: 20001905 Result: Down-regulated in Transcription
  misc_feature: MA Experiment 20001905 PARAMETER Experiment Name: At_Drought_Reproduction_P Parameter: Age (day) Value: 40
  misc_feature: MA Experiment 20001905 PARAMETER Experiment Name: At_Drought_Reproduction_P Parameter: Organism Value: A. thaliana
  misc_feature: MA Experiment 20001905 PARAMETER Experiment Name: At_Drought_Reproduction_P Parameter: Plant Line Value: WS
  misc_feature: MA Experiment 20001905 PARAMETER Experiment Name: At_Drought_Reproduction_P Parameter: Timepoint (day) Value: 10
  misc_feature: MA Experiment 20001905 PARAMETER Experiment Name: At_Drought_Reproduction_P Parameter: Tissue Value: Rosettes
  misc_feature: MA Experiment 20001905 PARAMETER Experiment Name: At_Drought_Reproduction_P Parameter: Treatment Value: Drought vs. No Drought
  misc_feature: MA Experiment ID: 20001906 Result: Down-regulated in Transcription
  misc_feature: MA Experiment 20001906 PARAMETER Experiment Name: At_Drought_Reproduction_P Parameter: Age (day) Value: 35
  misc_feature: MA Experiment 20001906 PARAMETER Experiment Name: At_Drought_Reproduction_P Parameter: Organism Value: A. thaliana
  misc_feature: MA Experiment 20001906 PARAMETER Experiment Name: At_Drought_Reproduction_P Parameter: Plant Line Value: WS
  misc_feature: MA Experiment 20001906 PARAMETER Experiment Name: At_Drought_Reproduction_P Parameter: Timepoint (day) Value: 5
  misc_feature: MA Experiment 20001906 PARAMETER Experiment Name: At_Drought_Reproduction_P Parameter: Tissue Value: Siliques
  misc_feature: MA Experiment 20001906 PARAMETER Experiment Name: At_Drought_Reproduction_P Parameter: Treatment Value: Drought vs. No Drought
  misc_feature: MA Experiment ID: 20001908 Result: Down-regulated in Transcription
  misc_feature: MA Experiment 20001908 PARAMETER Experiment Name: At_Drought_Reproduction_P Parameter: Age (day) Value: 40
  misc_feature: MA Experiment 20001908 PARAMETER Experiment Name: At_Drought_Reproduction_P Parameter: Organism Value: A. thaliana
  misc_feature: MA Experiment 20001908 PARAMETER Experiment Name: At_Drought_Reproduction_P Parameter: Plant Line Value: WS
  misc_feature: MA Experiment 20001908 PARAMETER Experiment Name: At_Drought_Reproduction_P Parameter: Timepoint (day) Value: 10
  misc_feature: MA Experiment 20001908 PARAMETER Experiment Name: At_Drought_Reproduction_P Parameter: Tissue Value: Siliques
  misc_feature: MA Experiment 20001908 PARAMETER Experiment Name: At_Drought_Reproduction_P Parameter: Treatment Value: Drought vs. No Drought
attctcagaaatcttgaccatgaaggaggatcgtcgtcttcctcacaaacgcgacgccttccaattcttgaaaaccaaggctgcgtacgttatcgtcatagttctaacctacgcctttggttacttctccgcctaccactatcatcaaccgctgcagcagcagctgccaccgtctacgagagccgtggaaacgacaaaacctcaagtttgttcaatcgacaacttccgagttacgactccatgcggcaatcttgttccgccggaattgattcgccagactgttatcgaccggatctttaacggaacttctccgtacatcgatttcccaccaccgcacgccaagaagtttctccggccaaaaagaatcaaaggttggggatcatacggggccgttttcgagaatctaatccgccgagtcaaacctaagacgatcgtcgaagtcgggagttttctcggcgcgtcggcgatacacatggcgaatctcacgcgccgccttgggctcgaggagactcagattctatgcgtcgacgacttccgtggctggcccggttttcgagaccggtttaaggacatggctttggttaacggtgacgttctgcttatttaccagtttatgcaaaacgtggttatctcggatttttccggttcgatattgccggttcctttctcgaccggttcggctttggagaagctgtgtgaatggggagtgacggcggacctggtggagatagacgcgggtcacgatttcaattcggcttgggcggatataaaccgggcggttcggatactccgacccggcggtgttatatttggtcacgattatttcacggcggcggataatagaggagtgaggagagccgtgaatctgttcgcagagattaaccggttaaaggtcaaaaccgatggtcaacattgggttattgattcggtcaaagtaaactgattccctttttcctataaggaatgaaaaaattcgaggtataaataataagaaaatgtgtaatattgcatagtcaattcatttttttgaaaattaatggatttgaggtttttg

SEQ ID NO: 24026 - protein, 313 aa, Arabidopsis thaliana
  peptide (1)..(313): Ceres Seq. ID no. 12422567
  misc_feature (7)..(312): Homolog of NCBI NO: 15223338 NR Description: hypothetical protein; protein id: At1g01180.1
FSEILTMKEDRRLPHKRDAFQFLKTKAAYVIVIVLTYAFGYFSAYHYHQPLQQQLPPSTRAVETTKPQVCSIDNFRVTTPCGNLVPPELIRQTVIDRIFNGTSPYIDFPPPHAKKFLRPKRIKGWGSYGAVFENLIRRVKPKTIVEVGSFLGASAIHMANLTRRLGLEETQILCVDDFRGWPGFRDRFKDMALVNGDVLLIYQFMQNVVISDFSGSILPVPFSTGSALEKLCEWGVTADLVEIDAGHDFNSAWADINRAVRILRPGGVIFGHDYFTAADNRGVRRAVNLFAEINRLKVKTDGQHWVIDSVKVN

SEQ ID NO: 24027 - protein, 307 aa, Arabidopsis thaliana
  peptide (1)..(307): Ceres Seq. ID no. 12422568
  misc_feature (1)..(306): Homolog of NCBI NO: 15223338 NR Description: hypothetical protein; protein id: At1g01180.1
MKEDRRLPHKRDAFQFLKTKAAYVIVIVLTYAFGYFSAYHYHQPLQQQLPPSTRAVETTKPQVCSIDNFRVTTPCGNLVPPELIRQTVIDRIFNGTSPYIDFPPPHAKKFLRPKRIKGWGSYGAVFENLIRRVKPKTIVEVGSFLGASAIHMANLTRRLGLEETQILCVDDFRGWPGFRDRFKDMALVNGDVLLIYQFMQNVVISDFSGSILPVPFSTGSALEKLCEWGVTADLVEIDAGHDFNSAWADINRAVRILRPGGVIFGHDYFTAADNRGVRRAVNLFAEINRLKVKTDGQHWVIDSVKVN

SEQ ID NO: 24028 - protein, 156 aa, Arabidopsis thaliana
  peptide (1)..(156): Ceres Seq. ID no. 12422569
  misc_feature (1)..(155): Homolog of NCBI NO: 15223338 NR Description: hypothetical protein; protein id: At1g01180.1
MANLTRRLGLEETQILCVDDFRGWPGFRDRFKDMALVNGDVLLIYQFMQNVVISDFSGSILPVPFSTGSALEKLCEWGVTADLVEIDAGHDFNSAWADINRAVRILRPGGVIFGHDYFTAADNRGVRRAVNLFAEINRLKVKTDGQHWVIDSVKVN

SEQ ID NO: 24029 - DNA, 1606 bp, Arabidopsis thaliana
  misc_feature (1)..(1606): Ceres Seq. ID no. 12394717
  misc_feature: MA Experiment ID: 108434 Result: Down-regulated in Transcription
  misc_feature: MA Experiment 108434 PARAMETER Experiment Name: At_Root_Tips_cDNA_P Parameter: Tissue Value: Root Tips
  misc_feature: MA Experiment ID: 108461 Result: Down-regulated in Transcription
  misc_feature: MA Experiment 108461 PARAMETER Experiment Name: At_Germinating_Seeds_cDNA_P Parameter: Age (day) Value: 1 vs. 0
  misc_feature: MA Experiment 108461 PARAMETER Experiment Name: At_Germinating_Seeds_cDNA_P Parameter: Tissue Value: Germinating Seeds
  misc_feature: MA Experiment ID: 108463 Result: Up-regulated in Transcription
  misc_feature: MA Experiment 108463 PARAMETER Experiment Name: At_Germinating_Seeds_cDNA_P Parameter: Age (day) Value: 3 vs. 0
  misc_feature: MA Experiment 108463 PARAMETER Experiment Name: At_Germinating_Seeds_cDNA_P Parameter: Tissue Value: Germinating Seeds
  misc_feature: MA Experiment ID: 108464 Result: Up-regulated in Transcription
  misc_feature: MA Experiment 108464 PARAMETER Experiment Name: At_Germinating_Seeds_cDNA_P Parameter: Age (day) Value: 4 vs. 0
  misc_feature: MA Experiment 108464 PARAMETER Experiment Name: At_Germinating_Seeds_cDNA_P Parameter: Tissue Value: Germinating Seeds
  misc_feature: MA Experiment ID: 108488 Result: Down-regulated in Transcription
  misc_feature: MA Experiment ID: 108573 Result: Up-regulated in Transcription
  misc_feature: MA Experiment 108573 PARAMETER Experiment Name: At_Drought_cDNA_P Parameter: Timepoint (hr) Value: 6
  misc_feature: MA Experiment 108573 PARAMETER Experiment Name: At_Drought_cDNA_P Parameter: Tissue Value: Aerial
  misc_feature: MA Experiment 108573 PARAMETER Experiment Name: At_Drought_cDNA_P Parameter: Treatment Value: Drought vs. No Drought
  misc_feature: MA Experiment ID: 108579 Result: Up-regulated in Transcription
  misc_feature: MA Experiment 108579 PARAMETER Experiment Name: At_4deg_Cold_cDNA_P Parameter: Temperature (deg C) Value: 4 vs. 22
  misc_feature: MA Experiment 108579 PARAMETER Experiment Name: At_4deg_Cold_cDNA_P Parameter: Timepoint (hr) Value: 6
  misc_feature: MA Experiment 108579 PARAMETER Experiment Name: At_4deg_Cold_cDNA_P Parameter: Tissue Value: Aerial
  misc_feature: MA Experiment ID: 108668 Result: Up-regulated in Transcription
  misc_feature: MA Experiment 108668 PARAMETER Experiment Name: At_2mM_SA_cDNA_P Parameter: Plant Line Value: WS
  misc_feature: MA Experiment 108668 PARAMETER Experiment Name: At_2mM_SA_cDNA_P Parameter: Timepoint (hr) Value: 6
  misc_feature: MA Experiment 108668 PARAMETER Experiment Name: At_2mM_SA_cDNA_P Parameter: Treatment Value: 2mM SA vs. No Treatment
  misc_feature: MA Experiment ID: 20000070 Result: Up-regulated in Transcription
  misc_feature: MA Experiment 20000070 PARAMETER Experiment Name: At_100uM_ABA_Mutants_cDNA_P Parameter: Plant Line Value: CS24
  misc_feature: MA Experiment 20000070 PARAMETER Experiment Name: At_100uM_ABA_Mutants_cDNA_P Parameter: Timepoint (hr) Value: 6
  misc_feature: MA Experiment 20000070 PARAMETER Experiment Name: At_100uM_ABA_Mutants_cDNA_P Parameter: Tissue Value: Aerial
  misc_feature: MA Experiment 20000070 PARAMETER Experiment Name: At_100uM_ABA_Mutants_cDNA_P Parameter: Treatment Value: 100uM ABA vs. No Treatment
  misc_feature: MA Experiment ID: 20000071 Result: Up-regulated in Transcription
  misc_feature: MA Experiment 20000071 PARAMETER Experiment Name: At_100uM_ABA_Mutants_cDNA_P Parameter: Plant Line Value: CS8104
  misc_feature: MA Experiment 20000071 PARAMETER Experiment Name: At_100uM_ABA_Mutants_cDNA_P Parameter: Timepoint (hr) Value: 6
  misc_feature: MA Experiment 20000071 PARAMETER Experiment Name: At_100uM_ABA_Mutants_cDNA_P Parameter: Tissue Value: Aerial
  misc_feature: MA Experiment 20000071 PARAMETER Experiment Name: At_100uM_ABA_Mutants_cDNA_P Parameter: Treatment Value: 100uM ABA vs. No Treatment
  misc_feature: MA Experiment ID: 20000072 Result: Up-regulated in Transcription
  misc_feature: MA Experiment 20000072 PARAMETER Experiment Name: At_100uM_ABA_Mutants_cDNA_P Parameter: Plant Line Value: CS8105
  misc_feature: MA Experiment 20000072 PARAMETER Experiment Name: At_100uM_ABA_Mutants_cDNA_P Parameter: Timepoint (hr) Value: 6
  misc_feature: MA Experiment 20000072 PARAMETER Experiment Name: At_100uM_ABA_Mutants_cDNA_P Parameter: Tissue Value: Aerial
  misc_feature: MA Experiment 20000072 PARAMETER Experiment Name: At_100uM_ABA_Mutants_cDNA_P Parameter: Treatment Value: 100uM ABA vs. No Treatment
  misc_feature: MA Experiment ID: 20000086 Result: Up-regulated in Transcription
  misc_feature: MA Experiment 20000086 PARAMETER Experiment Name: At_100uM_ABA_Mutants_cDNA_P Parameter: Plant Line Value: CS22
  misc_feature: MA Experiment 20000086 PARAMETER Experiment Name: At_100uM_ABA_Mutants_cDNA_P Parameter: Timepoint (hr) Value: 6
  misc_feature: MA Experiment 20000086 PARAMETER Experiment Name: At_100uM_ABA_Mutants_cDNA_P Parameter: Tissue Value: Aerial
  misc_feature: MA Experiment 20000086 PARAMETER Experiment Name: At_100uM_ABA_Mutants_cDNA_P Parameter: Treatment Value: 100uM ABA vs. No Treatment
  misc_feature: MA Experiment ID: 20000087 Result: Up-regulated in Transcription
  misc_feature: MA Experiment 20000087 PARAMETER Experiment Name: At_100uM_ABA_Mutants_cDNA_P Parameter: Plant Line Value: WS
  misc_feature: MA Experiment 20000087 PARAMETER Experiment Name: At_100uM_ABA_Mutants_cDNA_P Parameter: Timepoint (hr) Value: 6
  misc_feature: MA Experiment 20000087 PARAMETER Experiment Name: At_100uM_ABA_Mutants_cDNA_P Parameter: Tissue Value: Aerial
  misc_feature: MA Experiment 20000087 PARAMETER Experiment Name: At_100uM_ABA_Mutants_cDNA_P Parameter: Treatment Value: 100uM ABA vs. No Treatment
  misc_feature: MA Experiment ID: 20000090 Result: Up-regulated in Transcription
  misc_feature: MA Experiment ID: 20000112 Result: Up-regulated in Transcription
  misc_feature: MA Experiment 20000112 PARAMETER Experiment Name: At_42deg_Heat_cDNA_P Parameter: Temperature (deg C) Value: 42 vs. 22
  misc_feature: MA Experiment 20000112 PARAMETER Experiment Name: At_42deg_Heat_cDNA_P Parameter: Timepoint (hr) Value: 2
  misc_feature: MA Experiment 20000112 PARAMETER Experiment Name: At_42deg_Heat_cDNA_P Parameter: Tissue Value: Aerial
  misc_feature: MA Experiment ID: 20000117 Result: Up-regulated in Transcription
  misc_feature: MA Experiment 20000117 PARAMETER Experiment Name: At_100uM_ABA_Mutants_cDNA_P Parameter: Plant Line Value: Columbia
  misc_feature: MA Experiment 20000117 PARAMETER Experiment Name: At_100uM_ABA_Mutants_cDNA_P Parameter: Timepoint (hr) Value: 6
  misc_feature: MA Experiment 20000117 PARAMETER Experiment Name: At_100uM_ABA_Mutants_cDNA_P Parameter: Tissue Value: Aerial
  misc_feature: MA Experiment 20000117 PARAMETER Experiment Name: At_100uM_ABA_Mutants_cDNA_P Parameter: Treatment Value: 100uM ABA vs. No Treatment
  misc_feature: MA Experiment ID: 20000182 Result: Up-regulated in Transcription
  misc_feature: MA Experiment 20000182 PARAMETER Experiment Name: At_2mM_SA_P Parameter: Age (day) Value: 14
  misc_feature: MA Experiment 20000182 PARAMETER Experiment Name: At_2mM_SA_P Parameter: Organism Value: A. thaliana
  misc_feature: MA Experiment 20000182 PARAMETER Experiment Name: At_2mM_SA_P Parameter: Plant Line Value: WS
  misc_feature: MA Experiment 20000182 PARAMETER Experiment Name: At_2mM_SA_P Parameter: Timepoint (hr) Value: 6
  misc_feature: MA Experiment 20000182 PARAMETER Experiment Name: At_2mM_SA_P Parameter: Tissue Value: Aerial
  misc_feature: MA Experiment 20000182 PARAMETER Experiment Name: At_2mM_SA_P Parameter: Treatment Value: 2mM SA vs. No Treatment
  misc_feature: MA Experiment ID: 20000234 Result: Down-regulated in Transcription
  misc_feature: MA Experiment 20000234 PARAMETER Experiment Name: At_Siliques_P Parameter: Age (day) Value: 21
  misc_feature: MA Experiment 20000234 PARAMETER Experiment Name: At_Siliques_P Parameter: Organism Value: A. thaliana
  misc_feature: MA Experiment 20000234 PARAMETER Experiment Name: At_Siliques_P Parameter: Plant Line Value: WS
  misc_feature: MA Experiment 20000234 PARAMETER Experiment Name: At_Siliques_P Parameter: Tissue Value: Less Than 5mm Siliques vs. Whole Plant
  misc_feature: MA Experiment ID: 20000235 Result: Down-regulated in Transcription
  misc_feature: MA Experiment 20000235 PARAMETER Experiment Name: At_Siliques_P Parameter: Age (day) Value: 21
  misc_feature: MA Experiment 20000235 PARAMETER Experiment Name: At_Siliques_P Parameter: Organism Value: A. thaliana
  misc_feature: MA Experiment 20000235 PARAMETER Experiment Name: At_Siliques_P Parameter: Plant Line Value: WS
  misc_feature: MA Experiment 20000235 PARAMETER Experiment Name: At_Siliques_P Parameter: Tissue Value: 5-10mm Siliques vs. Whole Plant
  misc_feature: MA Experiment ID: 20000264 Result: Down-regulated in Transcription
  misc_feature: MA Experiment 20000264 PARAMETER Experiment Name: At_Open_Flower_P Parameter: Age (day) Value: 21
  misc_feature: MA Experiment 20000264 PARAMETER Experiment Name: At_Open_Flower_P Parameter: Plant Line Value: WS
  misc_feature: MA Experiment 20000264 PARAMETER Experiment Name: At_Open_Flower_P Parameter: Tissue Value: Open Flower vs. Whole Plant
  misc_feature: MA Experiment ID: 20000265 Result: Down-regulated in Transcription
  misc_feature: MA Experiment 20000265 PARAMETER Experiment Name: At_Open_Flower_P Parameter: Age (day) Value: 21
  misc_feature: MA Experiment 20000265 PARAMETER Experiment Name: At_Open_Flower_P Parameter: Plant Line Value: WS
  misc_feature: MA Experiment 20000265 PARAMETER Experiment Name: At_Open_Flower_P Parameter: Tissue Value: Closed Flower vs. Whole Plant
  misc_feature: MA Experiment ID: 20000286 Result: Down-regulated in Transcription
  misc_feature: MA Experiment 20000286 PARAMETER Experiment Name: At_Open_Flower_P Parameter: Age (day) Value: 21
  misc_feature: MA Experiment 20000286 PARAMETER Experiment Name: At_Open_Flower_P Parameter: Plant Line Value: WS
  misc_feature: MA Experiment 20000286 PARAMETER Experiment Name: At_Open_Flower_P Parameter: Tissue Value: Half Open vs. Whole Plant
  misc_feature: MA Experiment ID: 20000437 Result: Up-regulated in Transcription
  misc_feature: MA Experiment 20000437 PARAMETER Experiment Name: At_Drought_P Parameter: Age (day) Value: 8
  misc_feature: MA Experiment 20000437 PARAMETER Experiment Name: At_Drought_P Parameter: Organism Value: A. thaliana
  misc_feature: MA Experiment 20000437 PARAMETER Experiment Name: At_Drought_P Parameter: Plant Line Value: WS
  misc_feature: MA Experiment 20000437 PARAMETER Experiment Name: At_Drought_P Parameter: Timepoint (hr) Value: 24
  misc_feature: MA Experiment 20000437 PARAMETER Experiment Name: At_Drought_P Parameter: Tissue Value: Whole Plant
  misc_feature: MA Experiment 20000437 PARAMETER Experiment Name: At_Drought_P Parameter: Treatment Value: Drought vs. No Drought
  misc_feature: MA Experiment ID: 20000438 Result: Down-regulated in Transcription
  misc_feature: MA Experiment 20000438 PARAMETER Experiment Name: At_Shoots__P Parameter: Age (day) Value: 14
  misc_feature: MA Experiment 20000438 PARAMETER Experiment Name: At_Shoots__P Parameter: Tissue Value: Shoots vs. Whole Plant
  misc_feature: MA Experiment ID: 20000495 Result: Down-regulated in Transcription
  misc_feature: MA Experiment 20000495 PARAMETER Experiment Name: At_Guard_Cells_P Parameter: Harvest Date Value: 8/2/2002
  misc_feature: MA Experiment 20000495 PARAMETER Experiment Name: At_Guard_Cells_P Parameter: Organism Value: A. thaliana
  misc_feature: MA Experiment 20000495 PARAMETER Experiment Name: At_Guard_Cells_P Parameter: Tissue Value: Guard Cells vs. Leaves
  misc_feature: MA Experiment ID: 20000794 Result: Down-regulated in Transcription
  misc_feature: MA Experiment 20000794 PARAMETER Experiment Name: At_Petals_P Parameter: Age (day) Value: 23-25 days
  misc_feature: MA Experiment 20000794 PARAMETER Experiment Name: At_Petals_P Parameter: Plant Line Value: WS
  misc_feature: MA Experiment 20000794 PARAMETER Experiment Name: At_Petals_P Parameter: Tissue Value: Petals vs. Whole plant
  misc_feature: MA Experiment ID: 20001247 Result: Up-regulated in Transcription
  misc_feature: MA Experiment 20001247 PARAMETER Experiment Name: At_Far-red-induction_P Parameter: Age (day) Value: 7
  misc_feature: MA Experiment 20001247 PARAMETER Experiment Name: At_Far-red-induction_P Parameter: Light Value: Far-red vs. White
  misc_feature: MA Experiment 20001247 PARAMETER Experiment Name: At_Far-red-induction_P Parameter: Organism Value: A. thaliana
  misc_feature: MA Experiment 20001247 PARAMETER Experiment Name: At_Far-red-induction_P Parameter: Plant Line Value: Columbia
  misc_feature: MA Experiment 20001247 PARAMETER Experiment Name: At_Far-red-induction_P Parameter: Timepoint (hr) Value: 1
  misc_feature: MA Experiment 20001247 PARAMETER Experiment Name: At_Far-red-induction_P Parameter: Tissue Value: Whole Plant
  misc_feature: MA Experiment ID: 20001248 Result: Up-regulated in Transcription
  misc_feature: MA Experiment 20001248 PARAMETER Experiment Name: At_Far-red-induction_P Parameter: Age (day) Value: 7
  misc_feature: MA Experiment 20001248 PARAMETER Experiment Name: At_Far-red-induction_P Parameter: Light Value: Far-red vs. White
  misc_feature: MA Experiment 20001248 PARAMETER Experiment Name: At_Far-red-induction_P Parameter: Organism Value: A. thaliana
  misc_feature: MA Experiment 20001248 PARAMETER Experiment Name: At_Far-red-induction_P Parameter: Plant Line Value: Columbia
  misc_feature: MA Experiment 20001248 PARAMETER Experiment Name: At_Far-red-induction_P Parameter: Timepoint (hr) Value: 4
  misc_feature: MA Experiment 20001248 PARAMETER Experiment Name: At_Far-red-induction_P Parameter: Tissue Value: Whole Plant
  misc_feature: MA Experiment ID: 20001757 Result: Down-regulated in Transcription
  misc_feature: MA Experiment 20001757 PARAMETER Experiment Name: At_50mM_NH4NO3_L-to-H_P Parameter: Timepoint (hr) Value: 6
  misc_feature: MA Experiment 20001757 PARAMETER Experiment Name: At_50mM_NH4NO3_L-to-H_P Parameter: Tissue Value: Leaf
  misc_feature: MA Experiment 20001757 PARAMETER Experiment Name: At_50mM_NH4NO3_L-to-H_P Parameter: Treatment Value: 50mM NH4NO3 vs 100mM Mannitol
agttttatcctctttttcatttcaagatcaatttcataaaaaagtttccttttttagcgaatcctctgttttagaaatcttaaagttgtctcctttattaaagaccatcatgtcttccacttctttcaccgaccttcttggttcttccggcgttgactgttacgaagatgatgaagacttgagagtttctgggtcgagttttggtgggtactatccagagagaaccgggtctggtttacctaagttcaagacggctcaaccaccacctcttccgatttcacaatcttctcataacttcactttctccgattaccttgattctcctctgcttctcagctcctcacacagtttgatatctccaacaacaggaacgtttccattgcaaggctttaatggaacaacaaacaatcactcagattttccctggcagctacaatctcaaccatcaaacgcttcttctgctttgcaagaaacatatggtgttcaagatcacgagaagaagcaggagatgattcctaatgagattgcaacacaaaacaacaatcaaagttttggaacagaacgtcagataaagataccagcatacatggtgagtaggaactctaatgatggttatggttggagaaaatacggtcagaaacaagtgaagaagagcgaaaaccctaggagttacttcaagtgtacgtatcctgattgtgtttccaagaagattgttgagacggcttctgatggacagatcactgagatcatttataaaggtggtcataatcatcctaagcctgagttcaccaagagaccatctcaatcttcattaccatcatcggttaatgggaggcgcttgtttaatcctgcttctgttgttagtgaacctcatgatcaatcagagaactcttcgatttcgtttgactatagtgatcttgagcagaaaagttttaaatcagagtatggtgagatagatgaagaggaggaacaacctgagatgaagaggatgaaaagagaaggtgaagatgaagggatgtctatagaagtaagcaaaggagttaaagagccaagagttgtggttcagacaataagtgatattgatgttcttatagatggctttagatggaggaaatatggtcaaaaagttgtcaaaggaaatactaatccaaggagctactacaagtgcacattccaaggttgtggagtgaagaagcaagtggaaagatccgcagcagacgagagagcagttctcactacctatgaaggaagacacaatcacgatatcccaaccgcgctacgtcgctcgtgaaattattgggacttagtcactagtaatatgatttaggctttctaaaaacaaaaaatcttactatggcttatcttttgtgctcattcacagtttgtttatttgtttgttacacagtcaatactttgttttgtacagagtggtgcttagtagtgtttttattattatcttggccttatagaataacctctcttctcatctgtgtgactttaaacacttgagagtccattttatagttcttgtgtattggtcttttgtttgatttatgtacatttttaatattcaaatttgataaagcaataataatggtttgtaacc

SEQ ID NO: 24030 - protein, 429 aa, Arabidopsis thaliana
  peptide (1)..(429): Ceres Seq. ID no. 12394718
  misc_feature (201)..(259): Pfam Name: WRKY DNA -binding domain Pfam Description: WRKY DNA -binding domain
  misc_feature (142)..(429): Homolog of NCBI NO: 5917653 NR Description: zinc-finger type transcription factor WRKY1
  misc_feature (142)..(429): Homolog of NCBI NO: 7488948 NR Description: DNA-binding protein WRKY1 - parsley
  misc_feature (64)..(198): Homolog of NCBI NO: 3420906 NR Description: zinc finger protein; WRKY1 [Pimpinella
  misc_feature (170)..(429): Homolog of NCBI NO: 3420906 NR Description: zinc finger protein; WRKY1 [Pimpinella
  misc_feature (38)..(158): Homolog of NCBI NO: 34484314 NR Description: WRKY-type transcription factor [Solanum chacoense]
  misc_feature (167)..(429): Homolog of NCBI NO: 34484314 NR Description: WRKY-type transcription factor [Solanum chacoense]
  misc_feature (40)..(184): Homolog of NCBI NO: 1076685 NR Description: SPF1 protein - sweet potato
  misc_feature (199)..(425): Homolog of NCBI NO: 1076685 NR Description: SPF1 protein - sweet potato
  misc_feature (43)..(429): Homolog of NCBI NO: 21954082 NR Description: putative WRKY-type DNA binding protein
  misc_feature (37)..(429): Homolog of NCBI NO: 15227728 NR Description: WRKY family transcription factor
VLSSFSFQDQFHKKVSFFSESSVLEILKLSPLLKTIMSSTSFTDLLGSSGVDCYEDDEDLRVSGSSFGGYYPERTGSGLPKFKTAQPPPLPISQSSHNFTFSDYLDSPLLLSSSHSLISPTTGTFPLQGFNGTTNNHSDFPWQLQSQPSNASSALQETYGVQDHEKKQEMIPNEIATQNNNQSFGTERQIKIPAYMVSRNSNDGYGWRKYGQKQVKKSENPRSYFKCTYPDCVSKKIVETASDGQITEIIYKGGHNHPKPEFTKRPSQSSLPSSVNGRRLFNPASVVSEPHDQSENSSISFDYSDLEQKSFKSEYGEIDEEEEQPEMKRMKREGEDEGMSIEVSKGVKEPRVVVQTISDIDVLIDGFRWRKYGQKVVKGNTNPRSYYKCTFQGCGVKKQVERSAADERAVLTTYEGRHNHDIPTALRRS

SEQ ID NO: 24031 - protein, 393 aa, Arabidopsis thaliana
  peptide (1)..(393): Ceres Seq. ID no. 12394719
  misc_feature (165)..(223): Pfam Name: WRKY DNA -binding domain Pfam Description: WRKY DNA -binding domain
  misc_feature (2)..(122): Homolog of NCBI NO: 34484314 NR Description: WRKY-type transcription factor [Solanum chacoense]
  misc_feature (131)..(393): Homolog of NCBI NO: 34484314 NR Description: WRKY-type transcription factor [Solanum chacoense]
  misc_feature (4)..(148): Homolog of NCBI NO: 1076685 NR Description: SPF1 protein - sweet potato
  misc_feature (28)..(162): Homolog of NCBI NO: 3420906 NR Description: zinc finger protein; WRKY1 [Pimpinella
  misc_feature (106)..(393): Homolog of NCBI NO: 5917653 NR Description: zinc-finger type transcription factor WRKY1
  misc_feature (106)..(393): Homolog of NCBI NO: 7488948 NR Description: DNA-binding protein WRKY1 - parsley
  misc_feature (134)..(393): Homolog of NCBI NO: 3420906 NR Description: zinc finger protein; WRKY1 [Pimpinella
  misc_feature (163)..(389): Homolog of NCBI NO: 1076685 NR Description: SPF1 protein - sweet potato
  misc_feature (7)..(393): Homolog of NCBI NO: 21954082 NR Description: putative WRKY-type DNA binding protein
  misc_feature (1)..(393): Homolog of NCBI NO: 15227728 NR Description: WRKY family transcription factor
MSSTSFTDLLGSSGVDCYEDDEDLRVSGSSFGGYYPERTGSGLPKFKTAQPPPLPISQSSHNFTFSDYLDSPLLLSSSHSLISPTTGTFPLQGFNGTTNNHSDFPWQLQSQPSNASSALQETYGVQDHEKKQEMIPNEIATQNNNQSFGTERQIKIPAYMVSRNSNDGYGWRKYGQKQVKKSENPRSYFKCTYPDCVSKKIVETASDGQITEIIYKGGHNHPKPEFTKRPSQSSLPSSVNGRRLFNPASVVSEPHDQSENSSISFDYSDLEQKSFKSEYGEIDEEEEQPEMKRMKREGEDEGMSIEVSKGVKEPRVVVQTISDIDVLIDGFRWRKYGQKVVKGNTNPRSYYKCTFQGCGVKKQVERSAADERAVLTTYEGRHNHDIPTALRRS

SEQ ID NO: 24032 - protein, 260 aa, Arabidopsis thaliana
  peptide (1)..(260): Ceres Seq. ID no. 12394720
  misc_feature (32)..(90): Pfam Name: WRKY DNA -binding domain Pfam Description: WRKY DNA -binding domain
  misc_feature (1)..(260): Homolog of NCBI NO: 5360683 NR Description: NtWRKY1 [Nicotiana tabacum]
  misc_feature (1)..(260): Homolog of NCBI NO: 5917653 NR Description: zinc-finger type transcription factor WRKY1
  misc_feature (1)..(260): Homolog of NCBI NO: 7488948 NR Description: DNA-binding protein WRKY1 - parsley
  misc_feature (1)..(29): Homolog of NCBI NO: 3420906 NR Description: zinc finger protein; WRKY1 [Pimpinella
  misc_feature (1)..(260): Homolog of NCBI NO: 3420906 NR Description: zinc finger protein; WRKY1 [Pimpinella
  misc_feature (1)..(260): Homolog of NCBI NO: 34484314 NR Description: WRKY-type transcription factor [Solanum chacoense]
  misc_feature (1)..(15): Homolog of NCBI NO: 1076685 NR Description: SPF1 protein - sweet potato
  misc_feature (30)..(256): Homolog of NCBI NO: 1076685 NR Description: SPF1 protein - sweet potato
  misc_feature (1)..(260): Homolog of NCBI NO: 21954082 NR Description: putative WRKY-type DNA binding protein
  misc_feature (1)..(260): Homolog of NCBI NO: 15227728 NR Description: WRKY family transcription factor
MIPNEIATQNNNQSFGTERQIKIPAYMVSRNSNDGYGWRKYGQKQVKKSENPRSYFKCTYPDCVSKKIVETASDGQITEIIYKGGHNHPKPEFTKRPSQSSLPSSVNGRRLFNPASVVSEPHDQSENSSISFDYSDLEQKSFKSEYGEIDEEEEQPEMKRMKREGEDEGMSIEVSKGVKEPRVVVQTISDIDVLIDGFRWRKYGQKVVKGNTNPRSYYKCTFQGCGVKKQVERSAADERAVLTTYEGRHNHDIPTALRRS

SEQ ID NO: 24033 - DNA, 1418 bp, Arabidopsis thaliana
  misc_feature (1)..(1418): Ceres Seq. ID no. 12371508
  misc_feature: MA Experiment ID: 108434 Result: Up-regulated in Transcription
  misc_feature: MA Experiment 108434 PARAMETER Experiment Name: At_Root_Tips_cDNA_P Parameter: Tissue Value: Root Tips
  misc_feature: MA Experiment ID: 108435 Result: Up-regulated in Transcription
  misc_feature: MA Experiment 108435 PARAMETER Experiment Name: At_stm_Mutants_cDNA_P Parameter: Plant Line Value: wt Landsburg vs stm
  misc_feature: MA Experiment 108435 PARAMETER Experiment Name: At_stm_Mutants_cDNA_P Parameter: Tissue Value: Shoot Apical Meristem Region
  misc_feature: MA Experiment ID: 108461 Result: Up-regulated in Transcription
  misc_feature: MA Experiment 108461 PARAMETER Experiment Name: At_Germinating_Seeds_cDNA_P Parameter: Age (day) Value: 1 vs. 0
  misc_feature: MA Experiment 108461 PARAMETER Experiment Name: At_Germinating_Seeds_cDNA_P Parameter: Tissue Value: Germinating Seeds
  misc_feature: MA Experiment ID: 108463 Result: Down-regulated in Transcription
  misc_feature: MA Experiment 108463 PARAMETER Experiment Name: At_Germinating_Seeds_cDNA_P Parameter: Age (day) Value: 3 vs. 0
  misc_feature: MA Experiment 108463 PARAMETER Experiment Name: At_Germinating_Seeds_cDNA_P Parameter: Tissue Value: Germinating Seeds
  misc_feature: MA Experiment ID: 108464 Result: Down-regulated in Transcription
  misc_feature: MA Experiment 108464 PARAMETER Experiment Name: At_Germinating_Seeds_cDNA_P Parameter: Age (day) Value: 4 vs. 0
  misc_feature: MA Experiment 108464 PARAMETER Experiment Name: At_Germinating_Seeds_cDNA_P Parameter: Tissue Value: Germinating Seeds
  misc_feature: MA Experiment ID: 108474 Result: Down-regulated in Transcription
  misc_feature: MA Experiment 108474 PARAMETER Experiment Name: At_Drought_Flowers_cDNA_P Parameter: Timepoint (hr) Value: null
  misc_feature: MA Experiment 108474 PARAMETER Experiment Name: At_Drought_Flowers_cDNA_P Parameter: Treatment Value: Drought vs. No Drought
  misc_feature: MA Experiment ID: 108501 Result: Up-regulated in Transcription
  misc_feature: MA Experiment 108501 PARAMETER Experiment Name: At_ap2_floral_buds_cDNA_P Parameter: Plant Line Value: ap2 (Ler.)
  misc_feature: MA Experiment 108501 PARAMETER Experiment Name: At_ap2_floral_buds_cDNA_P Parameter: Tissue Value: Closed Flower
  misc_feature: MA Experiment ID: 108561 Result: Down-regulated in Transcription
  misc_feature: MA Experiment 108561 PARAMETER Experiment Name: At_100uM_ABA_cDNA_P Parameter: Timepoint (hr) Value: 6
  misc_feature: MA Experiment 108561 PARAMETER Experiment Name: At_100uM_ABA_cDNA_P Parameter: Tissue Value: Aerial
  misc_feature: MA Experiment 108561 PARAMETER Experiment Name: At_100uM_ABA_cDNA_P Parameter: Treatment Value: 100uM ABA vs. No Treatment
  misc_feature: MA Experiment ID: 108595 Result: Up-regulated in Transcription
  misc_feature: MA Experiment 108595 PARAMETER Experiment Name: At_Ler-pi_Ovule_cDNA_P Parameter: Plant Line Value: null
  misc_feature: MA Experiment ID: 108605 Result: Down-regulated in Transcription
  misc_feature: MA Experiment 108605 PARAMETER Experiment Name: At_100uM_ABA_cDNA_P Parameter: Timepoint (hr) Value: 6
  misc_feature: MA Experiment 108605 PARAMETER Experiment Name: At_100uM_ABA_cDNA_P Parameter: Tissue Value: Aerial
  misc_feature: MA Experiment 108605 PARAMETER Experiment Name: At_100uM_ABA_cDNA_P Parameter: Treatment Value: 100uM ABA vs. No Treatment
  misc_feature: MA Experiment ID: 108668 Result: Down-regulated in Transcription
  misc_feature: MA Experiment 108668 PARAMETER Experiment Name: At_2mM_SA_cDNA_P Parameter: Plant Line Value: WS
  misc_feature: MA Experiment 108668 PARAMETER Experiment Name: At_2mM_SA_cDNA_P Parameter: Timepoint (hr) Value: 6
  misc_feature: MA Experiment 108668 PARAMETER Experiment Name: At_2mM_SA_cDNA_P Parameter: Treatment Value: 2mM SA vs. No Treatment
  misc_feature: MA Experiment ID: 20000111 Result: Down-regulated in Transcription
  misc_feature: MA Experiment 20000111 PARAMETER Experiment Name: At_42deg_Heat_cDNA_P Parameter: Temperature (deg C) Value: 42 vs. 22
  misc_feature: MA Experiment 20000111 PARAMETER Experiment Name: At_42deg_Heat_cDNA_P Parameter: Timepoint (hr) Value: 6
  misc_feature: MA Experiment 20000111 PARAMETER Experiment Name: At_42deg_Heat_cDNA_P Parameter: Tissue Value: Aerial
  misc_feature: MA Experiment ID: 20000117 Result: Down-regulated in Transcription
  misc_feature: MA Experiment 20000117 PARAMETER Experiment Name: At_100uM_ABA_Mutants_cDNA_P Parameter: Plant Line Value: Columbia
  misc_feature: MA Experiment 20000117 PARAMETER Experiment Name: At_100uM_ABA_Mutants_cDNA_P Parameter: Timepoint (hr) Value: 6
  misc_feature: MA Experiment 20000117 PARAMETER Experiment Name: At_100uM_ABA_Mutants_cDNA_P Parameter: Tissue Value: Aerial
  misc_feature: MA Experiment 20000117 PARAMETER Experiment Name: At_100uM_ABA_Mutants_cDNA_P Parameter: Treatment Value: 100uM ABA vs. No Treatment
  misc_feature: MA Experiment ID: 20000144 Result: Down-regulated in Transcription
  misc_feature: MA Experiment 20000144 PARAMETER Experiment Name: At_42deg_Heat_cDNA_P Parameter: Temperature (deg C) Value: 42 vs. 22
  misc_feature: MA Experiment 20000144 PARAMETER Experiment Name: At_42deg_Heat_cDNA_P Parameter: Timepoint (hr) Value: 1
  misc_feature: MA Experiment 20000144 PARAMETER Experiment Name: At_42deg_Heat_cDNA_P Parameter: Tissue Value: Aerial
  misc_feature: MA Experiment ID: 20000173 Result: Down-regulated in Transcription
  misc_feature: MA Experiment 20000173 PARAMETER Experiment Name: At_42deg_Heat_P Parameter: Age (day) Value: 14
  misc_feature: MA Experiment 20000173 PARAMETER Experiment Name: At_42deg_Heat_P Parameter: Organism Value: A. thaliana
  misc_feature: MA Experiment 20000173 PARAMETER Experiment Name: At_42deg_Heat_P Parameter: Plant Line Value: WS
  misc_feature: MA Experiment 20000173 PARAMETER Experiment Name: At_42deg_Heat_P Parameter: Temperature (deg C) Value: 42 vs. 22
  misc_feature: MA Experiment 20000173 PARAMETER Experiment Name: At_42deg_Heat_P Parameter: Timepoint (hr) Value: 6
  misc_feature: MA Experiment 20000173 PARAMETER Experiment Name: At_42deg_Heat_P Parameter: Tissue Value: Aerial
  misc_feature: MA Experiment ID: 20000180 Result: Up-regulated in Transcription
  misc_feature: MA Experiment 20000180 PARAMETER Experiment Name: At_Germinating_Seeds_P Parameter: Age (hr) Value: 24 vs. 0
  misc_feature: MA Experiment 20000180 PARAMETER Experiment Name: At_Germinating_Seeds_P Parameter: Tissue Value: Germinating Seeds
  misc_feature: MA Experiment ID: 20000184 Result: Up-regulated in Transcription
  misc_feature: MA Experiment 20000184 PARAMETER Experiment Name: At_Shoots__P Parameter: Age (day) Value: 7
  misc_feature: MA Experiment 20000184 PARAMETER Experiment Name: At_Shoots__P Parameter: Tissue Value: Shoots vs. Whole Plant
  misc_feature: MA Experiment ID: 20000227 Result: Up-regulated in Transcription
  misc_feature: MA Experiment 20000227 PARAMETER Experiment Name: At_Root-Tips-vs-Tops_P Parameter: Tissue Value: Root Tips vs. Root Tops
  misc_feature: MA Experiment ID: 20000234 Result: Up-regulated in Transcription
  misc_feature: MA Experiment 20000234 PARAMETER Experiment Name: At_Siliques_P Parameter: Age (day) Value: 21
  misc_feature: MA Experiment 20000234 PARAMETER Experiment Name: At_Siliques_P Parameter: Organism Value: A. thaliana
  misc_feature: MA Experiment 20000234 PARAMETER Experiment Name: At_Siliques_P Parameter: Plant Line Value: WS
  misc_feature: MA Experiment 20000234 PARAMETER Experiment Name: At_Siliques_P Parameter: Tissue Value: Less Than 5mm Siliques vs. Whole Plant
  misc_feature: MA Experiment ID: 20000264 Result: Up-regulated in Transcription
  misc_feature: MA Experiment 20000264 PARAMETER Experiment Name: At_Open_Flower_P Parameter: Age (day) Value: 21
  misc_feature: MA Experiment 20000264 PARAMETER Experiment Name: At_Open_Flower_P Parameter: Plant Line Value: WS
  misc_feature: MA Experiment 20000264 PARAMETER Experiment Name: At_Open_Flower_P Parameter: Tissue Value: Open Flower vs. Whole Plant
  misc_feature: MA Experiment ID: 20000265 Result: Up-regulated in Transcription
  misc_feature: MA Experiment 20000265 PARAMETER Experiment Name: At_Open_Flower_P Parameter: Age (day) Value: 21
  misc_feature: MA Experiment 20000265 PARAMETER Experiment Name: At_Open_Flower_P Parameter: Plant Line Value: WS
  misc_feature: MA Experiment 20000265 PARAMETER Experiment Name: At_Open_Flower_P Parameter: Tissue Value: Closed Flower vs. Whole Plant
  misc_feature: MA Experiment ID: 20000286 Result: Up-regulated in Transcription
  misc_feature: MA Experiment 20000286 PARAMETER Experiment Name: At_Open_Flower_P Parameter: Age (day) Value: 21
  misc_feature: MA Experiment 20000286 PARAMETER Experiment Name: At_Open_Flower_P Parameter: Plant Line Value: WS
  misc_feature: MA Experiment 20000286 PARAMETER Experiment Name: At_Open_Flower_P Parameter: Tissue Value: Half Open vs. Whole Plant
  misc_feature: MA Experiment ID: 20000437 Result: Down-regulated in Transcription
  misc_feature: MA Experiment 20000437 PARAMETER Experiment Name: At_Drought_P Parameter: Age (day) Value: 8
  misc_feature: MA Experiment 20000437 PARAMETER Experiment Name: At_Drought_P Parameter: Organism Value: A. thaliana
  misc_feature: MA Experiment 20000437 PARAMETER Experiment Name: At_Drought_P Parameter: Plant Line Value: WS
  misc_feature: MA Experiment 20000437 PARAMETER Experiment Name: At_Drought_P Parameter: Timepoint (hr) Value: 24
  misc_feature: MA Experiment 20000437 PARAMETER Experiment Name: At_Drought_P Parameter: Tissue Value: Whole Plant
  misc_feature: MA Experiment 20000437 PARAMETER Experiment Name: At_Drought_P Parameter: Treatment Value: Drought vs. No Drought
  misc_feature: MA Experiment ID: 20000445 Result: Up-regulated in Transcription
  misc_feature: MA Experiment 20000445 PARAMETER Experiment Name: At_100uM_NAA__P Parameter: Age (day) Value: 14
  misc_feature: MA Experiment 20000445 PARAMETER Experiment Name: At_100uM_NAA__P Parameter: Organism Value: A. thaliana
  misc_feature: MA Experiment 20000445 PARAMETER Experiment Name: At_100uM_NAA__P Parameter: Plant Line Value: WS
  misc_feature: MA Experiment 20000445 PARAMETER Experiment Name: At_100uM_NAA__P Parameter: Timepoint (hr) Value: 6
  misc_feature: MA Experiment 20000445 PARAMETER Experiment Name: At_100uM_NAA__P Parameter: Tissue Value: Aerial
  misc_feature: MA Experiment 20000445 PARAMETER Experiment Name: At_100uM_NAA__P Parameter: Treatment Value: 100uM NAA vs. No Treatment
  misc_feature: MA Experiment ID: 20000495 Result: Up-regulated in Transcription
  misc_feature: MA Experiment 20000495 PARAMETER Experiment Name: At_Guard_Cells_P Parameter: Harvest Date Value: 8/2/2002
  misc_feature: MA Experiment 20000495 PARAMETER Experiment Name: At_Guard_Cells_P Parameter: Organism Value: A. thaliana
  misc_feature: MA Experiment 20000495 PARAMETER Experiment Name: At_Guard_Cells_P Parameter: Tissue Value: Guard Cells vs. Leaves
  misc_feature: MA Experiment ID: 20000794 Result: Up-regulated in Transcription
  misc_feature: MA Experiment 20000794 PARAMETER Experiment Name: At_Petals_P Parameter: Age (day) Value: 23-25 days
  misc_feature: MA Experiment 20000794 PARAMETER Experiment Name: At_Petals_P Parameter: Plant Line Value: WS
  misc_feature: MA Experiment 20000794 PARAMETER Experiment Name: At_Petals_P Parameter: Tissue Value: Petals vs. Whole plant
  misc_feature: MA Experiment ID: 20001248 Result: Up-regulated in Transcription
  misc_feature: MA Experiment 20001248 PARAMETER Experiment Name: At_Far-red-induction_P Parameter: Age (day) Value: 7
  misc_feature: MA Experiment 20001248 PARAMETER Experiment Name: At_Far-red-induction_P Parameter: Light Value: Far-red vs. White
  misc_feature: MA Experiment 20001248 PARAMETER Experiment Name: At_Far-red-induction_P Parameter: Organism Value: A. thaliana
  misc_feature: MA Experiment 20001248 PARAMETER Experiment Name: At_Far-red-induction_P Parameter: Plant Line Value: Columbia
  misc_feature: MA Experiment 20001248 PARAMETER Experiment Name: At_Far-red-induction_P Parameter: Timepoint (hr) Value: 4
  misc_feature: MA Experiment 20001248 PARAMETER Experiment Name: At_Far-red-induction_P Parameter: Tissue Value: Whole Plant
  misc_feature: MA Experiment ID: 20001450 Result: Up-regulated in Transcription
  misc_feature: MA Experiment 20001450 PARAMETER Experiment Name: At_Far-red-induction_P Parameter: Age (day) Value: 7
  misc_feature: MA Experiment 20001450 PARAMETER Experiment Name: At_Far-red-induction_P Parameter: Light Value: Far-red vs. White
  misc_feature: MA Experiment 20001450 PARAMETER Experiment Name: At_Far-red-induction_P Parameter: Organism Value: A. thaliana
  misc_feature: MA Experiment 20001450 PARAMETER Experiment Name: At_Far-red-induction_P Parameter: Plant Line Value: Columbia
  misc_feature: MA Experiment 20001450 PARAMETER Experiment Name: At_Far-red-induction_P Parameter: Timepoint (hr) Value: 8
  misc_feature: MA Experiment 20001450 PARAMETER Experiment Name: At_Far-red-induction_P Parameter: Tissue Value: Whole Plant
  misc_feature: MA Experiment ID: 20001451 Result: Up-regulated in Transcription
  misc_feature: MA Experiment 20001451 PARAMETER Experiment Name: At_Far-red-induction_P Parameter: Age (day) Value: 7
  misc_feature: MA Experiment 20001451 PARAMETER Experiment Name: At_Far-red-induction_P Parameter: Light Value: Far-red vs. White
  misc_feature: MA Experiment 20001451 PARAMETER Experiment Name: At_Far-red-induction_P Parameter: Organism Value: A. thaliana
  misc_feature: MA Experiment 20001451 PARAMETER Experiment Name: At_Far-red-induction_P Parameter: Plant Line Value: Columbia
  misc_feature: MA Experiment 20001451 PARAMETER Experiment Name: At_Far-red-induction_P Parameter: Timepoint (hr) Value: 24
  misc_feature: MA Experiment 20001451 PARAMETER Experiment Name: At_Far-red-induction_P Parameter: Tissue Value: Whole Plant
  misc_feature: MA Experiment ID: 20001555 Result: Down-regulated in Transcription
  misc_feature: MA Experiment 20001555 PARAMETER Experiment Name: At_Drought_Soil_Dry_P Parameter: Age (day) Value: 24
  misc_feature: MA Experiment 20001555 PARAMETER Experiment Name: At_Drought_Soil_Dry_P Parameter: Organism Value: A. thaliana
  misc_feature: MA Experiment 20001555 PARAMETER Experiment Name: At_Drought_Soil_Dry_P Parameter: Plant Line Value: WS
  misc_feature: MA Experiment 20001555 PARAMETER Experiment Name: At_Drought_Soil_Dry_P Parameter: Post Timepoint (hr) Value: None
  misc_feature: MA Experiment 20001555 PARAMETER Experiment Name: At_Drought_Soil_Dry_P Parameter: Post-Treatment Value: None
  misc_feature: MA Experiment 20001555 PARAMETER Experiment Name: At_Drought_Soil_Dry_P Parameter: Timepoint (day) Value: 10
  misc_feature: MA Experiment 20001555 PARAMETER Experiment Name: At_Drought_Soil_Dry_P Parameter: Treatment Value: Drought vs. No Drought
  misc_feature: MA Experiment ID: 20001556 Result: Down-regulated in Transcription
  misc_feature: MA Experiment 20001556 PARAMETER Experiment Name: At_Drought_Soil_Dry_P Parameter: Age (day) Value: 26
  misc_feature: MA Experiment 20001556 PARAMETER Experiment Name: At_Drought_Soil_Dry_P Parameter: Organism Value: A. thaliana
  misc_feature: MA Experiment 20001556 PARAMETER Experiment Name: At_Drought_Soil_Dry_P Parameter: Plant Line Value: WS
  misc_feature: MA Experiment 20001556 PARAMETER Experiment Name: At_Drought_Soil_Dry_P Parameter: Post Timepoint (hr) Value: None
  misc_feature: MA Experiment 20001556 PARAMETER Experiment Name: At_Drought_Soil_Dry_P Parameter: Post-Treatment Value: None
  misc_feature: MA Experiment 20001556 PARAMETER Experiment Name: At_Drought_Soil_Dry_P Parameter: Timepoint (day) Value: 12
  misc_feature: MA Experiment 20001556 PARAMETER Experiment Name: At_Drought_Soil_Dry_P Parameter: Treatment Value: Drought vs. No Drought
  misc_feature: MA Experiment ID: 20001770 Result: Up-regulated in Transcription
  misc_feature: MA Experiment 20001770 PARAMETER Experiment Name: At_Far-red-enriched-adult_P Parameter: Age (day) Value: 28
  misc_feature: MA Experiment 20001770 PARAMETER Experiment Name: At_Far-red-enriched-adult_P Parameter: Light Value: Far-red enriched vs. White
  misc_feature: MA Experiment 20001770 PARAMETER Experiment Name: At_Far-red-enriched-adult_P Parameter: Organism Value: A. thaliana
  misc_feature: MA Experiment 20001770 PARAMETER Experiment Name: At_Far-red-enriched-adult_P Parameter: Plant Line Value: Columbia
  misc_feature: MA Experiment 20001770 PARAMETER Experiment Name: At_Far-red-enriched-adult_P Parameter: Timepoint (hr) Value: 8
  misc_feature: MA Experiment 20001770 PARAMETER Experiment Name: At_Far-red-enriched-adult_P Parameter: Tissue Value: Aerial
  misc_feature: MA Experiment ID: 20001911 Result: Down-regulated in Transcription
  misc_feature: MA Experiment 20001911 PARAMETER Experiment Name: At_Drought_Reproduction_P Parameter: Age (day) Value: 40
  misc_feature: MA Experiment 20001911 PARAMETER Experiment Name: At_Drought_Reproduction_P Parameter: Organism Value: A. thaliana
  misc_feature: MA Experiment 20001911 PARAMETER Experiment Name: At_Drought_Reproduction_P Parameter: Plant Line Value: WS
  misc_feature: MA Experiment 20001911 PARAMETER Experiment Name: At_Drought_Reproduction_P Parameter: Timepoint (day) Value: 10
  misc_feature: MA Experiment 20001911 PARAMETER Experiment Name: At_Drought_Reproduction_P Parameter: Tissue Value: Flowers
  misc_feature: MA Experiment 20001911 PARAMETER Experiment Name: At_Drought_Reproduction_P Parameter: Treatment Value: Drought vs. No Drought
attccactcccactaaacattccttctctcgctcactcttctccaatccttattttattttttgaaagtttaaaattttatacaacatatcaatttggggtagaaaaattcgaaagaaatgaaagagatgggagtgatagtgcttcttctccttcactcgttcttctacgttgccttttgcttcaatgatggactactaccaaacggtgacttcgaactcggtccacgacattcggacatgaaaggaacacaagttatcaacataacagcaatcccaaactgggaactctcaggctttgtcgagtacattccctcaggacacaaacaaggcgacatgatccttgtcgtgcctaaaggcgcattcgcagtacgtctaggcaacgaagcctcaatcaaacaaaaaatcagcgttaagaaagggtcgtactattcgataacgttcagtgctgctcgaacatgcgcacaagacgagcggttaaacgtttccgtggctcctcaccatgcagtgatgccgatacaaacagtgtatagtagctcaggttgggatttgtattcgtgggcttttaaggcccaaagtgactatgcagatatagtgatacataatccaggtgttgaggaagatcctgcttgtggacctctcattgatggtgttgctatgcgagcccttttccctcctcgtcccaccaataagaacattctaaagaacggaggattcgaagaaggtccttgggttttaccaaacatatcatctggtgttttgattccaccaaactccatcgacgatcactctccgttacctggttggatggtcgagtctcttaaagctgtcaaatacatagattccgatcatttctccgttcctcaaggccgtcgcgccgtcgaactcgtcgccgggaaagaaagcgccgtcgcacaagttgtccgcactatccctggaaaaacctacgtcctatccttctctgtcggagatgctagcaacgcttgcgccggatcaatgatcgtcgaagctttcgccggaaaagacacgatcaaggtcccgtatgaatcgaaagggaaaggaggattcaagcgatcgtcattgagattcgtcgctgtctcgagtcggactagagttatgttctacagtacgttttacgcgatgagaaacgacgatttctcgagcttatgtggaccggtgatcgacgacgttaagcttctcagtgctcggaggccgtgagcttgcggcgacgagttgattcacgggacaatgaatgatgacagtcactgtgggtttctcgcgtctagtgagaaattgggcttttaggcccagtggcccactgtttttgttgttgttttaaagcttaatgttatttgacaaagaaaaaagaaattactctggtcaatcatatcgaaccgtgaaattttatgatcttgtgatt

SEQ ID NO: 24034 - protein, 365 aa, Arabidopsis thaliana
  peptide (1)..(365): Ceres Seq. ID no. 12371509
  misc_feature (41)..(363): Pfam Name: Protein of unknown function, DUF642 Pfam Description: Protein of unknown function, DUF642
  misc_feature (10)..(364): Homolog of NCBI NO: 7488741 NR Description: hypothetical protein precursor - alfalfa
  misc_feature (5)..(365): Homolog of NCBI NO: 7488898 NR Description: hypothetical protein - castor bean
  misc_feature (22)..(365): Homolog of NCBI NO: 15809822 NR Description: AT5g25460/F18G18_200 [Arabidopsis thaliana]
  misc_feature (22)..(365): Homolog of NCBI NO: 21537379 NR Description: unknown [Arabidopsis thaliana]
  misc_feature (22)..(365): Homolog of NCBI NO: 15239438 NR Description: putative protein
  misc_feature (4)..(365): Homolog of NCBI NO: 21554402 NR Description: unknown [Arabidopsis thaliana]
  misc_feature (4)..(365): Homolog of NCBI NO: 23397043 NR Description: unknown protein [Arabidopsis thaliana]
  misc_feature (4)..(365): Homolog of NCBI NO: 15239049 NR Description: putative protein
  misc_feature (41)..(365): Homolog of NCBI NO: 7486632 NR Description: hypothetical protein F8B4.160 - Arabidopsis
  misc_feature (1)..(365): Homolog of NCBI NO: 18418018 NR Description: putative protein
MKEMGVIVLLLLHSFFYVAFCFNDGLLPNGDFELGPRHSDMKGTQVINITAIPNWELSGFVEYIPSGHKQGDMILVVPKGAFAVRLGNEASIKQKISVKKGSYYSITFSAARTCAQDERLNVSVAPHHAVMPIQTVYSSSGWDLYSWAFKAQSDYADIVIHNPGVEEDPACGPLIDGVAMRALFPPRPTNKNILKNGGFEEGPWVLPNISSGVLIPPNSIDDHSPLPGWMVESLKAVKYIDSDHFSVPQGRRAVELVAGKESAVAQVVRTIPGKTYVLSFSVGDASNACAGSMIVEAFAGKDTIKVPYESKGKGGFKRSSLRFVAVSSRTRVMFYSTFYAMRNDDFSSLCGPVIDDVKLLSARRP

SEQ ID NO: 24035 - protein, 362 aa, Arabidopsis thaliana
  peptide (1)..(362): Ceres Seq. ID no. 12371510
  misc_feature (38)..(360): Pfam Name: Protein of unknown function, DUF642 Pfam Description: Protein of unknown function, DUF642
  misc_feature (7)..(361): Homolog of NCBI NO: 7488741 NR Description: hypothetical protein precursor - alfalfa
  misc_feature (2)..(362): Homolog of NCBI NO: 7488898 NR Description: hypothetical protein - castor bean
  misc_feature (19)..(362): Homolog of NCBI NO: 15809822 NR Description: AT5g25460/F18G18_200 [Arabidopsis thaliana]
  misc_feature (19)..(362): Homolog of NCBI NO: 21537379 NR Description: unknown [Arabidopsis thaliana]
  misc_feature (19)..(362): Homolog of NCBI NO: 15239438 NR Description: putative protein
  misc_feature (1)..(362): Homolog of NCBI NO: 21554402 NR Description: unknown [Arabidopsis thaliana]
  misc_feature (1)..(362): Homolog of NCBI NO: 23397043 NR Description: unknown protein [Arabidopsis thaliana]
  misc_feature (1)..(362): Homolog of NCBI NO: 15239049 NR Description: putative protein
  misc_feature (38)..(362): Homolog of NCBI NO: 7486632 NR Description: hypothetical protein F8B4.160 - Arabidopsis
  misc_feature (1)..(362): Homolog of NCBI NO: 18418018 NR Description: putative protein
MGVIVLLLLHSFFYVAFCFNDGLLPNGDFELGPRHSDMKGTQVINITAIPNWELSGFVEYIPSGHKQGDMILVVPKGAFAVRLGNEASIKQKISVKKGSYYSITFSAARTCAQDERLNVSVAPHHAVMPIQTVYSSSGWDLYSWAFKAQSDYADIVIHNPGVEEDPACGPLIDGVAMRALFPPRPTNKNILKNGGFEEGPWVLPNISSGVLIPPNSIDDHSPLPGWMVESLKAVKYIDSDHFSVPQGRRAVELVAGKESAVAQVVRTIPGKTYVLSFSVGDASNACAGSMIVEAFAGKDTIKVPYESKGKGGFKRSSLRFVAVSSRTRVMFYSTFYAMRNDDFSSLCGPVIDDVKLLSARRP

SEQ ID NO: 24036 - protein, 325 aa, Arabidopsis thaliana
  peptide (1)..(325): Ceres Seq. ID no. 12371511
  misc_feature (1)..(323): Pfam Name: Protein of unknown function, DUF642 Pfam Description: Protein of unknown function, DUF642
  misc_feature (1)..(324): Homolog of NCBI NO: 7488741 NR Description: hypothetical protein precursor - alfalfa
  misc_feature (1)..(325): Homolog of NCBI NO: 7488898 NR Description: hypothetical protein - castor bean
  misc_feature (1)..(325): Homolog of NCBI NO: 15809822 NR Description: AT5g25460/F18G18_200 [Arabidopsis thaliana]
  misc_feature (1)..(325): Homolog of NCBI NO: 21537379 NR Description: unknown [Arabidopsis thaliana]
  misc_feature (1)..(325): Homolog of NCBI NO: 15239438 NR Description: putative protein
  misc_feature (1)..(325): Homolog of NCBI NO: 21554402 NR Description: unknown [Arabidopsis thaliana]
  misc_feature (1)..(325): Homolog of NCBI NO: 23397043 NR Description: unknown protein [Arabidopsis thaliana]
  misc_feature (1)..(325): Homolog of NCBI NO: 15239049 NR Description: putative protein
  misc_feature (1)..(325): Homolog of NCBI NO: 7486632 NR Description: hypothetical protein F8B4.160 - Arabidopsis
  misc_feature (1)..(325): Homolog of NCBI NO: 18418018 NR Description: putative protein
MKGTQVINITAIPNWELSGFVEYIPSGHKQGDMILVVPKGAFAVRLGNEASIKQKISVKKGSYYSITFSAARTCAQDERLNVSVAPHHAVMPIQTVYSSSGWDLYSWAFKAQSDYADIVIHNPGVEEDPACGPLIDGVAMRALFPPRPTNKNILKNGGFEEGPWVLPNISSGVLIPPNSIDDHSPLPGWMVESLKAVKYIDSDHFSVPQGRRAVELVAGKESAVAQVVRTIPGKTYVLSFSVGDASNACAGSMIVEAFAGKDTIKVPYESKGKGGFKRSSLRFVAVSSRTRVMFYSTFYAMRNDDFSSLCGPVIDDVKLLSARRP

SEQ ID NO: 24037 - DNA, 1357 bp, Arabidopsis thaliana
  misc_feature (1)..(1357): Ceres Seq. ID no. 12680035
  misc_feature: MA Experiment ID: 108569 Result: Up-regulated in Transcription
  misc_feature: MA Experiment 108569 PARAMETER Experiment Name: At_0.001%_MeJA__cDNA_P Parameter: Timepoint (hr) Value: 6
  misc_feature: MA Experiment 108569 PARAMETER Experiment Name: At_0.001%_MeJA__cDNA_P Parameter: Tissue Value: Aerial
  misc_feature: MA Experiment 108569 PARAMETER Experiment Name: At_0.001%_MeJA__cDNA_P Parameter: Treatment Value: 0.001% MeJA vs. No Treatment
  misc_feature: MA Experiment ID: 108573 Result: Up-regulated in Transcription
  misc_feature: MA Experiment 108573 PARAMETER Experiment Name: At_Drought_cDNA_P Parameter: Timepoint (hr) Value: 6
  misc_feature: MA Experiment 108573 PARAMETER Experiment Name: At_Drought_cDNA_P Parameter: Tissue Value: Aerial
  misc_feature: MA Experiment 108573 PARAMETER Experiment Name: At_Drought_cDNA_P Parameter: Treatment Value: Drought vs. No Drought
  misc_feature: MA Experiment ID: 108579 Result: Down-regulated in Transcription
  misc_feature: MA Experiment 108579 PARAMETER Experiment Name: At_4deg_Cold_cDNA_P Parameter: Temperature (deg C) Value: 4 vs. 22
  misc_feature: MA Experiment 108579 PARAMETER Experiment Name: At_4deg_Cold_cDNA_P Parameter: Timepoint (hr) Value: 6
  misc_feature: MA Experiment 108579 PARAMETER Experiment Name: At_4deg_Cold_cDNA_P Parameter: Tissue Value: Aerial
  misc_feature: MA Experiment ID: 20001248 Result: Up-regulated in Transcription
  misc_feature: MA Experiment 20001248 PARAMETER Experiment Name: At_Far-red-induction_P Parameter: Age (day) Value: 7
  misc_feature: MA Experiment 20001248 PARAMETER Experiment Name: At_Far-red-induction_P Parameter: Light Value: Far-red vs. White
  misc_feature: MA Experiment 20001248 PARAMETER Experiment Name: At_Far-red-induction_P Parameter: Organism Value: A. thaliana
  misc_feature: MA Experiment 20001248 PARAMETER Experiment Name: At_Far-red-induction_P Parameter: Plant Line Value: Columbia
  misc_feature: MA Experiment 20001248 PARAMETER Experiment Name: At_Far-red-induction_P Parameter: Timepoint (hr) Value: 4
  misc_feature: MA Experiment 20001248 PARAMETER Experiment Name: At_Far-red-induction_P Parameter: Tissue Value: Whole Plant
  misc_feature: MA Experiment ID: 20001450 Result: Up-regulated in Transcription
  misc_feature: MA Experiment 20001450 PARAMETER Experiment Name: At_Far-red-induction_P Parameter: Age (day) Value: 7
  misc_feature: MA Experiment 20001450 PARAMETER Experiment Name: At_Far-red-induction_P Parameter: Light Value: Far-red vs. White
  misc_feature: MA Experiment 20001450 PARAMETER Experiment Name: At_Far-red-induction_P Parameter: Organism Value: A. thaliana
  misc_feature: MA Experiment 20001450 PARAMETER Experiment Name: At_Far-red-induction_P Parameter: Plant Line Value: Columbia
  misc_feature: MA Experiment 20001450 PARAMETER Experiment Name: At_Far-red-induction_P Parameter: Timepoint (hr) Value: 8
  misc_feature: MA Experiment 20001450 PARAMETER Experiment Name: At_Far-red-induction_P Parameter: Tissue Value: Whole Plant
  misc_feature: MA Experiment ID: 20001451 Result: Up-regulated in Transcription
  misc_feature: MA Experiment 20001451 PARAMETER Experiment Name: At_Far-red-induction_P Parameter: Age (day) Value: 7
  misc_feature: MA Experiment 20001451 PARAMETER Experiment Name: At_Far-red-induction_P Parameter: Light Value: Far-red vs. White
  misc_feature: MA Experiment 20001451 PARAMETER Experiment Name: At_Far-red-induction_P Parameter: Organism Value: A. thaliana
  misc_feature: MA Experiment 20001451 PARAMETER Experiment Name: At_Far-red-induction_P Parameter: Plant Line Value: Columbia
  misc_feature: MA Experiment 20001451 PARAMETER Experiment Name: At_Far-red-induction_P Parameter: Timepoint (hr) Value: 24
  misc_feature: MA Experiment 20001451 PARAMETER Experiment Name: At_Far-red-induction_P Parameter: Tissue Value: Whole Plant
caatctctctctccgcggttcacgttttttctcaatctgtccggagagagagaaactcaccggggaatcttgaaatcaccatcacatcctctcttccctcgatctccgttatcgactgtaaatcgaattttgttgttgctttgttttcttgggcgaataaaagaggataatttagtggcggggttttcgagaaagagagagaaagaatgagttttcaagatttagaggcgggaagaggaagatcattagcttcttcaaggaacatcaatggtggtggtagtagacaagacacgactcaagatgttgcttctggtatatttcagatcaatacaagtgtttccactttccatcgtcttgtcaatactcttggtactcctaaagatacgcctgagctcagagagaagctgcataagacaagattatatattggacagttagtgaaagatacatcagctaaacttaaagaagctagtgaaactgatcatcaaagaggtgtaaatcaaaagaagaagattgtggatgctaagcttgcaaaggactttcaagctgtgttgaaagagtttcaaaaggctcagcgtcttgctgctgaaagagaaaccgtatatgctcctcttgtccacaagccatctcttccctcaagctacacatccagtgagatagatgtgaatggagataagcatccagagcagcgtgcccttcttgtggaatcaaaaagacaagaacttgtactgttggacaatgagattgcgttcaatgaggctgttattgaggaaagagagcaagggatacaagaaattcagcagcaaattggcgaggtgcacgagatcttcaaagacttggcagtgttggtgcacgatcaaggaaacatgatagatgatattggtactcacatcgataactcttacgctgcaactgcccaaggaaaatcccatctcgtaaggcatcaaagacacaaagatcaaattcttctctgacgtgcttgctcttggtgatttttggtatcgtgctcatgattgttattatagtgctcgcagtttgatttccccaagctcataaaagcatggacaagtgcttcatcatcaatcaagaagcatcaatgagtatatgtttgtcacgactctctttgttcctacaatttagtctgttggactattggtctcttgtttcttgttatcgagtatatagagtagttcactttggtttgatttggcttgtgtttgctgagtcttggttctgaaggagagagtgttactgctttgtctctgtaatataacttggttctgaaggaaaatcctctgtttgtgttcttaaatgtgaaatttctggtttcgattagctaaagctatggcgaatcttc

SEQ ID NO: 24038 - protein, 255 aa, Arabidopsis thaliana
  peptide (1)..(255): Ceres Seq. ID no. 12680036
  misc_feature (189)..(251): Pfam Name: SNARE domain Pfam Description: SNARE domain
  misc_feature (1)..(245): Homolog of NCBI NO: 18422725 NR Description: syntaxin SYP22 (VAM3)
  misc_feature (1)..(255): Homolog of NCBI NO: 18414953 NR Description: syntaxin SYP23; protein id: At4g17730.1
  misc_feature (1)..(243): Homolog of NCBI NO: 7488213 NR Description: probable syntaxin - Arabidopsis thaliana
MSFQDLEAGRGRSLASSRNINGGGSRQDTTQDVASGIFQINTSVSTFHRLVNTLGTPKDTPELREKLHKTRLYIGQLVKDTSAKLKEASETDHQRGVNQKKKIVDAKLAKDFQAVLKEFQKAQRLAAERETVYAPLVHKPSLPSSYTSSEIDVNGDKHPEQRALLVESKRQELVLLDNEIAFNEAVIEEREQGIQEIQQQIGEVHEIFKDLAVLVHDQGNMIDDIGTHIDNSYAATAQGKSHLVRHQRHKDQILL

SEQ ID NO: 24039 - DNA, 1068 bp, Arabidopsis thaliana
  misc_feature (1)..(1068): Ceres Seq. ID no. 12328099
  misc_feature: MA Experiment ID: 108595 Result: Down-regulated in Transcription
  misc_feature: MA Experiment 108595 PARAMETER Experiment Name: At_Ler-pi_Ovule_cDNA_P Parameter: Plant Line Value: null
  misc_feature: MA Experiment ID: 20000180 Result: Up-regulated in Transcription
  misc_feature: MA Experiment 20000180 PARAMETER Experiment Name: At_Germinating_Seeds_P Parameter: Age (hr) Value: 24 vs. 0
  misc_feature: MA Experiment 20000180 PARAMETER Experiment Name: At_Germinating_Seeds_P Parameter: Tissue Value: Germinating Seeds
  misc_feature: MA Experiment ID: 20000307 Result: Up-regulated in Transcription
  misc_feature: MA Experiment 20000307 PARAMETER Experiment Name: At_Germinating_Seeds_Sub_P Parameter: Age (hr) Value: 24 vs. 0
  misc_feature: MA Experiment 20000307 PARAMETER Experiment Name: At_Germinating_Seeds_Sub_P Parameter: Organism Value: A. thaliana
  misc_feature: MA Experiment 20000307 PARAMETER Experiment Name: At_Germinating_Seeds_Sub_P Parameter: Plant Line Value: WS
  misc_feature: MA Experiment 20000307 PARAMETER Experiment Name: At_Germinating_Seeds_Sub_P Parameter: Tissue Value: Germinating Seeds
gacttttctctgtcctttcaacaattcaatggcagacccaagagttgcagttgttactggttccaacaaagggattgggtttgagatttgcaggcaactagctaacaatgggataactgtggttttaactgcgagagatgaaaacaagggtcttgctgctgtccaaaagctcaagactgagaatggtttttctgatcaagccatctcctttcaccctcttgatgtctccaacccagacaccatcgcttctcttgctgcttttgtcaagacccgcttcggcaaactcgatattctggttaataatgccggagttggaggggcgaatgttaatgttgatgttctcaaagctcagattgctgaggctggtgcgccaactgatatttccaagataatgagtgatacatatgagatagtcgaggagtgtgttaaaacaaactactacggcgttaagcgaatgtgcgaggccatgattcctctccttcaatcttctgattccccaagaatcgtcagcatcgcttccaccatgggaaagttagagaatgtttcaaatgaatgggcaaaaggagtgctgagtgatgctgagaacctaacagaagagaaaatagatgaagtgatcaatgagtacctcaaggattacaaagaaggtgcattacaagtcaaaggttggccaacagtgatgtctggatacatactatcgaaagctgcagtgatcgcattgacacgagtattggctaagcgacacaaatcgttcatcatcaacagtgtttgtcctggtttcgtaaacacagaaatcaatttcaacactgggatcttgagcgttgaagaaggtgcagcgagtccagtgaaactggctttggtccctaatggagacccatctggtcttttctttgatcgcgccaatgtctccaacttttgattcttcaatcttatgtgttcggttgggtgttggtttgtatattttattatctcatcaatttagcagaaaataaagtgaactccaaactatatatcaaccaaacttggttatattataaagcttcttcaatatttatgtggttttgtattccc

SEQ ID NO: 24040 - protein, 304 aa, Arabidopsis thaliana
  peptide (1)..(304): Ceres Seq. ID no. 12328100
  misc_feature (14)..(304): Homolog of NCBI NO: 38346774 NR Description: OSJNBa0081C01.25 [Oryza sativa (japonica
  misc_feature (14)..(301): Homolog of NCBI NO: 33146492 NR Description: carbonyl reductase -like protein
  misc_feature (9)..(304): Homolog of NCBI NO: 38346772 NR Description: OSJNBa0081C01.23 [Oryza sativa (japonica
  misc_feature (9)..(304): Homolog of NCBI NO: 38346769 NR Description: OSJNBa0081C01.20 [Oryza sativa (japonica
  misc_feature (10)..(113): Homolog of NCBI NO: 34559416 NR Description: (-)-isopiperitenone reductase [Mentha x piperita]
  misc_feature (98)..(298): Homolog of NCBI NO: 34559416 NR Description: (-)-isopiperitenone reductase [Mentha x piperita]
  misc_feature (13)..(304): Homolog of NCBI NO: 15224100 NR Description: putative carbonyl reductase; protein id:
  misc_feature (13)..(304): Homolog of NCBI NO: 15233062 NR Description: putative protein
  misc_feature (2)..(304): Homolog of NCBI NO: 25518668 NR Description: hypothetical protein T1N6.22 - Arabidopsis
  misc_feature (10)..(304): Homolog of NCBI NO: 18378884 NR Description: carbonyl reductase, putative; protein id:
TFLCPFNNSMADPRVAVVTGSNKGIGFEICRQLANNGITVVLTARDENKGLAAVQKLKTENGFSDQAISFHPLDVSNPDTIASLAAFVKTRFGKLDILVNNAGVGGANVNVDVLKAQIAEAGAPTDISKIMSDTYEIVEECVKTNYYGVKRMCEAMIPLLQSSDSPRIVSIASTMGKLENVSNEWAKGVLSDAENLTEEKIDEVINEYLKDYKEGALQVKGWPTVMSGYILSKAAVIALTRVLAKRHKSFIINSVCPGFVNTEINFNTGILSVEEGAASPVKLALVPNGDPSGLFFDRANVSNF

SEQ ID NO: 24041 - protein, 295 aa, Arabidopsis thaliana
  peptide (1)..(295): Ceres Seq. ID no. 12328101
  misc_feature (5)..(295): Homolog of NCBI NO: 38346774 NR Description: OSJNBa0081C01.25 [Oryza sativa (japonica
  misc_feature (5)..(292): Homolog of NCBI NO: 33146492 NR Description: carbonyl reductase -like protein
  misc_feature (1)..(295): Homolog of NCBI NO: 38346772 NR Description: OSJNBa0081C01.23 [Oryza sativa (japonica
  misc_feature (1)..(295): Homolog of NCBI NO: 38346769 NR Description: OSJNBa0081C01.20 [Oryza sativa (japonica
  misc_feature (1)..(104): Homolog of NCBI NO: 34559416 NR Description: (-)-isopiperitenone reductase [Mentha x piperita]
  misc_feature (89)..(289): Homolog of NCBI NO: 34559416 NR Description: (-)-isopiperitenone reductase [Mentha x piperita]
  misc_feature (4)..(295): Homolog of NCBI NO: 15224100 NR Description: putative carbonyl reductase; protein id:
  misc_feature (4)..(295): Homolog of NCBI NO: 15233062 NR Description: putative protein
  misc_feature (1)..(295): Homolog of NCBI NO: 25518668 NR Description: hypothetical protein T1N6.22 - Arabidopsis
  misc_feature (1)..(295): Homolog of NCBI NO: 18378884 NR Description: carbonyl reductase, putative; protein id:
MADPRVAVVTGSNKGIGFEICRQLANNGITVVLTARDENKGLAAVQKLKTENGFSDQAISFHPLDVSNPDTIASLAAFVKTRFGKLDILVNNAGVGGANVNVDVLKAQIAEAGAPTDISKIMSDTYEIVEECVKTNYYGVKRMCEAMIPLLQSSDSPRIVSIASTMGKLENVSNEWAKGVLSDAENLTEEKIDEVINEYLKDYKEGALQVKGWPTVMSGYILSKAAVIALTRVLAKRHKSFIINSVCPGFVNTEINFNTGILSVEEGAASPVKLALVPNGDPSGLFFDRANVSNF

SEQ ID NO: 24042 - protein, 174 aa, Arabidopsis thaliana
  peptide (1)..(174): Ceres Seq. ID no. 12328102
  misc_feature (1)..(165): Homolog of NCBI NO: 15215242 NR Description: Similar to carbonyl reductase 1 [Mus musculus]
  misc_feature (1)..(174): Homolog of NCBI NO: 38346774 NR Description: OSJNBa0081C01.25 [Oryza sativa (japonica
  misc_feature (1)..(171): Homolog of NCBI NO: 33146492 NR Description: carbonyl reductase -like protein
  misc_feature (1)..(174): Homolog of NCBI NO: 38346772 NR Description: OSJNBa0081C01.23 [Oryza sativa (japonica
  misc_feature (1)..(174): Homolog of NCBI NO: 38346769 NR Description: OSJNBa0081C01.20 [Oryza sativa (japonica
  misc_feature (1)..(168): Homolog of NCBI NO: 34559416 NR Description: (-)-isopiperitenone reductase [Mentha x piperita]
  misc_feature (1)..(174): Homolog of NCBI NO: 15224100 NR Description: putative carbonyl reductase; protein id:
  misc_feature (1)..(174): Homolog of NCBI NO: 15233062 NR Description: putative protein
  misc_feature (1)..(174): Homolog of NCBI NO: 25518668 NR Description: hypothetical protein T1N6.22 - Arabidopsis
  misc_feature (1)..(174): Homolog of NCBI NO: 18378884 NR Description: carbonyl reductase, putative; protein id:
MSDTYEIVEECVKTNYYGVKRMCEAMIPLLQSSDSPRIVSIASTMGKLENVSNEWAKGVLSDAENLTEEKIDEVINEYLKDYKEGALQVKGWPTVMSGYILSKAAVIALTRVLAKRHKSFIINSVCPGFVNTEINFNTGILSVEEGAASPVKLALVPNGDPSGLFFDRANVSNF

SEQ ID NO: 24043 - DNA, 1346 bp, Arabidopsis thaliana
  misc_feature (1)..(1346): Ceres Seq. ID no. 12335245
  misc_feature: MA Experiment ID: 108434 Result: Up-regulated in Transcription
  misc_feature: MA Experiment 108434 PARAMETER Experiment Name: At_Root_Tips_cDNA_P Parameter: Tissue Value: Root Tips
  misc_feature: MA Experiment ID: 108595 Result: Down-regulated in Transcription
  misc_feature: MA Experiment 108595 PARAMETER Experiment Name: At_Ler-pi_Ovule_cDNA_P Parameter: Plant Line Value: null
  misc_feature: MA Experiment ID: 20000111 Result: Up-regulated in Transcription
  misc_feature: MA Experiment 20000111 PARAMETER Experiment Name: At_42deg_Heat_cDNA_P Parameter: Temperature (deg C) Value: 42 vs. 22
  misc_feature: MA Experiment 20000111 PARAMETER Experiment Name: At_42deg_Heat_cDNA_P Parameter: Timepoint (hr) Value: 6
  misc_feature: MA Experiment 20000111 PARAMETER Experiment Name: At_42deg_Heat_cDNA_P Parameter: Tissue Value: Aerial
  misc_feature: MA Experiment ID: 20000112 Result: Up-regulated in Transcription
  misc_feature: MA Experiment 20000112 PARAMETER Experiment Name: At_42deg_Heat_cDNA_P Parameter: Temperature (deg C) Value: 42 vs. 22
  misc_feature: MA Experiment 20000112 PARAMETER Experiment Name: At_42deg_Heat_cDNA_P Parameter: Timepoint (hr) Value: 2
  misc_feature: MA Experiment 20000112 PARAMETER Experiment Name: At_42deg_Heat_cDNA_P Parameter: Tissue Value: Aerial
gaatcgtgtgagaagagagactgaagaagagctagaaaaaatgagagagctcctgtgaagtgacgaagagacgaagaagaaagagaacattaatggcggctactccgtggtactttgtcgcagtacttctcaccattcttaccagctctcaggggattttaacaactctttctcaaagtgatggaggttataagtatgattatgctactgttccctttcttgctgaagtttttaagctgatcatttctggtttatttctctggagagagatgcggacatcttcctcaacaacttcaaggattactacggattggaagagtgtgcgattatttgttattccgtctcttatttatctcatacataacaatgtgcagtttgctacattgacttatgtggatacatccacttatcagataatgggtaatttgaagattgtgaccactggcatactgtttaggttatttttgaaaaggaaactatctaaacttcagtggatggcaattggtcttttagctgttggaacaactaccagccaggttaagggttgtggagaagcttcttgtgattctttattcacggcaccaatacaaggttatttgctgggcatcctctcagctggtttgtccgcgctagctggaatctacacagagtttctgatgaagagaaacaatgacaccttatactggcaaaacttgcagttgtatacgtaggtttggttcacttttcaacgtagctcgacttatagcagatgatttcagacacgggtttgaaaagggtccttggtggcaacgtatctttgatgggtacagcatcaccacttggctggtagttctgaatctcggatccactggcttactggtctcgtggttaatgaagtatgcagacaacatcgtcaaggtttattctacatcaatggcgatgctacttactatggttgcatccatatacctctttagcttcaaaccgacactgcagcttttcttgggtattgtcatatgcatcatgtcactccatatgtactttgctcctccacacacgctcgtggacttgcccgtgacaaacgaagcacatgccaagaccttaaagcaagttgtcgtagaagaaaagacagattcttgaatcgaattggacgaaaaggttagttcaacatagagaaaacaatttgctaagtaaatgaacacaatgatcttcttctagcttcatttctattagagaatgagaaacttggatgtgagttcttttgaagaaatgatatgatagtttgtttattcgcgtacggattctatttctattctttgtaaatgtacatcgaggtgccctgaagtagtaaattcaattgttgaagc

SEQ ID NO: 24044 - protein, 205 aa, Arabidopsis thaliana
  peptide (1)..(205): Ceres Seq. ID no. 12335246
  misc_feature (61)..(205): Pfam Name: Nucleotide-sugar transporter Pfam Description: Nucleotide-sugar transporter
  misc_feature (7)..(204): Homolog of NCBI NO: 6755558 NR Description: solute carrier family 35 (CMP-sialic acid
  misc_feature (7)..(203): Homolog of NCBI NO: 39593097 NR Description: Hypothetical protein CBG09317 [Caenorhabditis
  misc_feature (15)..(204): Homolog of NCBI NO: 38345234 NR Description: OSJNBa0084K20.12 [Oryza sativa (japonica
  misc_feature (15)..(204): Homolog of NCBI NO: 18411150 NR Description: transporter-like protein
  misc_feature (8)..(204): Homolog of NCBI NO: 26450627 NR Description: unknown protein [Arabidopsis thaliana]
  misc_feature (8)..(204): Homolog of NCBI NO: 34867231 NR Description: similar to CMP-sialic acid transporter [Rattus
  misc_feature (22)..(204): Homolog of NCBI NO: 34907666 NR Description: putative transporter-like protein
  misc_feature (9)..(204): Homolog of NCBI NO: 34393556 NR Description: putative CMP-sialic acid transporter
  misc_feature (20)..(205): Homolog of NCBI NO: 10177360 NR Description: CMP-sialic acid transporter-like protein
  misc_feature (1)..(205): Homolog of NCBI NO: 18422134 NR Description: CMP-sialic acid transporter-like protein
MAATPWYFVAVLLTILTSSQGILTTLSQSDGGYKYDYATVPFLAEVFKLIISGLFLWREMRTSSSTTSRITTDWKSVRLFVIPSLIYLIHNNVQFATLTYVDTSTYQIMGNLKIVTTGILFRLFLKRKLSKLQWMAIGLLAVGTTTSQVKGCGEASCDSLFTAPIQGYLLGILSAGLSALAGIYTEFLMKRNNDTLYWQNLQLYT

SEQ ID NO: 24045 - protein, 149 aa, Arabidopsis thaliana
  peptide (1)..(149): Ceres Seq. ID no. 12335247
  misc_feature (15)..(108): Pfam Name: Nucleotide-sugar transporter Pfam Description: Nucleotide-sugar transporter
  misc_feature (43)..(120): Homolog of NCBI NO: 34867231 NR Description: similar to CMP-sialic acid transporter [Rattus
  misc_feature (43)..(120): Homolog of NCBI NO: 6755558 NR Description: solute carrier family 35 (CMP-sialic acid
  misc_feature (40)..(122): Homolog of NCBI NO: 39593097 NR Description: Hypothetical protein CBG09317 [Caenorhabditis
  misc_feature (15)..(120): Homolog of NCBI NO: 38345234 NR Description: OSJNBa0084K20.12 [Oryza sativa (japonica
  misc_feature (15)..(120): Homolog of NCBI NO: 18411150 NR Description: transporter-like protein
  misc_feature (15)..(120): Homolog of NCBI NO: 26450627 NR Description: unknown protein [Arabidopsis thaliana]
  misc_feature (15)..(149): Homolog of NCBI NO: 34907666 NR Description: putative transporter-like protein
  misc_feature (15)..(117): Homolog of NCBI NO: 34393556 NR Description: putative CMP-sialic acid transporter
  misc_feature (15)..(149): Homolog of NCBI NO: 10177360 NR Description: CMP-sialic acid transporter-like protein
  misc_feature (15)..(149): Homolog of NCBI NO: 18422134 NR Description: CMP-sialic acid transporter-like protein
MTPYTGKTCSCIRRFGSLFNVARLIADDFRHGFEKGPWWQRIFDGYSITTWLVVLNLGSTGLLVSWLMKYADNIVKVYSTSMAMLLTMVASIYLFSFKPTLQLFLGIVICIMSLHMYFAPPHTLVDLPVTNEAHAKTLKQVVVEEKTDS

SEQ ID NO: 24046 - protein, 146 aa, Arabidopsis thaliana
  peptide (1)..(146): Ceres Seq. ID no. 12335248
  misc_feature (2)..(146): Pfam Name: Nucleotide-sugar transporter Pfam Description: Nucleotide-sugar transporter
  misc_feature (1)..(145): Homolog of NCBI NO: 34867231 NR Description: similar to CMP-sialic acid transporter [Rattus
  misc_feature (1)..(145): Homolog of NCBI NO: 6755558 NR Description: solute carrier family 35 (CMP-sialic acid
  misc_feature (1)..(144): Homolog of NCBI NO: 39593097 NR Description: Hypothetical protein CBG09317 [Caenorhabditis
  misc_feature (1)..(145): Homolog of NCBI NO: 38345234 NR Description: OSJNBa0084K20.12 [Oryza sativa (japonica
  misc_feature (1)..(145): Homolog of NCBI NO: 18411150 NR Description: transporter-like protein
  misc_feature (1)..(145): Homolog of NCBI NO: 26450627 NR Description: unknown protein [Arabidopsis thaliana]
  misc_feature (1)..(145): Homolog of NCBI NO: 34907666 NR Description: putative transporter-like protein
  misc_feature (1)..(145): Homolog of NCBI NO: 34393556 NR Description: putative CMP-sialic acid transporter
  misc_feature (1)..(146): Homolog of NCBI NO: 10177360 NR Description: CMP-sialic acid transporter-like protein
  misc_feature (1)..(146): Homolog of NCBI NO: 18422134 NR Description: CMP-sialic acid transporter-like protein
MRTSSSTTSRITTDWKSVRLFVIPSLIYLIHNNVQFATLTYVDTSTYQIMGNLKIVTTGILFRLFLKRKLSKLQWMAIGLLAVGTTTSQVKGCGEASCDSLFTAPIQGYLLGILSAGLSALAGIYTEFLMKRNNDTLYWQNLQLYT

SEQ ID NO: 24047 - DNA, 930 bp, Arabidopsis thaliana
  misc_feature (1)..(930): Ceres Seq. ID no. 13499868
  misc_feature: MA Experiment ID: 20000794 Result: Up-regulated in Transcription
  misc_feature: MA Experiment 20000794 PARAMETER Experiment Name: At_Petals_P Parameter: Age (day) Value: 23-25 days
  misc_feature: MA Experiment 20000794 PARAMETER Experiment Name: At_Petals_P Parameter: Plant Line Value: WS
  misc_feature: MA Experiment 20000794 PARAMETER Experiment Name: At_Petals_P Parameter: Tissue Value: Petals vs. Whole plant
ctgagaaaccccaatctctaatcttcttttcaattcaatacttttttttctcaatctctcctctcaaatcaaacaactttgattgatcttcgcaatcgattccacatgaagcgcagtactaccgactctgatttggccggtgatgctcacaacgagacaaacaagaagatgaagagtacagaggaagaagaaatcggattctccaatttagacgagaatctagtgtacgaggtgttgaaacacgtcgacgcaaagaccttagctatgtcatcttgcgtgagcaagatctggcacaaaacggcacaagacgagcggctttgggagctgatctgtactcgtcactggactaacatcggctgcgggcagaaccagctcagatctgttgtgttggcgcttggtggcttccgaagactccactctctttacctctggcctctctctaaacccaatccgcgtgctaggttcggtaaggacgagcttaaactcactctttctcttctctcaattcgatactacgagaagatgagtttcactaagagacctcttccagaatccaaataattgactacaaattattagagtttggttttggagtttgtgtatttggagtttgttgattggtaagtcagatgtgatgttcaatgctggcaataaaatttgttggtatccataagccagactgttagcaacagttgtgttctgtaataatagagggtgatgagaatttttaattactgtaatcggagctgattaaaagtagatttaatatcaaatgtgattcgattttgttgtaatggttctgtcttgaagttaagttggtccgtagttggacaatgattgtaacaaaatagattcgtgatccagtttggtaagattaagaactgttagtgacgattctgttttattattcaatgaaaaacaatgttcacc

SEQ ID NO: 24048 - protein, 151 aa, Arabidopsis thaliana
  peptide (1)..(151): Ceres Seq. ID no. 13499869
  misc_feature (17)..(140): Homolog of NCBI NO: 15238908 NR Description: F-box protein family [Arabidopsis thaliana]
  misc_feature (26)..(145): Homolog of NCBI NO: 33411641 NR Description: GID2 [Oryza sativa (japonica cultivar-group)]
  misc_feature (1)..(151): Homolog of NCBI NO: 21593260 NR Description: unknown [Arabidopsis thaliana]
  misc_feature (1)..(151): Homolog of NCBI NO: 15233744 NR Description: F-box protein family [Arabidopsis thaliana]
MKRSTTDSDLAGDAHNETNKKMKSTEEEEIGFSNLDENLVYEVLKHVDAKTLAMSSCVSKIWHKTAQDERLWELICTRHWTNIGCGQNQLRSVVLALGGFRRLHSLYLWPLSKPNPRARFGKDELKLTLSLLSIRYYEKMSFTKRPLPESK

SEQ ID NO: 24049 - protein, 130 aa, Arabidopsis thaliana
  peptide (1)..(130): Ceres Seq. ID no. 13499870
  misc_feature (1)..(119): Homolog of NCBI NO: 15238908 NR Description: F-box protein family [Arabidopsis thaliana]
  misc_feature (5)..(124): Homolog of NCBI NO: 33411641 NR Description: GID2 [Oryza sativa (japonica cultivar-group)]
  misc_feature (1)..(130): Homolog of NCBI NO: 21593260 NR Description: unknown [Arabidopsis thaliana]
  misc_feature (1)..(130): Homolog of NCBI NO: 15233744 NR Description: F-box protein family [Arabidopsis thaliana]
MKSTEEEEIGFSNLDENLVYEVLKHVDAKTLAMSSCVSKIWHKTAQDERLWELICTRHWTNIGCGQNQLRSVVLALGGFRRLHSLYLWPLSKPNPRARFGKDELKLTLSLLSIRYYEKMSFTKRPLPESK

SEQ ID NO: 24050 - protein, 98 aa, Arabidopsis thaliana
  peptide (1)..(98): Ceres Seq. ID no. 13499871
  misc_feature (1)..(87): Homolog of NCBI NO: 15238908 NR Description: F-box protein family [Arabidopsis thaliana]
  misc_feature (1)..(92): Homolog of NCBI NO: 33411641 NR Description: GID2 [Oryza sativa (japonica cultivar-group)]
  misc_feature (1)..(98): Homolog of NCBI NO: 21593260 NR Description: unknown [Arabidopsis thaliana]
  misc_feature (1)..(98): Homolog of NCBI NO: 15233744 NR Description: F-box protein family [Arabidopsis thaliana]
MSSCVSKIWHKTAQDERLWELICTRHWTNIGCGQNQLRSVVLALGGFRRLHSLYLWPLSKPNPRARFGKDELKLTLSLLSIRYYEKMSFTKRPLPESK

SEQ ID NO: 24051 - DNA, 1270 bp, Arabidopsis thaliana
  misc_feature (1)..(1270): Ceres Seq. ID no. 13491751
  misc_feature: MA Experiment ID: 108609 Result: Down-regulated in Transcription
  misc_feature: MA Experiment 108609 PARAMETER Experiment Name: At_100uM_ABA_cDNA_P Parameter: Timepoint (hr) Value: 24
  misc_feature: MA Experiment 108609 PARAMETER Experiment Name: At_100uM_ABA_cDNA_P Parameter: Tissue Value: Aerial
  misc_feature: MA Experiment 108609 PARAMETER Experiment Name: At_100uM_ABA_cDNA_P Parameter: Treatment Value: 100uM ABA vs. No Treatment
  misc_feature: MA Experiment ID: 20000495 Result: Up-regulated in Transcription
  misc_feature: MA Experiment 20000495 PARAMETER Experiment Name: At_Guard_Cells_P Parameter: Harvest Date Value: 8/2/2002
  misc_feature: MA Experiment 20000495 PARAMETER Experiment Name: At_Guard_Cells_P Parameter: Organism Value: A. thaliana
  misc_feature: MA Experiment 20000495 PARAMETER Experiment Name: At_Guard_Cells_P Parameter: Tissue Value: Guard Cells vs. Leaves
  misc_feature: MA Experiment ID: 20001757 Result: Up-regulated in Transcription
  misc_feature: MA Experiment 20001757 PARAMETER Experiment Name: At_50mM_NH4NO3_L-to-H_P Parameter: Timepoint (hr) Value: 6
  misc_feature: MA Experiment 20001757 PARAMETER Experiment Name: At_50mM_NH4NO3_L-to-H_P Parameter: Tissue Value: Leaf
  misc_feature: MA Experiment 20001757 PARAMETER Experiment Name: At_50mM_NH4NO3_L-to-H_P Parameter: Treatment Value: 50mM NH4NO3 vs 100mM Mannitol
ttttctttattggacgaacaaaaaactttatctttccttcctttgaaatctcccggagaaaaactatagagattttccgtttcccgctttaatacagtgccccaattcgcgcgacacatagagtgtagagacgctttcacgagcgtttccgacgtcggactttcagctcatcatctccacatctttaacggtaaagattaatcatgcctgaaattcatttgggtgctcatacaataagatcccatggagtaacagtcgcgaggttccacatgcatgactggctcattcttctgctgctaatagtcattgaaattgttcttaatgtcatcgaaccctttcatcgttttgttggagaagatatgctcactgatctcagataccctctgcaggacaacacaattcctttctgggctgtcccgttgatagctgttgtgctaccttttgctgtcatttgtgtttactacttcattagaaatgatgtttatgacctgcatcatgcaatactagggcttttgttctctgtacttataaccggtgtcataaccgatgctataaaggacgctgttggtcgacctcgtcctgatttcttttggcgttgtttccctgacggtatagggatctttcacaatgtcacgaagaatgttctatgtactggagctaaggatgtggtcaaagagggacacaagagcttccccagcggccacacatcttggtcgtttgctggtctaggatttctatcgttatacttgtctgggaaaatcagggtgtttgaccagagagggcatgttgcaaagctctgcattgtgattttacctctactggttgcagcattggttggtgtatccagagttgatgactattggcatcactggcaagatgtttttggaggagctatcataggattgactgtggccacattttgttatctgcaatttttccctcctccatacgatccagacggttggggacctcatgcctacttccagatgctggcagactcaagaaatgatgtccaagattcagcaggaatgaatcatctaagcgtgaggcaaacagagctagagagcgtacgttgatggagaagagacgtccatggaaatatcaagaagcaacacgcgggacaccacccgtatgcttcagaaccgctaagtgaagtctttgtactcgttatctatcaatcttaggcattgtcgcattgatatgtattggcttaatcacaaggcccaatattggttggaagcccattcgctaaaaatagagccctataaag

SEQ ID NO: 24052 - protein, 290 aa, Arabidopsis thaliana
  peptide (1)..(290): Ceres Seq. ID no. 13491752
  misc_feature (108)..(249): Pfam Name: PAP2 superfamily Pfam Description: PAP2 superfamily
  misc_feature (10)..(273): Homolog of NCBI NO: 34910912 NR Description: putative phosphatidic acid phosphatase beta
  misc_feature (1)..(265): Homolog of NCBI NO: 21593222 NR Description: diacylglycerol pyrophosphate phosphatase,
  misc_feature (1)..(265): Homolog of NCBI NO: 18401811 NR Description: phosphatidic acid phosphatase (PAP2) family
  misc_feature (1)..(274): Homolog of NCBI NO: 38637527 NR Description: putative phosphatidic acid phosphatase beta
  misc_feature (1)..(274): Homolog of NCBI NO: 18396250 NR Description: phosphatidic acid phosphatase (PAP2) family
  misc_feature (1)..(274): Homolog of NCBI NO: 6957723 NR Description: putative phosphatidate phosphohydrolase
  misc_feature (3)..(287): Homolog of NCBI NO: 9621903 NR Description: phosphatidic acid phosphatase alpha [Vigna
  misc_feature (1)..(276): Homolog of NCBI NO: 38637528 NR Description: unknown protein [Oryza sativa (japonica
  misc_feature (1)..(289): Homolog of NCBI NO: 10673973 NR Description: phosphatidic acid phosphatase beta [Vigna
  misc_feature (1)..(290): Homolog of NCBI NO: 15218051 NR Description: phosphatidic acid phosphatase (PAP2) family
MPEIHLGAHTIRSHGVTVARFHMHDWLILLLLIVIEIVLNVIEPFHRFVGEDMLTDLRYPLQDNTIPFWAVPLIAVVLPFAVICVYYFIRNDVYDLHHAILGLLFSVLITGVITDAIKDAVGRPRPDFFWRCFPDGIGIFHNVTKNVLCTGAKDVVKEGHKSFPSGHTSWSFAGLGFLSLYLSGKIRVFDQRGHVAKLCIVILPLLVAALVGVSRVDDYWHHWQDVFGGAIIGLTVATFCYLQFFPPPYDPDGWGPHAYFQMLADSRNDVQDSAGMNHLSVRQTELESVR

SEQ ID NO: 24053 - protein, 268 aa, Arabidopsis thaliana
  peptide (1)..(268): Ceres Seq. ID no. 13491753
  misc_feature (86)..(227): Pfam Name: PAP2 superfamily Pfam Description: PAP2 superfamily
  misc_feature (1)..(251): Homolog of NCBI NO: 34910912 NR Description: putative phosphatidic acid phosphatase beta
  misc_feature (1)..(243): Homolog of NCBI NO: 21593222 NR Description: diacylglycerol pyrophosphate phosphatase,
  misc_feature (1)..(243): Homolog of NCBI NO: 18401811 NR Description: phosphatidic acid phosphatase (PAP2) family
  misc_feature (1)..(252): Homolog of NCBI NO: 38637527 NR Description: putative phosphatidic acid phosphatase beta
  misc_feature (1)..(252): Homolog of NCBI NO: 18396250 NR Description: phosphatidic acid phosphatase (PAP2) family
  misc_feature (1)..(252): Homolog of NCBI NO: 6957723 NR Description: putative phosphatidate phosphohydrolase
  misc_feature (1)..(265): Homolog of NCBI NO: 9621903 NR Description: phosphatidic acid phosphatase alpha [Vigna
  misc_feature (1)..(254): Homolog of NCBI NO: 38637528 NR Description: unknown protein [Oryza sativa (japonica
  misc_feature (1)..(267): Homolog of NCBI NO: 10673973 NR Description: phosphatidic acid phosphatase beta [Vigna
  misc_feature (1)..(268): Homolog of NCBI NO: 15218051 NR Description: phosphatidic acid phosphatase (PAP2) family
MHDWLILLLLIVIEIVLNVIEPFHRFVGEDMLTDLRYPLQDNTIPFWAVPLIAVVLPFAVICVYYFIRNDVYDLHHAILGLLFSVLITGVITDAIKDAVGRPRPDFFWRCFPDGIGIFHNVTKNVLCTGAKDVVKEGHKSFPSGHTSWSFAGLGFLSLYLSGKIRVFDQRGHVAKLCIVILPLLVAALVGVSRVDDYWHHWQDVFGGAIIGLTVATFCYLQFFPPPYDPDGWGPHAYFQMLADSRNDVQDSAGMNHLSVRQTELESVR

SEQ ID NO: 24054 - protein, 238 aa, Arabidopsis thaliana
  peptide (1)..(238): Ceres Seq. ID no. 13491754
  misc_feature (56)..(197): Pfam Name: PAP2 superfamily Pfam Description: PAP2 superfamily
  misc_feature (1)..(221): Homolog of NCBI NO: 34910912 NR Description: putative phosphatidic acid phosphatase beta
  misc_feature (1)..(213): Homolog of NCBI NO: 21593222 NR Description: diacylglycerol pyrophosphate phosphatase,
  misc_feature (1)..(213): Homolog of NCBI NO: 18401811 NR Description: phosphatidic acid phosphatase (PAP2) family
  misc_feature (1)..(222): Homolog of NCBI NO: 38637527 NR Description: putative phosphatidic acid phosphatase beta
  misc_feature (1)..(222): Homolog of NCBI NO: 18396250 NR Description: phosphatidic acid phosphatase (PAP2) family
  misc_feature (1)..(222): Homolog of NCBI NO: 6957723 NR Description: putative phosphatidate phosphohydrolase
  misc_feature (1)..(235): Homolog of NCBI NO: 9621903 NR Description: phosphatidic acid phosphatase alpha [Vigna
  misc_feature (1)..(224): Homolog of NCBI NO: 38637528 NR Description: unknown protein [Oryza sativa (japonica
  misc_feature (1)..(237): Homolog of NCBI NO: 10673973 NR Description: phosphatidic acid phosphatase beta [Vigna
  misc_feature (1)..(238): Homolog of NCBI NO: 15218051 NR Description: phosphatidic acid phosphatase (PAP2) family
MLTDLRYPLQDNTIPFWAVPLIAVVLPFAVICVYYFIRNDVYDLHHAILGLLFSVLITGVITDAIKDAVGRPRPDFFWRCFPDGIGIFHNVTKNVLCTGAKDVVKEGHKSFPSGHTSWSFAGLGFLSLYLSGKIRVFDQRGHVAKLCIVILPLLVAALVGVSRVDDYWHHWQDVFGGAIIGLTVATFCYLQFFPPPYDPDGWGPHAYFQMLADSRNDVQDSAGMNHLSVRQTELESVR

SEQ ID NO: 24055 - DNA, 1255 bp, Arabidopsis thaliana
  misc_feature (1)..(1255): Ceres Seq. ID no. 12377285
  misc_feature: MA Experiment ID: 20000171 Result: Up-regulated in Transcription
  misc_feature: MA Experiment 20000171 PARAMETER Experiment Name: At_42deg_Heat_P Parameter: Age (day) Value: 14
  misc_feature: MA Experiment 20000171 PARAMETER Experiment Name: At_42deg_Heat_P Parameter: Organism Value: A. thaliana
  misc_feature: MA Experiment 20000171 PARAMETER Experiment Name: At_42deg_Heat_P Parameter: Plant Line Value: WS
  misc_feature: MA Experiment 20000171 PARAMETER Experiment Name: At_42deg_Heat_P Parameter: Temperature (deg C) Value: 42 vs. 22
  misc_feature: MA Experiment 20000171 PARAMETER Experiment Name: At_42deg_Heat_P Parameter: Timepoint (hr) Value: 1
  misc_feature: MA Experiment 20000171 PARAMETER Experiment Name: At_42deg_Heat_P Parameter: Tissue Value: Aerial
  misc_feature: MA Experiment ID: 20001911 Result: Up-regulated in Transcription
  misc_feature: MA Experiment 20001911 PARAMETER Experiment Name: At_Drought_Reproduction_P Parameter: Age (day) Value: 40
  misc_feature: MA Experiment 20001911 PARAMETER Experiment Name: At_Drought_Reproduction_P Parameter: Organism Value: A. thaliana
  misc_feature: MA Experiment 20001911 PARAMETER Experiment Name: At_Drought_Reproduction_P Parameter: Plant Line Value: WS
  misc_feature: MA Experiment 20001911 PARAMETER Experiment Name: At_Drought_Reproduction_P Parameter: Timepoint (day) Value: 10
  misc_feature: MA Experiment 20001911 PARAMETER Experiment Name: At_Drought_Reproduction_P Parameter: Tissue Value: Flowers
  misc_feature: MA Experiment 20001911 PARAMETER Experiment Name: At_Drought_Reproduction_P Parameter: Treatment Value: Drought vs. No Drought
aatatccaaaacataatctctctctatctctctctattttgctcaatcttaatcgtccgatcaaaacactccgactaaaaatggctgcatctaacggcgagaaaagcttgatcgtgagcttcggtgaaatgctcatcgatttcgtcccaaccgtctccggtgtatccctcgccgatgctcctggcttcatcaaagcccccggtggtgcacctgccaacgttgccatcgccatttcccgtctaggcggtcgtgccgctttcgttggaaaactcggtgacgacgagttcggtcacatgctcgcgcggaatcttgaaacagaacggtgtctctgctgaaggtatcaatttcgacactggagccaggactgcacttgcgttcgtgacactaagatctgatggagaacgtgagttcatgttctaccggaaccctagtgccgatatgctcctccgtcccgacgagctcaatcttgatgtcatcagatctgctaaggtgttccactacggatccataagcttgatcgttgagccatgtcgatctgctcacttgaaagccatggaggtggctaaggaagctggtgcgttgctttcatatgatccgaacttgaggcttcctttgtggccctcgaaggaggaggctcagaagcagattcttagcatctgggacaaagctgaagtgatcaaagtcagcgatgaagagcttatgttcttgactggatctgataaggttgatgatgagactgctttgtctctgtggcactctaatctgaaacttctcttggtcactctaggtgaaaagggttgtagatactacaccaagagcttccgtggatctgttgatcccttccatgtggatgcagtagatacaactggtgctggtgattcatttgttggtgcattgctttgcaagattgttgatgaccgtgctgtgcttgaggacgaagctcggctgagagaagtgcttaggcttgcgaatgcttgtggagccatcacaacaacaaagaaaggagctattccagctctccctacagagtctgaagttcagagcctcctgaaaggaaactgatttcacaatgtctggatttttaggacttcaagttttaccttttcttggctttgttttttattttcccctgcttttggctctgtgttcttgtagaaccgttctattctgttatgaatctcgttttattccaattgcaaggttttttgtcgtttgagtaactttgatgaataaaaactctttaccaagttcagtg

SEQ ID NO: 24056 - protein, 216 aa, Arabidopsis thaliana
  peptide (1)..(216): Ceres Seq. ID no. 12377286
  misc_feature (1)..(206): Pfam Name: pfkB family carbohydrate kinase Pfam Description: pfkB family carbohydrate kinase
  misc_feature (1)..(215): Homolog of NCBI NO: 585973 NR Description: FRUCTOKINASE
  misc_feature (1)..(216): Homolog of NCBI NO: 7434223 NR Description: fructokinase (EC 2.7.1.4) - beet
  misc_feature (1)..(214): Homolog of NCBI NO: 15221365 NR Description: fructokinase, putative
  misc_feature (1)..(215): Homolog of NCBI NO: 32765547 NR Description: fructokinase 2 [Lycopersicon hirsutum]
  misc_feature (1)..(215): Homolog of NCBI NO: 1915974 NR Description: fructokinase [Lycopersicon esculentum]
  misc_feature (1)..(214): Homolog of NCBI NO: 15221364 NR Description: fructokinase, putative; protein id: At1g06020.1
  misc_feature (1)..(214): Homolog of NCBI NO: 14423528 NR Description: putative fructokinase [Arabidopsis thaliana]
  misc_feature (1)..(214): Homolog of NCBI NO: 15224669 NR Description: putative fructokinase
  misc_feature (1)..(216): Homolog of NCBI NO: 21592495 NR Description: fructokinase-like protein [Arabidopsis thaliana]
  misc_feature (1)..(216): Homolog of NCBI NO: 15231692 NR Description: fructokinase-like protein
MFYRNPSADMLLRPDELNLDVIRSAKVFHYGSISLIVEPCRSAHLKAMEVAKEAGALLSYDPNLRLPLWPSKEEAQKQILSIWDKAEVIKVSDEELMFLTGSDKVDDETALSLWHSNLKLLLVTLGEKGCRYYTKSFRGSVDPFHVDAVDTTGAGDSFVGALLCKIVDDRAVLEDEARLREVLRLANACGAITTTKKGAIPALPTESEVQSLLKGN

SEQ ID NO: 24057 - protein, 207 aa, Arabidopsis thaliana
  peptide (1)..(207): Ceres Seq. ID no. 12377287
  misc_feature (1)..(197): Pfam Name: pfkB family carbohydrate kinase Pfam Description: pfkB family carbohydrate kinase
  misc_feature (1)..(206): Homolog of NCBI NO: 585973 NR Description: FRUCTOKINASE
  misc_feature (1)..(207): Homolog of NCBI NO: 7434223 NR Description: fructokinase (EC 2.7.1.4) - beet
  misc_feature (1)..(205): Homolog of NCBI NO: 15221365 NR Description: fructokinase, putative
  misc_feature (1)..(206): Homolog of NCBI NO: 32765547 NR Description: fructokinase 2 [Lycopersicon hirsutum]
  misc_feature (1)..(206): Homolog of NCBI NO: 1915974 NR Description: fructokinase [Lycopersicon esculentum]
  misc_feature (1)..(205): Homolog of NCBI NO: 15221364 NR Description: fructokinase, putative; protein id: At1g06020.1
  misc_feature (1)..(205): Homolog of NCBI NO: 14423528 NR Description: putative fructokinase [Arabidopsis thaliana]
  misc_feature (1)..(205): Homolog of NCBI NO: 15224669 NR Description: putative fructokinase
  misc_feature (1)..(207): Homolog of NCBI NO: 21592495 NR Description: fructokinase-like protein [Arabidopsis thaliana]
  misc_feature (1)..(207): Homolog of NCBI NO: 15231692 NR Description: fructokinase-like protein
MLLRPDELNLDVIRSAKVFHYGSISLIVEPCRSAHLKAMEVAKEAGALLSYDPNLRLPLWPSKEEAQKQILSIWDKAEVIKVSDEELMFLTGSDKVDDETALSLWHSNLKLLLVTLGEKGCRYYTKSFRGSVDPFHVDAVDTTGAGDSFVGALLCKIVDDRAVLEDEARLREVLRLANACGAITTTKKGAIPALPTESEVQSLLKGN

SEQ ID NO: 24058 - protein, 169 aa, Arabidopsis thaliana
  peptide (1)..(169): Ceres Seq. ID no. 12377288
  misc_feature (1)..(159): Pfam Name: pfkB family carbohydrate kinase Pfam Description: pfkB family carbohydrate kinase
  misc_feature (1)..(167): Homolog of NCBI NO: 14423528 NR Description: putative fructokinase [Arabidopsis thaliana]
  misc_feature (1)..(167): Homolog of NCBI NO: 15224669 NR Description: putative fructokinase
  misc_feature (1)..(168): Homolog of NCBI NO: 585973 NR Description: FRUCTOKINASE
  misc_feature (1)..(167): Homolog of NCBI NO: 15221365 NR Description: fructokinase, putative
  misc_feature (1)..(168): Homolog of NCBI NO: 1915974 NR Description: fructokinase [Lycopersicon esculentum]
  misc_feature (1)..(167): Homolog of NCBI NO: 15221364 NR Description: fructokinase, putative; protein id: At1g06020.1
  misc_feature (1)..(168): Homolog of NCBI NO: 32765547 NR Description: fructokinase 2 [Lycopersicon hirsutum]
  misc_feature (1)..(169): Homolog of NCBI NO: 7434223 NR Description: fructokinase (EC 2.7.1.4) - beet
  misc_feature (1)..(169): Homolog of NCBI NO: 21592495 NR Description: fructokinase-like protein [Arabidopsis thaliana]
  misc_feature (1)..(169): Homolog of NCBI NO: 15231692 NR Description: fructokinase-like protein
MEVAKEAGALLSYDPNLRLPLWPSKEEAQKQILSIWDKAEVIKVSDEELMFLTGSDKVDDETALSLWHSNLKLLLVTLGEKGCRYYTKSFRGSVDPFHVDAVDTTGAGDSFVGALLCKIVDDRAVLEDEARLREVLRLANACGAITTTKKGAIPALPTESEVQSLLKGN

SEQ ID NO: 24059 - DNA, 1294 bp, Arabidopsis thaliana
  misc_feature (1)..(1294): Ceres Seq. ID no. 12323541
  misc_feature: MA Experiment ID: 108434 Result: Down-regulated in Transcription
  misc_feature: MA Experiment 108434 PARAMETER Experiment Name: At_Root_Tips_cDNA_P Parameter: Tissue Value: Root Tips
  misc_feature: MA Experiment ID: 108594 Result: Up-regulated in Transcription
  misc_feature: MA Experiment 108594 PARAMETER Experiment Name: At_Ler-rhl_Root_cDNA_P Parameter: Plant Line Value: null
  misc_feature: MA Experiment ID: 20000184 Result: Down-regulated in Transcription
  misc_feature: MA Experiment 20000184 PARAMETER Experiment Name: At_Shoots__P Parameter: Age (day) Value: 7
  misc_feature: MA Experiment 20000184 PARAMETER Experiment Name: At_Shoots__P Parameter: Tissue Value: Shoots vs. Whole Plant
  misc_feature: MA Experiment ID: 20000185 Result: Down-regulated in Transcription
  misc_feature: MA Experiment 20000185 PARAMETER Experiment Name: At_Roots__P Parameter: Age (day) Value: 7 vs. 21
  misc_feature: MA Experiment 20000185 PARAMETER Experiment Name: At_Roots__P Parameter: Organism Value: A. thaliana
  misc_feature: MA Experiment 20000185 PARAMETER Experiment Name: At_Roots__P Parameter: Tissue Value: Roots vs. Whole Plant
  misc_feature: MA Experiment ID: 20000227 Result: Down-regulated in Transcription
  misc_feature: MA Experiment 20000227 PARAMETER Experiment Name: At_Root-Tips-vs-Tops_P Parameter: Tissue Value: Root Tips vs. Root Tops
  misc_feature: MA Experiment ID: 20000265 Result: Down-regulated in Transcription
  misc_feature: MA Experiment 20000265 PARAMETER Experiment Name: At_Open_Flower_P Parameter: Age (day) Value: 21
  misc_feature: MA Experiment 20000265 PARAMETER Experiment Name: At_Open_Flower_P Parameter: Plant Line Value: WS
  misc_feature: MA Experiment 20000265 PARAMETER Experiment Name: At_Open_Flower_P Parameter: Tissue Value: Closed Flower vs. Whole Plant
  misc_feature: MA Experiment ID: 20000438 Result: Down-regulated in Transcription
  misc_feature: MA Experiment 20000438 PARAMETER Experiment Name: At_Shoots__P Parameter: Age (day) Value: 14
  misc_feature: MA Experiment 20000438 PARAMETER Experiment Name: At_Shoots__P Parameter: Tissue Value: Shoots vs. Whole Plant
  misc_feature: MA Experiment ID: 20000439 Result: Down-regulated in Transcription
  misc_feature: MA Experiment 20000439 PARAMETER Experiment Name: At_Roots__P Parameter: Age (day) Value: 14 vs. 21
  misc_feature: MA Experiment 20000439 PARAMETER Experiment Name: At_Roots__P Parameter: Organism Value: A. thaliana
  misc_feature: MA Experiment 20000439 PARAMETER Experiment Name: At_Roots__P Parameter: Tissue Value: Roots vs. Whole Plant
  misc_feature: MA Experiment ID: 20000451 Result: Up-regulated in Transcription
  misc_feature: MA Experiment 20000451 PARAMETER Experiment Name: At_CS6879_Shoots-Roots_P Parameter: Age (day) Value: 14
  misc_feature: MA Experiment 20000451 PARAMETER Experiment Name: At_CS6879_Shoots-Roots_P Parameter: Organism Value: A. thaliana
  misc_feature: MA Experiment 20000451 PARAMETER Experiment Name: At_CS6879_Shoots-Roots_P Parameter: Plant Line Value: CS6879 vs. WS
  misc_feature: MA Experiment 20000451 PARAMETER Experiment Name: At_CS6879_Shoots-Roots_P Parameter: Tissue Value: Roots
  misc_feature: MA Experiment ID: 20000495 Result: Up-regulated in Transcription
  misc_feature: MA Experiment 20000495 PARAMETER Experiment Name: At_Guard_Cells_P Parameter: Harvest Date Value: 8/2/2002
  misc_feature: MA Experiment 20000495 PARAMETER Experiment Name: At_Guard_Cells_P Parameter: Organism Value: A. thaliana
  misc_feature: MA Experiment 20000495 PARAMETER Experiment Name: At_Guard_Cells_P Parameter: Tissue Value: Guard Cells vs. Leaves
  misc_feature: MA Experiment ID: 20000527 Result: Down-regulated in Transcription
  misc_feature: MA Experiment 20000527 PARAMETER Experiment Name: At_10percent_PEG_P Parameter: Age (day) Value: 20
  misc_feature: MA Experiment 20000527 PARAMETER Experiment Name: At_10percent_PEG_P Parameter: Organism Value: A. thaliana
  misc_feature: MA Experiment 20000527 PARAMETER Experiment Name: At_10percent_PEG_P Parameter: Plant Line Value: WS
  misc_feature: MA Experiment 20000527 PARAMETER Experiment Name: At_10percent_PEG_P Parameter: Timepoint (day) Value: 20
  misc_feature: MA Experiment 20000527 PARAMETER Experiment Name: At_10percent_PEG_P Parameter: Tissue Value: Whole Plant
  misc_feature: MA Experiment 20000527 PARAMETER Experiment Name: At_10percent_PEG_P Parameter: Treatment Value: 10percent PEG vs. No Treatment
  misc_feature: MA Experiment ID: 20001248 Result: Down-regulated in Transcription
  misc_feature: MA Experiment 20001248 PARAMETER Experiment Name: At_Far-red-induction_P Parameter: Age (day) Value: 7
  misc_feature: MA Experiment 20001248 PARAMETER Experiment Name: At_Far-red-induction_P Parameter: Light Value: Far-red vs. White
  misc_feature: MA Experiment 20001248 PARAMETER Experiment Name: At_Far-red-induction_P Parameter: Organism Value: A. thaliana
  misc_feature: MA Experiment 20001248 PARAMETER Experiment Name: At_Far-red-induction_P Parameter: Plant Line Value: Columbia
  misc_feature: MA Experiment 20001248 PARAMETER Experiment Name: At_Far-red-induction_P Parameter: Timepoint (hr) Value: 4
  misc_feature: MA Experiment 20001248 PARAMETER Experiment Name: At_Far-red-induction_P Parameter: Tissue Value: Whole Plant
  misc_feature: MA Experiment ID: 20001556 Result: Down-regulated in Transcription
  misc_feature: MA Experiment 20001556 PARAMETER Experiment Name: At_Drought_Soil_Dry_P Parameter: Age (day) Value: 26
  misc_feature: MA Experiment 20001556 PARAMETER Experiment Name: At_Drought_Soil_Dry_P Parameter: Organism Value: A. thaliana
  misc_feature: MA Experiment 20001556 PARAMETER Experiment Name: At_Drought_Soil_Dry_P Parameter: Plant Line Value: WS
  misc_feature: MA Experiment 20001556 PARAMETER Experiment Name: At_Drought_Soil_Dry_P Parameter: Post Timepoint (hr) Value: None
  misc_feature: MA Experiment 20001556 PARAMETER Experiment Name: At_Drought_Soil_Dry_P Parameter: Post-Treatment Value: None
  misc_feature: MA Experiment 20001556 PARAMETER Experiment Name: At_Drought_Soil_Dry_P Parameter: Timepoint (day) Value: 12
  misc_feature: MA Experiment 20001556 PARAMETER Experiment Name: At_Drought_Soil_Dry_P Parameter: Treatment Value: Drought vs. No Drought
  misc_feature: MA Experiment ID: 20001558 Result: Up-regulated in Transcription
  misc_feature: MA Experiment 20001558 PARAMETER Experiment Name: At_Drought_Soil_Dry_P Parameter: Age (day) Value: 27
  misc_feature: MA Experiment 20001558 PARAMETER Experiment Name: At_Drought_Soil_Dry_P Parameter: Organism Value: A. thaliana
  misc_feature: MA Experiment 20001558 PARAMETER Experiment Name: At_Drought_Soil_Dry_P Parameter: Plant Line Value: WS
  misc_feature: MA Experiment 20001558 PARAMETER Experiment Name: At_Drought_Soil_Dry_P Parameter: Post Timepoint (hr) Value: 6
  misc_feature: MA Experiment 20001558 PARAMETER Experiment Name: At_Drought_Soil_Dry_P Parameter: Post-Treatment Value: Re-Water vs. No Drought
  misc_feature: MA Experiment 20001558 PARAMETER Experiment Name: At_Drought_Soil_Dry_P Parameter: Timepoint (day) Value: 13
  misc_feature: MA Experiment 20001558 PARAMETER Experiment Name: At_Drought_Soil_Dry_P Parameter: Treatment Value: Drought vs. No Drought
  misc_feature: MA Experiment ID: 20001907 Result: Down-regulated in Transcription
  misc_feature: MA Experiment 20001907 PARAMETER Experiment Name: At_Drought_Reproduction_P Parameter: Age (day) Value: 37
  misc_feature: MA Experiment 20001907 PARAMETER Experiment Name: At_Drought_Reproduction_P Parameter: Organism Value: A. thaliana
  misc_feature: MA Experiment 20001907 PARAMETER Experiment Name: At_Drought_Reproduction_P Parameter: Plant Line Value: WS
  misc_feature: MA Experiment 20001907 PARAMETER Experiment Name: At_Drought_Reproduction_P Parameter: Timepoint (day) Value: 7
  misc_feature: MA Experiment 20001907 PARAMETER Experiment Name: At_Drought_Reproduction_P Parameter: Tissue Value: Siliques
  misc_feature: MA Experiment 20001907 PARAMETER Experiment Name: At_Drought_Reproduction_P Parameter: Treatment Value: Drought vs. No Drought
atgatcagtcaagaaatacgcgtttaatcgactttttctctctctatatacaattctttcaaaatgatcaaacatagtcataagttccgcaccaatcagtggaaataactaatcaaaactctgtatcatcgttttcaaaacctaattaatggctgtaacaaatcttcctacttgtgatggtttgttcattatcagtcttattgtcatcgtttcttcaatatttgggacatcatctgcgcaactaaacgcaacattttactctgggacttgtcccaacgcctctgccatcgtacgcagcactattcagcaagctcttcaatccgatacaagaatcggagccagcctcatccgccttcattttcatgactgttttgttaatggatgtgatgcatcgatcttgcttgacgacactggaagcatccagagcgagaagaacgctggtccgaatgtaaactcagctagaggattcaacgttgttgataatatcaagactgccctcgaaaacgcttgccctggtgttgtctcttgctctgacgttttagcccttgcctctgaggcttctgtgtctttggcaggagggccatcatggactgtattattaggaagaagagatagtctcacggccaacctcgccggtgcaaattcgtccattccttctcccatcgaaagcctaagcaacatcacatttaaattttcggctgtcgggcttaatacaaacgatctggtagccttatctggtgcgcatacgttcgggcgtgctcgatgtggagtattcaacaacagactatttaacttcagcgggacaggaaatcccgatccaactctaaactcaacgcttctgagcactcttcaacagctatgtcctcaaaacggtagcgcatcaacgatcaccaatcttgatttgagcacaccagatgcgttcgataacaattacttcgccaaccttcagagcaacgatggacttcttcagtcagaccaagagctgttctctaccaccggttcatccaccatcgcgattgttacttcgttcgcaagtaaccagactctgttttttcaggcctttgcacagtccatgatcaatatggggaatattagtcccttgactgggagtaatggagagattaggttagactgtaagaaggttaatggaagttgatttccttaaagctcattttctttgaaaaaacattggcaagctttggttgaataatttttgttatcataatcacatcaaatctgtattgcacttaaatcattctaagcaaatttatgataaatgaaattaaatcaaaac

SEQ ID NO: 24060 - protein, 335 aa, Arabidopsis thaliana
  peptide (1)..(335): Ceres Seq. ID no. 12323542
  misc_feature (48)..(297): Pfam Name: Peroxidase Pfam Description: Peroxidase
  misc_feature (14)..(333): Homolog of NCBI NO: 2129513 NR Description: peroxidase (EC 1.11.1.7) A3a precursor - Japanese
  misc_feature (30)..(335): Homolog of NCBI NO: 1279654 NR Description: peroxidase [Populus balsamifera subsp.
  misc_feature (14)..(335): Homolog of NCBI NO: 5002348 NR Description: peroxidase 5 precursor [Phaseolus vulgaris]
  misc_feature (12)..(333): Homolog of NCBI NO: 8546851 NR Description: peroxidase [Ipomoea batatas]
  misc_feature (1)..(334): Homolog of NCBI NO: 21594792 NR Description: peroxidase [Arabidopsis thaliana]
  misc_feature (1)..(334): Homolog of NCBI NO: 15240141 NR Description: peroxidase, putative
  misc_feature (31)..(335): Homolog of NCBI NO: 1730490 NR Description: Peroxidase A2
  misc_feature (31)..(335): Homolog of NCBI NO: 11513747 NR Description: Chain A, Arabidopsis Thaliana Peroxidase A2
  misc_feature (1)..(335): Homolog of NCBI NO: 21593262 NR Description: peroxidase [Arabidopsis thaliana]
  misc_feature (1)..(335): Homolog of NCBI NO: 15240140 NR Description: peroxidase, putative
MAVTNLPTCDGLFIISLIVIVSSIFGTSSAQLNATFYSGTCPNASAIVRSTIQQALQSDTRIGASLIRLHFHDCFVNGCDASILLDDTGSIQSEKNAGPNVNSARGFNVVDNIKTALENACPGVVSCSDVLALASEASVSLAGGPSWTVLLGRRDSLTANLAGANSSIPSPIESLSNITFKFSAVGLNTNDLVALSGAHTFGRARCGVFNNRLFNFSGTGNPDPTLNSTLLSTLQQLCPQNGSASTITNLDLSTPDAFDNNYFANLQSNDGLLQSDQELFSTTGSSTIAIVTSFASNQTLFFQAFAQSMINMGNISPLTGSNGEIRLDCKKVNGS

SEQ ID NO: 24061 - DNA, 1339 bp, Arabidopsis thaliana
  misc_feature (1)..(1339): Ceres Seq. ID no. 12371549
  misc_feature: MA Experiment ID: 108461 Result: Up-regulated in Transcription
  misc_feature: MA Experiment 108461 PARAMETER Experiment Name: At_Germinating_Seeds_cDNA_P Parameter: Age (day) Value: 1 vs. 0
  misc_feature: MA Experiment 108461 PARAMETER Experiment Name: At_Germinating_Seeds_cDNA_P Parameter: Tissue Value: Germinating Seeds
  misc_feature: MA Experiment ID: 108462 Result: Up-regulated in Transcription
  misc_feature: MA Experiment 108462 PARAMETER Experiment Name: At_Germinating_Seeds_cDNA_P Parameter: Age (day) Value: 2 vs. 0
  misc_feature: MA Experiment 108462 PARAMETER Experiment Name: At_Germinating_Seeds_cDNA_P Parameter: Tissue Value: Germinating Seeds
  misc_feature: MA Experiment ID: 108464 Result: Up-regulated in Transcription
  misc_feature: MA Experiment 108464 PARAMETER Experiment Name: At_Germinating_Seeds_cDNA_P Parameter: Age (day) Value: 4 vs. 0
  misc_feature: MA Experiment 108464 PARAMETER Experiment Name: At_Germinating_Seeds_cDNA_P Parameter: Tissue Value: Germinating Seeds
  misc_feature: MA Experiment ID: 108573 Result: Down-regulated in Transcription
  misc_feature: MA Experiment 108573 PARAMETER Experiment Name: At_Drought_cDNA_P Parameter: Timepoint (hr) Value: 6
  misc_feature: MA Experiment 108573 PARAMETER Experiment Name: At_Drought_cDNA_P Parameter: Tissue Value: Aerial
  misc_feature: MA Experiment 108573 PARAMETER Experiment Name: At_Drought_cDNA_P Parameter: Treatment Value: Drought vs. No Drought
  misc_feature: MA Experiment ID: 108595 Result: Down-regulated in Transcription
  misc_feature: MA Experiment 108595 PARAMETER Experiment Name: At_Ler-pi_Ovule_cDNA_P Parameter: Plant Line Value: null
  misc_feature: MA Experiment ID: 20000179 Result: Up-regulated in Transcription
  misc_feature: MA Experiment 20000179 PARAMETER Experiment Name: At_Germinating_Seeds_P Parameter: Age (hr) Value: 6 vs. 0
  misc_feature: MA Experiment 20000179 PARAMETER Experiment Name: At_Germinating_Seeds_P Parameter: Tissue Value: Germinating Seeds
  misc_feature: MA Experiment ID: 20000180 Result: Up-regulated in Transcription
  misc_feature: MA Experiment 20000180 PARAMETER Experiment Name: At_Germinating_Seeds_P Parameter: Age (hr) Value: 24 vs. 0
  misc_feature: MA Experiment 20000180 PARAMETER Experiment Name: At_Germinating_Seeds_P Parameter: Tissue Value: Germinating Seeds
ctttataaaagcttatcgctaatttgacagaacactagaacagttctctctttttgtcgacagtcttcttcttcttcttcttcttcgattggatctggaactgaactcaaattgggaagaattttgacatggaggaggaccggtgttcgatcaaggatgatgcaactcaattgataggtaacaccccaatggtatatctgaacaacattgtggatggttgtgtagctcgtattgcagctaagcttgaaatgatggagccttgctctagtgtcaaggagcgaattgcttatggtatgattaaagatgcagaagacaagggattgattactcctgggaagagcacactgattgaggctacctctggtaacaccgggattggtttagccttcatcggtgcagctaaaggttacaaagtggtcctcacaatgccctcatcaatgagccttgagagaaaaatcattcttttagcattaggtgcggaggttcacctcacagatcctagtaaaggcgttcaaggaataatcgacaaagctgaagagatatgtagcaaaaatccagatagtatcatgctagaacagttcaaaaatccttcaaacccgcaaactcattatcgaaccacgggtccagagatatggagagactctgcaggggaagtagacatattggttgccggtgttggaactggtggaacgctttccggatcaggaagattcctcaaggagaagaataaagactttaaggtttatggtgtggaacctacagaaagtgcggtaataagtggaggcaaaccgggtacacatttgatccaaggtattggggctggactcatcccagacaatttggatttcaacgttcttgatgaagtcatccaagtgacaagtgtggaagcaattgaaacagccaaacttcttgccctgaaagaaggattactggtgggaatatcttctggagctgctgcagccgctgcgataaaggtggcaaagcggccagaaaacgccggcaaactcatagttgtgattttccctagcggtggggaacgttacctatcgacctcattgttcgaatcagtcagacatgaagcagagaatttgccaattcaatgaggcttttacacgacctgacttggttcgttttggtgaaaaagtaccaagatttcggttcgacatttacactgtcatagtttcatgaactttaagatttcagatgatgtatgatctctaatctctagcctctaaggtggactgtcctttgacattctattggtggtttttttctagctaatatatgtgtaagtctgtaaaacttttgttgacaatgaatctagaactatataatggcc

SEQ ID NO: 24062 - protein, 324 aa, Arabidopsis thaliana
  peptide (1)..(324): Ceres Seq. ID no. 12371550
  misc_feature (12)..(301): Pfam Name: Pyridoxal-phosphate dependent enzyme Pfam Description: Pyridoxal-phosphate dependent enzyme
  misc_feature (1)..(324): Homolog of NCBI NO: 12081917 NR Description: cytosolic cysteine synthase [Solanum tuberosum]
  misc_feature (1)..(321): Homolog of NCBI NO: 2493895 NR Description: Cysteine synthase (O-acetylserine sulfhydrylase)
  misc_feature (4)..(324): Homolog of NCBI NO: 38350579 NR Description: cysteine synthase [Nicotiana plumbaginifolia]
  misc_feature (3)..(324): Homolog of NCBI NO: 2245144 NR Description: O-acetylserine(thiol) lyase [Brassica juncea]
  misc_feature (3)..(324): Homolog of NCBI NO: 21553635 NR Description: cysteine synthase [Arabidopsis thaliana]
  misc_feature (3)..(324): Homolog of NCBI NO: 15241111 NR Description: cysteine synthase
  misc_feature (3)..(324): Homolog of NCBI NO: 15241112 NR Description: cysteine synthase - like
  misc_feature (1)..(324): Homolog of NCBI NO: 21593263 NR Description: putative cysteine synthase [Arabidopsis thaliana]
  misc_feature (1)..(324): Homolog of NCBI NO: 18397061 NR Description: putative cysteine synthase
  misc_feature (1)..(324): Homolog of NCBI NO: 12322845 NR Description: putative cysteine synthase; 39489-37437
MEEDRCSIKDDATQLIGNTPMVYLNNIVDGCVARIAAKLEMMEPCSSVKERIAYGMIKDAEDKGLITPGKSTLIEATSGNTGIGLAFIGAAKGYKVVLTMPSSMSLERKIILLALGAEVHLTDPSKGVQGIIDKAEEICSKNPDSIMLEQFKNPSNPQTHYRTTGPEIWRDSAGEVDILVAGVGTGGTLSGSGRFLKEKNKDFKVYGVEPTESAVISGGKPGTHLIQGIGAGLIPDNLDFNVLDEVIQVTSVEAIETAKLLALKEGLLVGISSGAAAAAAIKVAKRPENAGKLIVVIFPSGGERYLSTSLFESVRHEAENLPIQ

SEQ ID NO: 24063 - protein, 304 aa, Arabidopsis thaliana
  peptide (1)..(304): Ceres Seq. ID no. 12371551
  misc_feature (1)..(281): Pfam Name: Pyridoxal-phosphate dependent enzyme Pfam Description: Pyridoxal-phosphate dependent enzyme
  misc_feature (1)..(304): Homolog of NCBI NO: 12081917 NR Description: cytosolic cysteine synthase [Solanum tuberosum]
  misc_feature (1)..(301): Homolog of NCBI NO: 2493895 NR Description: Cysteine synthase (O-acetylserine sulfhydrylase)
  misc_feature (1)..(304): Homolog of NCBI NO: 38350579 NR Description: cysteine synthase [Nicotiana plumbaginifolia]
  misc_feature (1)..(304): Homolog of NCBI NO: 2245144 NR Description: O-acetylserine(thiol) lyase [Brassica juncea]
  misc_feature (1)..(304): Homolog of NCBI NO: 21553635 NR Description: cysteine synthase [Arabidopsis thaliana]
  misc_feature (1)..(304): Homolog of NCBI NO: 15241111 NR Description: cysteine synthase
  misc_feature (1)..(304): Homolog of NCBI NO: 15241112 NR Description: cysteine synthase - like
  misc_feature (1)..(304): Homolog of NCBI NO: 21593263 NR Description: putative cysteine synthase [Arabidopsis thaliana]
  misc_feature (1)..(304): Homolog of NCBI NO: 18397061 NR Description: putative cysteine synthase
  misc_feature (1)..(304): Homolog of NCBI NO: 12322845 NR Description: putative cysteine synthase; 39489-37437
MVYLNNIVDGCVARIAAKLEMMEPCSSVKERIAYGMIKDAEDKGLITPGKSTLIEATSGNTGIGLAFIGAAKGYKVVLTMPSSMSLERKIILLALGAEVHLTDPSKGVQGIIDKAEEICSKNPDSIMLEQFKNPSNPQTHYRTTGPEIWRDSAGEVDILVAGVGTGGTLSGSGRFLKEKNKDFKVYGVEPTESAVISGGKPGTHLIQGIGAGLIPDNLDFNVLDEVIQVTSVEAIETAKLLALKEGLLVGISSGAAAAAAIKVAKRPENAGKLIVVIFPSGGERYLSTSLFESVRHEAENLPIQ

SEQ ID NO: 24064 - protein, 284 aa, Arabidopsis thaliana
  peptide (1)..(284): Ceres Seq. ID no. 12371552
  misc_feature (1)..(261): Pfam Name: Pyridoxal-phosphate dependent enzyme Pfam Description: Pyridoxal-phosphate dependent enzyme
  misc_feature (1)..(284): Homolog of NCBI NO: 12081917 NR Description: cytosolic cysteine synthase [Solanum tuberosum]
  misc_feature (1)..(281): Homolog of NCBI NO: 2493895 NR Description: Cysteine synthase (O-acetylserine sulfhydrylase)
  misc_feature (1)..(284): Homolog of NCBI NO: 38350579 NR Description: cysteine synthase [Nicotiana plumbaginifolia]
  misc_feature (1)..(284): Homolog of NCBI NO: 2245144 NR Description: O-acetylserine(thiol) lyase [Brassica juncea]
  misc_feature (1)..(284): Homolog of NCBI NO: 21553635 NR Description: cysteine synthase [Arabidopsis thaliana]
  misc_feature (1)..(284): Homolog of NCBI NO: 15241111 NR Description: cysteine synthase
  misc_feature (1)..(284): Homolog of NCBI NO: 15241112 NR Description: cysteine synthase - like
  misc_feature (1)..(284): Homolog of NCBI NO: 21593263 NR Description: putative cysteine synthase [Arabidopsis thaliana]
  misc_feature (1)..(284): Homolog of NCBI NO: 18397061 NR Description: putative cysteine synthase
  misc_feature (1)..(284): Homolog of NCBI NO: 12322845 NR Description: putative cysteine synthase; 39489-37437
MMEPCSSVKERIAYGMIKDAEDKGLITPGKSTLIEATSGNTGIGLAFIGAAKGYKVVLTMPSSMSLERKIILLALGAEVHLTDPSKGVQGIIDKAEEICSKNPDSIMLEQFKNPSNPQTHYRTTGPEIWRDSAGEVDILVAGVGTGGTLSGSGRFLKEKNKDFKVYGVEPTESAVISGGKPGTHLIQGIGAGLIPDNLDFNVLDEVIQVTSVEAIETAKLLALKEGLLVGISSGAAAAAAIKVAKRPENAGKLIVVIFPSGGERYLSTSLFESVRHEAENLPIQ

SEQ ID NO: 24065 - DNA, 1350 bp, Arabidopsis thaliana
  misc_feature (1)..(1350): Ceres Seq. ID no. 12339539
  misc_feature: MA Experiment ID: 108434 Result: Up-regulated in Transcription
  misc_feature: MA Experiment 108434 PARAMETER Experiment Name: At_Root_Tips_cDNA_P Parameter: Tissue Value: Root Tips
  misc_feature: MA Experiment ID: 108573 Result: Up-regulated in Transcription
  misc_feature: MA Experiment 108573 PARAMETER Experiment Name: At_Drought_cDNA_P Parameter: Timepoint (hr) Value: 6
  misc_feature: MA Experiment 108573 PARAMETER Experiment Name: At_Drought_cDNA_P Parameter: Tissue Value: Aerial
  misc_feature: MA Experiment 108573 PARAMETER Experiment Name: At_Drought_cDNA_P Parameter: Treatment Value: Drought vs. No Drought
  misc_feature: MA Experiment ID: 108579 Result: Down-regulated in Transcription
  misc_feature: MA Experiment 108579 PARAMETER Experiment Name: At_4deg_Cold_cDNA_P Parameter: Temperature (deg C) Value: 4 vs. 22
  misc_feature: MA Experiment 108579 PARAMETER Experiment Name: At_4deg_Cold_cDNA_P Parameter: Timepoint (hr) Value: 6
  misc_feature: MA Experiment 108579 PARAMETER Experiment Name: At_4deg_Cold_cDNA_P Parameter: Tissue Value: Aerial
  misc_feature: MA Experiment ID: 108585 Result: Up-regulated in Transcription
  misc_feature: MA Experiment 108585 PARAMETER Experiment Name: At_5mM_NaNP_cDNA_P Parameter: Timepoint (hr) Value: 6
  misc_feature: MA Experiment 108585 PARAMETER Experiment Name: At_5mM_NaNP_cDNA_P Parameter: Tissue Value: Aerial
  misc_feature: MA Experiment 108585 PARAMETER Experiment Name: At_5mM_NaNP_cDNA_P Parameter: Treatment Value: null
  misc_feature: MA Experiment ID: 20000111 Result: Up-regulated in Transcription
  misc_feature: MA Experiment 20000111 PARAMETER Experiment Name: At_42deg_Heat_cDNA_P Parameter: Temperature (deg C) Value: 42 vs. 22
  misc_feature: MA Experiment 20000111 PARAMETER Experiment Name: At_42deg_Heat_cDNA_P Parameter: Timepoint (hr) Value: 6
  misc_feature: MA Experiment 20000111 PARAMETER Experiment Name: At_42deg_Heat_cDNA_P Parameter: Tissue Value: Aerial
  misc_feature: MA Experiment ID: 20000173 Result: Up-regulated in Transcription
  misc_feature: MA Experiment 20000173 PARAMETER Experiment Name: At_42deg_Heat_P Parameter: Age (day) Value: 14
  misc_feature: MA Experiment 20000173 PARAMETER Experiment Name: At_42deg_Heat_P Parameter: Organism Value: A. thaliana
  misc_feature: MA Experiment 20000173 PARAMETER Experiment Name: At_42deg_Heat_P Parameter: Plant Line Value: WS
  misc_feature: MA Experiment 20000173 PARAMETER Experiment Name: At_42deg_Heat_P Parameter: Temperature (deg C) Value: 42 vs. 22
  misc_feature: MA Experiment 20000173 PARAMETER Experiment Name: At_42deg_Heat_P Parameter: Timepoint (hr) Value: 6
  misc_feature: MA Experiment 20000173 PARAMETER Experiment Name: At_42deg_Heat_P Parameter: Tissue Value: Aerial
  misc_feature: MA Experiment ID: 20000224 Result: Down-regulated in Transcription
  misc_feature: MA Experiment ID: 20001450 Result: Up-regulated in Transcription
  misc_feature: MA Experiment 20001450 PARAMETER Experiment Name: At_Far-red-induction_P Parameter: Age (day) Value: 7
  misc_feature: MA Experiment 20001450 PARAMETER Experiment Name: At_Far-red-induction_P Parameter: Light Value: Far-red vs. White
  misc_feature: MA Experiment 20001450 PARAMETER Experiment Name: At_Far-red-induction_P Parameter: Organism Value: A. thaliana
  misc_feature: MA Experiment 20001450 PARAMETER Experiment Name: At_Far-red-induction_P Parameter: Plant Line Value: Columbia
  misc_feature: MA Experiment 20001450 PARAMETER Experiment Name: At_Far-red-induction_P Parameter: Timepoint (hr) Value: 8
  misc_feature: MA Experiment 20001450 PARAMETER Experiment Name: At_Far-red-induction_P Parameter: Tissue Value: Whole Plant
aaaactggatgactggaatatccatttgcttttgagcgagtgatagaagcggaggcgattttctagggtttttgctcggaatcgatttcacgatgggaacgagcagcgatccgattcaagatggttccgatgagcagcagaagcgatcagagatctatacatacgaagcgccatggcacatctacgcaatgaattggagcgttcgtcgcgataagaagtatcgtctcgccatcactagcctcctcgagcaatacccgaaccgtgtcgagattgtgcagctcgatgaatccaatggtgagatccgttccgatcctaacctctcctttgagcatccttatccaccaacgaagaccattttcatacctgacaaggaatgccaaagacctgatcttctcgctacttcaagtgatttccttcgtttatggagaatcgctgatgatcattcccgtgttgagctcaaatcttgtctcaatagcaataagaacagtgagttttgtggtcctcttacttcttttgattggaatgaagctgagccacgtcgaattggaacatctagtactgatacgacttgtactatctgggacattgagcgtgaagctgttgatactcagcttattgctcatgataaggaagtttttgatattgcttggggtggtgttggtgtttttgcatctgtttcagctgatggctccgttagggtgtttgatcttcgtgataaggaacattcgacgattatctatgagagctccgagcctgatactcctttagtgcgtcttggttggaacaaacaggatcctaggtacatggctactattatcatggacagtgctaaagttgtggtgcttgacattcgttttccggctcttcctgtggttgagcttcaacgacatcaagctagtgtcaatgccattgcttgggctcctcatagctcttgtcacatttgtactgctggagatgattctcaagctttgatttgggatatttcatccatgggacagcatgttgaaggtggtcttgaccctattctagcttacactgctggtgctgagattgagcagcttcagtggtcctcttctcagcctgattgggtcgcaattgctttctctactaagctgcaaattctcagggtttgatcttttcaaagaatttctcatctcttgtcagattagattttactcattttctatcgtattaggggtctcgttacccttgttactatcctcaagatgtaaagactgttctcaatcgaattaatgaatctgtttgatcttgttgctatactcaagatgcaaaacttagccctgactcttattgatgtatgattgataagaaaggataatcctttgatct

SEQ ID NO: 24066 - protein, 346 aa, Arabidopsis thaliana
  peptide (1)..(346): Ceres Seq. ID no. 12339541
  misc_feature (11)..(135): Homolog of NCBI NO: 37719680 NR Description: WD40 repeat protein [Zea mays]
  misc_feature (223)..(346): Homolog of NCBI NO: 37719680 NR Description: WD40 repeat protein [Zea mays]
  misc_feature (33)..(346): Homolog of NCBI NO: 13346196 NR Description: WD1521 [Gossypium hirsutum]
  misc_feature (1)..(346): Homolog of NCBI NO: 22324809 NR Description: WD-repeat protein GhTTG4 [Gossypium hirsutum]
  misc_feature (1)..(346): Homolog of NCBI NO: 28393624 NR Description: putative transcriptional regulator protein
  misc_feature (1)..(346): Homolog of NCBI NO: 15231593 NR Description: transcriptional regulator protein, putative
  misc_feature (1)..(346): Homolog of NCBI NO: 22324803 NR Description: WD-repeat protein GhTTG2 [Gossypium hirsutum]
  misc_feature (1)..(346): Homolog of NCBI NO: 21593264 NR Description: flower pigmentation protein ATAN11 [Arabidopsis
  misc_feature (1)..(346): Homolog of NCBI NO: 2290528 NR Description: ATAN11 [Arabidopsis thaliana]
  misc_feature (1)..(346): Homolog of NCBI NO: 15222113 NR Description: flower pigmentation protein ATAN11
MGTSSDPIQDGSDEQQKRSEIYTYEAPWHIYAMNWSVRRDKKYRLAITSLLEQYPNRVEIVQLDESNGEIRSDPNLSFEHPYPPTKTIFIPDKECQRPDLLATSSDFLRLWRIADDHSRVELKSCLNSNKNSEFCGPLTSFDWNEAEPRRIGTSSTDTTCTIWDIEREAVDTQLIAHDKEVFDIAWGGVGVFASVSADGSVRVFDLRDKEHSTIIYESSEPDTPLVRLGWNKQDPRYMATIIMDSAKVVVLDIRFPALPVVELQRHQASVNAIAWAPHSSCHICTAGDDSQALIWDISSMGQHVEGGLDPILAYTAGAEIEQLQWSSSQPDWVAIAFSTKLQILRV

SEQ ID NO: 24067 - protein, 314 aa, Arabidopsis thaliana
  peptide (1)..(314): Ceres Seq. ID no. 12339542
  misc_feature (1)..(103): Homolog of NCBI NO: 37719680 NR Description: WD40 repeat protein [Zea mays]
  misc_feature (191)..(314): Homolog of NCBI NO: 37719680 NR Description: WD40 repeat protein [Zea mays]
  misc_feature (1)..(314): Homolog of NCBI NO: 13346196 NR Description: WD1521 [Gossypium hirsutum]
  misc_feature (1)..(314): Homolog of NCBI NO: 22324809 NR Description: WD-repeat protein GhTTG4 [Gossypium hirsutum]
  misc_feature (1)..(314): Homolog of NCBI NO: 28393624 NR Description: putative transcriptional regulator protein
  misc_feature (1)..(314): Homolog of NCBI NO: 15231593 NR Description: transcriptional regulator protein, putative
  misc_feature (1)..(314): Homolog of NCBI NO: 22324803 NR Description: WD-repeat protein GhTTG2 [Gossypium hirsutum]
  misc_feature (1)..(314): Homolog of NCBI NO: 21593264 NR Description: flower pigmentation protein ATAN11 [Arabidopsis
  misc_feature (1)..(314): Homolog of NCBI NO: 2290528 NR Description: ATAN11 [Arabidopsis thaliana]
  misc_feature (1)..(314): Homolog of NCBI NO: 15222113 NR Description: flower pigmentation protein ATAN11
MNWSVRRDKKYRLAITSLLEQYPNRVEIVQLDESNGEIRSDPNLSFEHPYPPTKTIFIPDKECQRPDLLATSSDFLRLWRIADDHSRVELKSCLNSNKNSEFCGPLTSFDWNEAEPRRIGTSSTDTTCTIWDIEREAVDTQLIAHDKEVFDIAWGGVGVFASVSADGSVRVFDLRDKEHSTIIYESSEPDTPLVRLGWNKQDPRYMATIIMDSAKVVVLDIRFPALPVVELQRHQASVNAIAWAPHSSCHICTAGDDSQALIWDISSMGQHVEGGLDPILAYTAGAEIEQLQWSSSQPDWVAIAFSTKLQILRV

SEQ ID NO: 24068 - DNA, 1013 bp, Arabidopsis thaliana
  misc_feature (1)..(1013): Ceres Seq. ID no. 13488275
  misc_feature: MA Experiment ID: 108579 Result: Down-regulated in Transcription
  misc_feature: MA Experiment 108579 PARAMETER Experiment Name: At_4deg_Cold_cDNA_P Parameter: Temperature (deg C) Value: 4 vs. 22
  misc_feature: MA Experiment 108579 PARAMETER Experiment Name: At_4deg_Cold_cDNA_P Parameter: Timepoint (hr) Value: 6
  misc_feature: MA Experiment 108579 PARAMETER Experiment Name: At_4deg_Cold_cDNA_P Parameter: Tissue Value: Aerial
  misc_feature: MA Experiment ID: 108595 Result: Down-regulated in Transcription
  misc_feature: MA Experiment 108595 PARAMETER Experiment Name: At_Ler-pi_Ovule_cDNA_P Parameter: Plant Line Value: null
  misc_feature: MA Experiment ID: 20000179 Result: Up-regulated in Transcription
  misc_feature: MA Experiment 20000179 PARAMETER Experiment Name: At_Germinating_Seeds_P Parameter: Age (hr) Value: 6 vs. 0
  misc_feature: MA Experiment 20000179 PARAMETER Experiment Name: At_Germinating_Seeds_P Parameter: Tissue Value: Germinating Seeds
  misc_feature: MA Experiment ID: 20000224 Result: Down-regulated in Transcription
  misc_feature: MA Experiment ID: 20001248 Result: Up-regulated in Transcription
  misc_feature: MA Experiment 20001248 PARAMETER Experiment Name: At_Far-red-induction_P Parameter: Age (day) Value: 7
  misc_feature: MA Experiment 20001248 PARAMETER Experiment Name: At_Far-red-induction_P Parameter: Light Value: Far-red vs. White
  misc_feature: MA Experiment 20001248 PARAMETER Experiment Name: At_Far-red-induction_P Parameter: Organism Value: A. thaliana
  misc_feature: MA Experiment 20001248 PARAMETER Experiment Name: At_Far-red-induction_P Parameter: Plant Line Value: Columbia
  misc_feature: MA Experiment 20001248 PARAMETER Experiment Name: At_Far-red-induction_P Parameter: Timepoint (hr) Value: 4
  misc_feature: MA Experiment 20001248 PARAMETER Experiment Name: At_Far-red-induction_P Parameter: Tissue Value: Whole Plant
  misc_feature: MA Experiment ID: 20001450 Result: Up-regulated in Transcription
  misc_feature: MA Experiment 20001450 PARAMETER Experiment Name: At_Far-red-induction_P Parameter: Age (day) Value: 7
  misc_feature: MA Experiment 20001450 PARAMETER Experiment Name: At_Far-red-induction_P Parameter: Light Value: Far-red vs. White
  misc_feature: MA Experiment 20001450 PARAMETER Experiment Name: At_Far-red-induction_P Parameter: Organism Value: A. thaliana
  misc_feature: MA Experiment 20001450 PARAMETER Experiment Name: At_Far-red-induction_P Parameter: Plant Line Value: Columbia
  misc_feature: MA Experiment 20001450 PARAMETER Experiment Name: At_Far-red-induction_P Parameter: Timepoint (hr) Value: 8
  misc_feature: MA Experiment 20001450 PARAMETER Experiment Name: At_Far-red-induction_P Parameter: Tissue Value: Whole Plant
  misc_feature: MA Experiment ID: 20001451 Result: Up-regulated in Transcription
  misc_feature: MA Experiment 20001451 PARAMETER Experiment Name: At_Far-red-induction_P Parameter: Age (day) Value: 7
  misc_feature: MA Experiment 20001451 PARAMETER Experiment Name: At_Far-red-induction_P Parameter: Light Value: Far-red vs. White
  misc_feature: MA Experiment 20001451 PARAMETER Experiment Name: At_Far-red-induction_P Parameter: Organism Value: A. thaliana
  misc_feature: MA Experiment 20001451 PARAMETER Experiment Name: At_Far-red-induction_P Parameter: Plant Line Value: Columbia
  misc_feature: MA Experiment 20001451 PARAMETER Experiment Name: At_Far-red-induction_P Parameter: Timepoint (hr) Value: 24
  misc_feature: MA Experiment 20001451 PARAMETER Experiment Name: At_Far-red-induction_P Parameter: Tissue Value: Whole Plant
gcgatcacagagtgtcaaagcaatctgctttttctcctctcagattcaaaggttctctttgaagcttcgtaggtggttatactttgatggcggattatcatttcgtgtataaggacattgaaggagcgtcaactcaatgggatgatatccagcggaaattggggaatctaccggagaaggctccggctttcaaacctccggcgtatactccggcggaagacgagtcttcagctcctaaggatcaggcatggtttgataagaagacagaggaggagcttgaggatcttgaggacgacaaagatctcgacgatgatcgctttctcgaagaatacaggaagaagaggttgtctgagctaagagaggctgctaaagttaaaagatatggaacagtgactcccatctcgggctctgatttcgtgagggaggttacgcaagcttctgctgaagattgggttgttgtatgtctctataaagatggtgttgcagaatgtagtttgctattgggttgtctagacgaattgggtagtagatacccagcaacaaagttcgttaagataatatctactgattgtattccgaactaccctgattgcaatcttcctaccttgctggtgtaccaccatggcgccatcaaaggaactcatgtaggcttaaagagctttggccgtaggtgcaccccagagagtgtagccttacttctgtgtcaatcagagccagttcttaacgatggcaaaggaggagacgatgactcctcgagggaagctgtgatggctggagttcgaagacagttcatagaacgagtggtgaaggaccacgaagataaggataacgatgatggtggttacaatagtgattagaacttcaaagcttctctgtttatctctgttggttattgcttgttgagttggtgactggtaaacaaaagtgctgacttcttgtgtgatgtaatgttttttaaacattttgtaacttttgttcttttgaaagagacaggaacttcatgttgttttttg

SEQ ID NO: 24069 - protein, 256 aa, Arabidopsis thaliana
  peptide (1)..(256): Ceres Seq. ID no. 13488276
  misc_feature (14)..(249): Homolog of NCBI NO: 9957067 NR Description: IAP-associated factor Viaf1 [Danio rerio]
  misc_feature (16)..(249): Homolog of NCBI NO: 28574924 NR Description: viral iap associated factor CG18593-PA
  misc_feature (14)..(245): Homolog of NCBI NO: 12835481 NR Description: unnamed protein product [Mus musculus]
  misc_feature (14)..(245): Homolog of NCBI NO: 31560120 NR Description: IAP-associated factor VIAF1 [Mus musculus]
  misc_feature (14)..(245): Homolog of NCBI NO: 34875632 NR Description: similar to IAP-associated factor VIAF1 [Rattus
  misc_feature (16)..(250): Homolog of NCBI NO: 32966896 NR Description: IAP-associated factor Viaf1 [Branchiostoma
  misc_feature (14)..(244): Homolog of NCBI NO: 13129044 NR Description: IAP-associated factor VIAF1; phosducin-like 2
  misc_feature (1)..(250): Homolog of NCBI NO: 34906294 NR Description: unnamed protein product [Oryza sativa (japonica
  misc_feature (1)..(256): Homolog of NCBI NO: 21593265 NR Description: unknown [Arabidopsis thaliana]
  misc_feature (1)..(256): Homolog of NCBI NO: 15241349 NR Description: expressed protein [Arabidopsis thaliana]
MADYHFVYKDIEGASTQWDDIQRKLGNLPEKAPAFKPPAYTPAEDESSAPKDQAWFDKKTEEELEDLEDDKDLDDDRFLEEYRKKRLSELREAAKVKRYGTVTPISGSDFVREVTQASAEDWVVVCLYKDGVAECSLLLGCLDELGSRYPATKFVKIISTDCIPNYPDCNLPTLLVYHHGAIKGTHVGLKSFGRRCTPESVALLLCQSEPVLNDGKGGDDDSSREAVMAGVRRQFIERVVKDHEDKDNDDGGYNSD

SEQ ID NO: 24070 - DNA, 1789 bp, Arabidopsis thaliana
  misc_feature (1)..(1789): Ceres Seq. ID no. 13497310
  misc_feature: MA Experiment ID: 20000113 Result: Down-regulated in Transcription
  misc_feature: MA Experiment 20000113 PARAMETER Experiment Name: At_42deg_Heat_cDNA_P Parameter: Temperature (deg C) Value: 42 vs. 22
  misc_feature: MA Experiment 20000113 PARAMETER Experiment Name: At_42deg_Heat_cDNA_P Parameter: Timepoint (hr) Value: 8
  misc_feature: MA Experiment 20000113 PARAMETER Experiment Name: At_42deg_Heat_cDNA_P Parameter: Tissue Value: Aerial
  misc_feature: MA Experiment ID: 20000171 Result: Down-regulated in Transcription
  misc_feature: MA Experiment 20000171 PARAMETER Experiment Name: At_42deg_Heat_P Parameter: Age (day) Value: 14
  misc_feature: MA Experiment 20000171 PARAMETER Experiment Name: At_42deg_Heat_P Parameter: Organism Value: A. thaliana
  misc_feature: MA Experiment 20000171 PARAMETER Experiment Name: At_42deg_Heat_P Parameter: Plant Line Value: WS
  misc_feature: MA Experiment 20000171 PARAMETER Experiment Name: At_42deg_Heat_P Parameter: Temperature (deg C) Value: 42 vs. 22
  misc_feature: MA Experiment 20000171 PARAMETER Experiment Name: At_42deg_Heat_P Parameter: Timepoint (hr) Value: 1
  misc_feature: MA Experiment 20000171 PARAMETER Experiment Name: At_42deg_Heat_P Parameter: Tissue Value: Aerial
  misc_feature: MA Experiment ID: 20000173 Result: Down-regulated in Transcription
  misc_feature: MA Experiment 20000173 PARAMETER Experiment Name: At_42deg_Heat_P Parameter: Age (day) Value: 14
  misc_feature: MA Experiment 20000173 PARAMETER Experiment Name: At_42deg_Heat_P Parameter: Organism Value: A. thaliana
  misc_feature: MA Experiment 20000173 PARAMETER Experiment Name: At_42deg_Heat_P Parameter: Plant Line Value: WS
  misc_feature: MA Experiment 20000173 PARAMETER Experiment Name: At_42deg_Heat_P Parameter: Temperature (deg C) Value: 42 vs. 22
  misc_feature: MA Experiment 20000173 PARAMETER Experiment Name: At_42deg_Heat_P Parameter: Timepoint (hr) Value: 6
  misc_feature: MA Experiment 20000173 PARAMETER Experiment Name: At_42deg_Heat_P Parameter: Tissue Value: Aerial
  misc_feature: MA Experiment ID: 20000184 Result: Down-regulated in Transcription
  misc_feature: MA Experiment 20000184 PARAMETER Experiment Name: At_Shoots__P Parameter: Age (day) Value: 7
  misc_feature: MA Experiment 20000184 PARAMETER Experiment Name: At_Shoots__P Parameter: Tissue Value: Shoots vs. Whole Plant
  misc_feature: MA Experiment ID: 20000496 Result: Down-regulated in Transcription
  misc_feature: MA Experiment 20000496 PARAMETER Experiment Name: At_Guard_Cells_P Parameter: Harvest Date Value: 7/19/2002
  misc_feature: MA Experiment 20000496 PARAMETER Experiment Name: At_Guard_Cells_P Parameter: Organism Value: Canola
  misc_feature: MA Experiment 20000496 PARAMETER Experiment Name: At_Guard_Cells_P Parameter: Tissue Value: Guard Cells vs. Leaves
  misc_feature: MA Experiment ID: 20001451 Result: Down-regulated in Transcription
  misc_feature: MA Experiment 20001451 PARAMETER Experiment Name: At_Far-red-induction_P Parameter: Age (day) Value: 7
  misc_feature: MA Experiment 20001451 PARAMETER Experiment Name: At_Far-red-induction_P Parameter: Light Value: Far-red vs. White
  misc_feature: MA Experiment 20001451 PARAMETER Experiment Name: At_Far-red-induction_P Parameter: Organism Value: A. thaliana
  misc_feature: MA Experiment 20001451 PARAMETER Experiment Name: At_Far-red-induction_P Parameter: Plant Line Value: Columbia
  misc_feature: MA Experiment 20001451 PARAMETER Experiment Name: At_Far-red-induction_P Parameter: Timepoint (hr) Value: 24
  misc_feature: MA Experiment 20001451 PARAMETER Experiment Name: At_Far-red-induction_P Parameter: Tissue Value: Whole Plant
agttatttcatgaaaaaccaatctagggttttgaactctgaattgggggattttgacctttcagttttgtgggatcaaattttgaatttcgagggttatggttcctactgtttcagaccaatggatatggatggttaccacaaacggagcgccggtttaaacccttgtaaacactccggtttctcacattcatcaagacccatggctccaggaatttaccgttacccagaagtgaaatcttcgttgcggagacaagttcatgcgcctgtgcggatactcaatagcggtcgagatcgtagcacacgacaaggttctggtaatgtgttgggaacctttctcacaaggaacaatgacatgtggaaaagaaatgcacttgattcgtctttacgctatagaacggatagagaagtaattgatgttgatgatgagcttggagatgttgaaatgatatctgatgatacaagtagggagggtgtcgaaaacgtggctatggaggtggacgaggtggaagagaaggcggagatgggaaatggattgttttctgaggttgccagtctgaaaaatgggagcttgagggtgggtgaatgttctaaagctaatagtagttcactcgttgtgaatcgccctgtgactgatgtcacaagttttgaagcatacagaaaggttcttgagagtgctgtgaaccggacttctaaactgaaagacagaggctttgttgatttttttaaagagagaggtcgtgctttactacgaagcttgtcttccttttggagacaagatgaagaaccagtagaggttgtacaacgtgaggcatttgtacctctttctagagaggaggagacagcagtcaggcgtgcattctcagctaatgattcaaacatcttggttactcataagaactcaaatattgatattaccgggaaaatcttgaggtgccttaaaccaggcaaatggttgaacgatgaggtcattaatctttatatggtattgctgaaagaaagggaagctagagaaccaaagaagtttcttaaatgtcattttttcaatacatttttcttcactaagttagttaattcggcgactggatacaactatggtgcagtgagaagatggacttcaatgaagaggttgggctaccatctcaaagactgtgacaagatatttatccctatccatatgaacatccactggactttggctgtaattaatataaaggaccagaaattccagtatcttgactctttcaaaggaagggagcctaaaatcctcgatgcactggctagatactttgtcgatgaagtgagggataagagtgaagtagaccttgatgtaagtcgatggagacaagaatttgtccaggaccttccaatgcagagaaatggattcgattgtggaatgtttatggtgaaatacatcgacttctatagcagaggtctggatctttgtttcactcaggaacaaatgccatatttccgggctaggacagcaaaggagattctgcaactgaaagccgagtgatgccagcataataaggaaactcttaaagaatagttttgaagttcttcttcttcttcatgtagatagtatttagcaagttagatgcacactttacgtgtttgataatttgatgtacatagaaaagggtaacaatgtggttctctgatgatcaggcttgatagtgaaattcgaattgttgtttaaagattctagtttcatatcagatactctgattttgaattctggtattatttttgtactttataaatttaaaattaaagaaatttgtgtt

SEQ ID NO: 24071 - protein, 505 aa, Arabidopsis thaliana
  peptide (1)..(505): Ceres Seq. ID no. 13497311
  misc_feature (283)..(505): Homolog of NCBI NO: 15236895 NR Description: Ulp1 protease family [Arabidopsis thaliana]
  misc_feature (219)..(505): Homolog of NCBI NO: 34915036 NR Description: P0458A05.23 [Oryza sativa (japonica
  misc_feature (59)..(456): Homolog of NCBI NO: 7485126 NR Description: hypothetical protein - Arabidopsis thaliana
  misc_feature (59)..(456): Homolog of NCBI NO: 2326343 NR Description: G14587-5 [Arabidopsis thaliana]
  misc_feature (59)..(462): Homolog of NCBI NO: 25371728 NR Description: hypothetical protein AT4g15880 [imported] -
  misc_feature (48)..(505): Homolog of NCBI NO: 34787206 NR Description: SUMO protease [Arabidopsis thaliana]
  misc_feature (48)..(505): Homolog of NCBI NO: 18414542 NR Description: Ulp1 protease family [Arabidopsis thaliana]
  misc_feature (39)..(505): Homolog of NCBI NO: 6728998 NR Description: hypothetical protein [Arabidopsis thaliana]
  misc_feature (4)..(505): Homolog of NCBI NO: 26450144 NR Description: unknown protein [Arabidopsis thaliana]
  misc_feature (4)..(505): Homolog of NCBI NO: 30680058 NR Description: Ulp1 protease family [Arabidopsis thaliana]
SYFMKNQSRVLNSELGDFDLSVLWDQILNFEGYGSYCFRPMDMDGYHKRSAGLNPCKHSGFSHSSRPMAPGIYRYPEVKSSLRRQVHAPVRILNSGRDRSTRQGSGNVLGTFLTRNNDMWKRNALDSSLRYRTDREVIDVDDELGDVEMISDDTSREGVENVAMEVDEVEEKAEMGNGLFSEVASLKNGSLRVGECSKANSSSLVVNRPVTDVTSFEAYRKVLESAVNRTSKLKDRGFVDFFKERGRALLRSLSSFWRQDEEPVEVVQREAFVPLSREEETAVRRAFSANDSNILVTHKNSNIDITGKILRCLKPGKWLNDEVINLYMVLLKEREAREPKKFLKCHFFNTFFFTKLVNSATGYNYGAVRRWTSMKRLGYHLKDCDKIFIPIHMNIHWTLAVINIKDQKFQYLDSFKGREPKILDALARYFVDEVRDKSEVDLDVSRWRQEFVQDLPMQRNGFDCGMFMVKYIDFYSRGLDLCFTQEQMPYFRARTAKEILQLKAE

SEQ ID NO: 24072 - protein, 502 aa, Arabidopsis thaliana
  peptide (1)..(502): Ceres Seq. ID no. 13497312
  misc_feature (280)..(502): Homolog of NCBI NO: 15236895 NR Description: Ulp1 protease family [Arabidopsis thaliana]
  misc_feature (216)..(502): Homolog of NCBI NO: 34915036 NR Description: P0458A05.23 [Oryza sativa (japonica
  misc_feature (56)..(453): Homolog of NCBI NO: 7485126 NR Description: hypothetical protein - Arabidopsis thaliana
  misc_feature (56)..(453): Homolog of NCBI NO: 2326343 NR Description: G14587-5 [Arabidopsis thaliana]
  misc_feature (56)..(459): Homolog of NCBI NO: 25371728 NR Description: hypothetical protein AT4g15880 [imported] -
  misc_feature (45)..(502): Homolog of NCBI NO: 34787206 NR Description: SUMO protease [Arabidopsis thaliana]
  misc_feature (45)..(502): Homolog of NCBI NO: 18414542 NR Description: Ulp1 protease family [Arabidopsis thaliana]
  misc_feature (36)..(502): Homolog of NCBI NO: 6728998 NR Description: hypothetical protein [Arabidopsis thaliana]
  misc_feature (1)..(502): Homolog of NCBI NO: 26450144 NR Description: unknown protein [Arabidopsis thaliana]
  misc_feature (1)..(502): Homolog of NCBI NO: 30680058 NR Description: Ulp1 protease family [Arabidopsis thaliana]
MKNQSRVLNSELGDFDLSVLWDQILNFEGYGSYCFRPMDMDGYHKRSAGLNPCKHSGFSHSSRPMAPGIYRYPEVKSSLRRQVHAPVRILNSGRDRSTRQGSGNVLGTFLTRNNDMWKRNALDSSLRYRTDREVIDVDDELGDVEMISDDTSREGVENVAMEVDEVEEKAEMGNGLFSEVASLKNGSLRVGECSKANSSSLVVNRPVTDVTSFEAYRKVLESAVNRTSKLKDRGFVDFFKERGRALLRSLSSFWRQDEEPVEVVQREAFVPLSREEETAVRRAFSANDSNILVTHKNSNIDITGKILRCLKPGKWLNDEVINLYMVLLKEREAREPKKFLKCHFFNTFFFTKLVNSATGYNYGAVRRWTSMKRLGYHLKDCDKIFIPIHMNIHWTLAVINIKDQKFQYLDSFKGREPKILDALARYFVDEVRDKSEVDLDVSRWRQEFVQDLPMQRNGFDCGMFMVKYIDFYSRGLDLCFTQEQMPYFRARTAKEILQLKAE

SEQ ID NO: 24073 - protein, 465 aa, Arabidopsis thaliana
  peptide (1)..(465): Ceres Seq. ID no. 13497313
  misc_feature (1)..(465): Homolog of NCBI NO: 6728998 NR Description: hypothetical protein [Arabidopsis thaliana]
  misc_feature (1)..(465): Homolog of NCBI NO: 26450144 NR Description: unknown protein [Arabidopsis thaliana]
  misc_feature (1)..(465): Homolog of NCBI NO: 30680058 NR Description: Ulp1 protease family [Arabidopsis thaliana]
  misc_feature (243)..(465): Homolog of NCBI NO: 15236895 NR Description: Ulp1 protease family [Arabidopsis thaliana]
  misc_feature (179)..(465): Homolog of NCBI NO: 34915036 NR Description: P0458A05.23 [Oryza sativa (japonica
  misc_feature (19)..(416): Homolog of NCBI NO: 7485126 NR Description: hypothetical protein - Arabidopsis thaliana
  misc_feature (19)..(416): Homolog of NCBI NO: 2326343 NR Description: G14587-5 [Arabidopsis thaliana]
  misc_feature (19)..(422): Homolog of NCBI NO: 25371728 NR Description: hypothetical protein AT4g15880 [imported] -
  misc_feature (8)..(465): Homolog of NCBI NO: 34787206 NR Description: SUMO protease [Arabidopsis thaliana]
  misc_feature (8)..(465): Homolog of NCBI NO: 18414542 NR Description: Ulp1 protease family [Arabidopsis thaliana]
MDMDGYHKRSAGLNPCKHSGFSHSSRPMAPGIYRYPEVKSSLRRQVHAPVRILNSGRDRSTRQGSGNVLGTFLTRNNDMWKRNALDSSLRYRTDREVIDVDDELGDVEMISDDTSREGVENVAMEVDEVEEKAEMGNGLFSEVASLKNGSLRVGECSKANSSSLVVNRPVTDVTSFEAYRKVLESAVNRTSKLKDRGFVDFFKERGRALLRSLSSFWRQDEEPVEVVQREAFVPLSREEETAVRRAFSANDSNILVTHKNSNIDITGKILRCLKPGKWLNDEVINLYMVLLKEREAREPKKFLKCHFFNTFFFTKLVNSATGYNYGAVRRWTSMKRLGYHLKDCDKIFIPIHMNIHWTLAVINIKDQKFQYLDSFKGREPKILDALARYFVDEVRDKSEVDLDVSRWRQEFVQDLPMQRNGFDCGMFMVKYIDFYSRGLDLCFTQEQMPYFRARTAKEILQLKAE

SEQ ID NO: 24074 - DNA, 1192 bp, Arabidopsis thaliana
  misc_feature (1)..(1192): Ceres Seq. ID no. 12335264
  misc_feature: MA Experiment ID: 108434 Result: Down-regulated in Transcription
  misc_feature: MA Experiment 108434 PARAMETER Experiment Name: At_Root_Tips_cDNA_P Parameter: Tissue Value: Root Tips
  misc_feature: MA Experiment ID: 108461 Result: Up-regulated in Transcription
  misc_feature: MA Experiment 108461 PARAMETER Experiment Name: At_Germinating_Seeds_cDNA_P Parameter: Age (day) Value: 1 vs. 0
  misc_feature: MA Experiment 108461 PARAMETER Experiment Name: At_Germinating_Seeds_cDNA_P Parameter: Tissue Value: Germinating Seeds
  misc_feature: MA Experiment ID: 108462 Result: Up-regulated in Transcription
  misc_feature: MA Experiment 108462 PARAMETER Experiment Name: At_Germinating_Seeds_cDNA_P Parameter: Age (day) Value: 2 vs. 0
  misc_feature: MA Experiment 108462 PARAMETER Experiment Name: At_Germinating_Seeds_cDNA_P Parameter: Tissue Value: Germinating Seeds
  misc_feature: MA Experiment ID: 108463 Result: Up-regulated in Transcription
  misc_feature: MA Experiment 108463 PARAMETER Experiment Name: At_Germinating_Seeds_cDNA_P Parameter: Age (day) Value: 3 vs. 0
  misc_feature: MA Experiment 108463 PARAMETER Experiment Name: At_Germinating_Seeds_cDNA_P Parameter: Tissue Value: Germinating Seeds
  misc_feature: MA Experiment ID: 108464 Result: Up-regulated in Transcription
  misc_feature: MA Experiment 108464 PARAMETER Experiment Name: At_Germinating_Seeds_cDNA_P Parameter: Age (day) Value: 4 vs. 0
  misc_feature: MA Experiment 108464 PARAMETER Experiment Name: At_Germinating_Seeds_cDNA_P Parameter: Tissue Value: Germinating Seeds
  misc_feature: MA Experiment ID: 108594 Result: Down-regulated in Transcription
  misc_feature: MA Experiment 108594 PARAMETER Experiment Name: At_Ler-rhl_Root_cDNA_P Parameter: Plant Line Value: null
  misc_feature: MA Experiment ID: 20000180 Result: Up-regulated in Transcription
  misc_feature: MA Experiment 20000180 PARAMETER Experiment Name: At_Germinating_Seeds_P Parameter: Age (hr) Value: 24 vs. 0
  misc_feature: MA Experiment 20000180 PARAMETER Experiment Name: At_Germinating_Seeds_P Parameter: Tissue Value: Germinating Seeds
  misc_feature: MA Experiment ID: 20000184 Result: Up-regulated in Transcription
  misc_feature: MA Experiment 20000184 PARAMETER Experiment Name: At_Shoots__P Parameter: Age (day) Value: 7
  misc_feature: MA Experiment 20000184 PARAMETER Experiment Name: At_Shoots__P Parameter: Tissue Value: Shoots vs. Whole Plant
  misc_feature: MA Experiment ID: 20000185 Result: Up-regulated in Transcription
  misc_feature: MA Experiment 20000185 PARAMETER Experiment Name: At_Roots__P Parameter: Age (day) Value: 7 vs. 21
  misc_feature: MA Experiment 20000185 PARAMETER Experiment Name: At_Roots__P Parameter: Organism Value: A. thaliana
  misc_feature: MA Experiment 20000185 PARAMETER Experiment Name: At_Roots__P Parameter: Tissue Value: Roots vs. Whole Plant
  misc_feature: MA Experiment ID: 20000224 Result: Down-regulated in Transcription
  misc_feature: MA Experiment ID: 20000227 Result: Up-regulated in Transcription
  misc_feature: MA Experiment 20000227 PARAMETER Experiment Name: At_Root-Tips-vs-Tops_P Parameter: Tissue Value: Root Tips vs. Root Tops
  misc_feature: MA Experiment ID: 20000265 Result: Down-regulated in Transcription
  misc_feature: MA Experiment 20000265 PARAMETER Experiment Name: At_Open_Flower_P Parameter: Age (day) Value: 21
  misc_feature: MA Experiment 20000265 PARAMETER Experiment Name: At_Open_Flower_P Parameter: Plant Line Value: WS
  misc_feature: MA Experiment 20000265 PARAMETER Experiment Name: At_Open_Flower_P Parameter: Tissue Value: Closed Flower vs. Whole Plant
  misc_feature: MA Experiment ID: 20000267 Result: Down-regulated in Transcription
  misc_feature: MA Experiment 20000267 PARAMETER Experiment Name: At_Drought_P Parameter: Age (day) Value: 7
  misc_feature: MA Experiment 20000267 PARAMETER Experiment Name: At_Drought_P Parameter: Organism Value: A. thaliana
  misc_feature: MA Experiment 20000267 PARAMETER Experiment Name: At_Drought_P Parameter: Plant Line Value: WS
  misc_feature: MA Experiment 20000267 PARAMETER Experiment Name: At_Drought_P Parameter: Timepoint (hr) Value: 6
  misc_feature: MA Experiment 20000267 PARAMETER Experiment Name: At_Drought_P Parameter: Tissue Value: Whole Plant
  misc_feature: MA Experiment 20000267 PARAMETER Experiment Name: At_Drought_P Parameter: Treatment Value: Drought vs. No Drought
  misc_feature: MA Experiment ID: 20000308 Result: Down-regulated in Transcription
  misc_feature: MA Experiment 20000308 PARAMETER Experiment Name: At_100mM_NaCl__P Parameter: Age (day) Value: 17
  misc_feature: MA Experiment 20000308 PARAMETER Experiment Name: At_100mM_NaCl__P Parameter: Organism Value: A. thaliana
  misc_feature: MA Experiment 20000308 PARAMETER Experiment Name: At_100mM_NaCl__P Parameter: Plant Line Value: WS
  misc_feature: MA Experiment 20000308 PARAMETER Experiment Name: At_100mM_NaCl__P Parameter: Timepoint (hr) Value: 72
  misc_feature: MA Experiment 20000308 PARAMETER Experiment Name: At_100mM_NaCl__P Parameter: Tissue Value: Whole Plant
  misc_feature: MA Experiment 20000308 PARAMETER Experiment Name: At_100mM_NaCl__P Parameter: Treatment Value: 100mM NaCl vs. No Treatment
  misc_feature: MA Experiment ID: 20000437 Result: Down-regulated in Transcription
  misc_feature: MA Experiment 20000437 PARAMETER Experiment Name: At_Drought_P Parameter: Age (day) Value: 8
  misc_feature: MA Experiment 20000437 PARAMETER Experiment Name: At_Drought_P Parameter: Organism Value: A. thaliana
  misc_feature: MA Experiment 20000437 PARAMETER Experiment Name: At_Drought_P Parameter: Plant Line Value: WS
  misc_feature: MA Experiment 20000437 PARAMETER Experiment Name: At_Drought_P Parameter: Timepoint (hr) Value: 24
  misc_feature: MA Experiment 20000437 PARAMETER Experiment Name: At_Drought_P Parameter: Tissue Value: Whole Plant
  misc_feature: MA Experiment 20000437 PARAMETER Experiment Name: At_Drought_P Parameter: Treatment Value: Drought vs. No Drought
  misc_feature: MA Experiment ID: 20000439 Result: Up-regulated in Transcription
  misc_feature: MA Experiment 20000439 PARAMETER Experiment Name: At_Roots__P Parameter: Age (day) Value: 14 vs. 21
  misc_feature: MA Experiment 20000439 PARAMETER Experiment Name: At_Roots__P Parameter: Organism Value: A. thaliana
  misc_feature: MA Experiment 20000439 PARAMETER Experiment Name: At_Roots__P Parameter: Tissue Value: Roots vs. Whole Plant
  misc_feature: MA Experiment ID: 20000452 Result: Up-regulated in Transcription
  misc_feature: MA Experiment 20000452 PARAMETER Experiment Name: At_CS6879_Shoots-Roots_P Parameter: Age (day) Value: 14
  misc_feature: MA Experiment 20000452 PARAMETER Experiment Name: At_CS6879_Shoots-Roots_P Parameter: Organism Value: A. thaliana
  misc_feature: MA Experiment 20000452 PARAMETER Experiment Name: At_CS6879_Shoots-Roots_P Parameter: Plant Line Value: CS6879 vs. WS
  misc_feature: MA Experiment 20000452 PARAMETER Experiment Name: At_CS6879_Shoots-Roots_P Parameter: Tissue Value: Shoots
  misc_feature: MA Experiment ID: 20000527 Result: Down-regulated in Transcription
  misc_feature: MA Experiment 20000527 PARAMETER Experiment Name: At_10percent_PEG_P Parameter: Age (day) Value: 20
  misc_feature: MA Experiment 20000527 PARAMETER Experiment Name: At_10percent_PEG_P Parameter: Organism Value: A. thaliana
  misc_feature: MA Experiment 20000527 PARAMETER Experiment Name: At_10percent_PEG_P Parameter: Plant Line Value: WS
  misc_feature: MA Experiment 20000527 PARAMETER Experiment Name: At_10percent_PEG_P Parameter: Timepoint (day) Value: 20
  misc_feature: MA Experiment 20000527 PARAMETER Experiment Name: At_10percent_PEG_P Parameter: Tissue Value: Whole Plant
  misc_feature: MA Experiment 20000527 PARAMETER Experiment Name: At_10percent_PEG_P Parameter: Treatment Value: 10percent PEG vs. No Treatment
  misc_feature: MA Experiment ID: 20001451 Result: Up-regulated in Transcription
  misc_feature: MA Experiment 20001451 PARAMETER Experiment Name: At_Far-red-induction_P Parameter: Age (day) Value: 7
  misc_feature: MA Experiment 20001451 PARAMETER Experiment Name: At_Far-red-induction_P Parameter: Light Value: Far-red vs. White
  misc_feature: MA Experiment 20001451 PARAMETER Experiment Name: At_Far-red-induction_P Parameter: Organism Value: A. thaliana
  misc_feature: MA Experiment 20001451 PARAMETER Experiment Name: At_Far-red-induction_P Parameter: Plant Line Value: Columbia
  misc_feature: MA Experiment 20001451 PARAMETER Experiment Name: At_Far-red-induction_P Parameter: Timepoint (hr) Value: 24
  misc_feature: MA Experiment 20001451 PARAMETER Experiment Name: At_Far-red-induction_P Parameter: Tissue Value: Whole Plant
attatcaatcgagcaaaaaacaaaagctaagagcaacaaactaaagattttttaagaaaatggcagcttctaagcgactagttgtctcttgcttgttcttagttttgttgtttgctcaagccaattcgcaaggtttgaaagtaggtttctacagcaaaacatgcccacaactcgagggtatagttaaaaaggtcgtgttcgatgcgatgaacaaagcaccaacacttggtgctcctttgcttagaatgttcttccacgactgcttcgttcggggatgtgacggatcagttttgttagataaaccaaacaatcaaggtgagaagagtgcagttcctaacctaagtcttcgagggtttggcatcatagacgattccaaggcggctctagaaaaagtgtgtccgggaattgtttcttgctctgatatcttggcacttgtcgctagagacgcaatggttgcacttgaaggaccatcatgggaagttgaaacgggaagaagagacggtagggtttctaacatcaacgaagtcaacttgccatcaccttttgataacatcaccaagcttatcagcgattttcgctcaaagggcctcaacgagaaggatctagtcattctctcgggtggtcacacaattggaatgggacattgtcctttattgacaaaccggctttacaacttcaccggaaaaggagacagcgacccaagtttggactcggagtacgccgctaagctcaggaagaaatgcaagcccaccgatacgacgacggctctagagatggatccggggagtttcaaaacatttgacttgagctacttcacgctagtggctaagagaagaggacttttccagtcggatgctgctctactcgacaactccaagactagggcttatgtcttgcaacagataagaactcatgggtcaatgttctttaacgactttggtgtctctatggtgaaaatgggtcggactggagttcttacgggtaaggccggggagatccgtaagacgtgtcggtctgctaattaagagatatagaaatgaaaatatctcaatatatgtgagtttgattattattgtttgcttcttttattttgttgtcatccctatattaaatgtgattgttttcttgggtattgtttcttgggaataagctgtatctaaaatttataaaagtcttgaaagttcagaatgtt

SEQ ID NO: 24075 - protein, 321 aa, Arabidopsis thaliana
  peptide (1)..(321): Ceres Seq. ID no. 12335265
  misc_feature (42)..(284): Pfam Name: Peroxidase Pfam Description: Peroxidase
  misc_feature (1)..(321): Homolog of NCBI NO: 15242237 NR Description: peroxidase, putative
  misc_feature (1)..(321): Homolog of NCBI NO: 15232058 NR Description: peroxidase, putative
MAASKRLVVSCLFLVLLFAQANSQGLKVGFYSKTCPQLEGIVKKVVFDAMNKAPTLGAPLLRMFFHDCFVRGCDGSVLLDKPNNQGEKSAVPNLSLRGFGIIDDSKAALEKVCPGIVSCSDILALVARDAMVALEGPSWEVETGRRDGRVSNINEVNLPSPFDNITKLISDFRSKGLNEKDLVILSGGHTIGMGHCPLLTNRLYNFTGKGDSDPSLDSEYAAKLRKKCKPTDTTTALEMDPGSFKTFDLSYFTLVAKRRGLFQSDAALLDNSKTRAYVLQQIRTHGSMFFNDFGVSMVKMGRTGVLTGKAGEIRKTCRSAN

SEQ ID NO: 24076 - protein, 272 aa, Arabidopsis thaliana
  peptide (1)..(272): Ceres Seq. ID no. 12335266
  misc_feature (1)..(235): Pfam Name: Peroxidase Pfam Description: Peroxidase
  misc_feature (1)..(272): Homolog of NCBI NO: 15242237 NR Description: peroxidase, putative
  misc_feature (1)..(272): Homolog of NCBI NO: 15232058 NR Description: peroxidase, putative
MNKAPTLGAPLLRMFFHDCFVRGCDGSVLLDKPNNQGEKSAVPNLSLRGFGIIDDSKAALEKVCPGIVSCSDILALVARDAMVALEGPSWEVETGRRDGRVSNINEVNLPSPFDNITKLISDFRSKGLNEKDLVILSGGHTIGMGHCPLLTNRLYNFTGKGDSDPSLDSEYAAKLRKKCKPTDTTTALEMDPGSFKTFDLSYFTLVAKRRGLFQSDAALLDNSKTRAYVLQQIRTHGSMFFNDFGVSMVKMGRTGVLTGKAGEIRKTCRSAN

SEQ ID NO: 24077 - protein, 259 aa, Arabidopsis thaliana
  peptide (1)..(259): Ceres Seq. ID no. 12335267
  misc_feature (1)..(222): Pfam Name: Peroxidase Pfam Description: Peroxidase
  misc_feature (1)..(259): Homolog of NCBI NO: 15242237 NR Description: peroxidase, putative
  misc_feature (1)..(259): Homolog of NCBI NO: 15232058 NR Description: peroxidase, putative
MFFHDCFVRGCDGSVLLDKPNNQGEKSAVPNLSLRGFGIIDDSKAALEKVCPGIVSCSDILALVARDAMVALEGPSWEVETGRRDGRVSNINEVNLPSPFDNITKLISDFRSKGLNEKDLVILSGGHTIGMGHCPLLTNRLYNFTGKGDSDPSLDSEYAAKLRKKCKPTDTTTALEMDPGSFKTFDLSYFTLVAKRRGLFQSDAALLDNSKTRAYVLQQIRTHGSMFFNDFGVSMVKMGRTGVLTGKAGEIRKTCRSAN

SEQ ID NO: 24078 - DNA, 1063 bp, Arabidopsis thaliana
  misc_feature (1)..(1063): Ceres Seq. ID no. 12321505
  misc_feature: MA Experiment ID: 108585 Result: Up-regulated in Transcription
  misc_feature: MA Experiment 108585 PARAMETER Experiment Name: At_5mM_NaNP_cDNA_P Parameter: Timepoint (hr) Value: 6
  misc_feature: MA Experiment 108585 PARAMETER Experiment Name: At_5mM_NaNP_cDNA_P Parameter: Tissue Value: Aerial
  misc_feature: MA Experiment 108585 PARAMETER Experiment Name: At_5mM_NaNP_cDNA_P Parameter: Treatment Value: null
tccgttaagagaaacctccctcactcccactttccgacgaacaaaaacaacatctgaaaaaaatcatgaatccagcagattccgatcatccacagcttccaaacatcaagatccatcaccctccatctccacgtcactctcaccatcaccactcctcatctactccctcctccgccgcaactccaacaccaaccgccggagctcgtcgtaaaatcggagtcgcagttgatctctccgaagaaagctctttcgccgttcgttgggctgtagatcactacatccgtcccggagacgccgttgttcttctccacgtttctccaacctccgtcctcttcggtgccgattggggacctctccctctgaaaactcaaattgaagatccaaacgctcaacctcaacctagtcaagaggattttgatgcttttacttcaacaaaagttgcggatctagctaaaccgttgaaggagttagggtttccttataagatccatatagtgaaagatcatgatatgagagagagattatgtcttgagattgagaggcttggtcttagtgctgtgattatgggaagtagaggttttggtgctgagaaaaaaagaggaagtgatggcaagcttggctctgttagtgattactgtgttcatcactgtgtttgtcctgttgttgtggttagatatcctgatgatcgtgatggacctgtgcctattgttactgtcaagtctggtggagatgatgatggagatgttgttgctgcttctgcttctgctcatcatgaacacatcaaagatgagtgatgattcgtgggatctaagtaatatatcaccctcttctcttctaggtacacaaagcaagtaggggtgttagcggaatgttcagaggagtgttgaatgtgtgttctttctttagctatgacaatgttgatgaatttctttgggttatgtaatatgaatgagtgttgagtggtttctgcattaaacatgaaggagttgtatgattaatgaaccccttttaggaagaagaaggattatacgtttctttaataaagactggtattttagaattt

SEQ ID NO: 24079 - protein, 242 aa, Arabidopsis thaliana
  peptide (1)..(242): Ceres Seq. ID no. 12321506
  misc_feature (46)..(203): Pfam Name: Universal stress protein family Pfam Description: Universal stress protein family
  misc_feature (42)..(168): Homolog of NCBI NO: 15232490 NR Description: CHP-rich zinc finger protein, putative; protein
  misc_feature (18)..(210): Homolog of NCBI NO: 34910112 NR Description: B1100D10.31 [Oryza sativa (japonica
  misc_feature (19)..(207): Homolog of NCBI NO: 33146953 NR Description: CHP-rich zinc finger protein-like
  misc_feature (19)..(207): Homolog of NCBI NO: 28971968 NR Description: OSJNBb0041B22.10 [Oryza sativa (japonica
  misc_feature (21)..(242): Homolog of NCBI NO: 30682187 NR Description: expressed protein [Arabidopsis thaliana]
  misc_feature (21)..(242): Homolog of NCBI NO: 25402657 NR Description: protein T23J18.3 [imported] - Arabidopsis
  misc_feature (1)..(226): Homolog of NCBI NO: 18416966 NR Description: putative protein
  misc_feature (1)..(226): Homolog of NCBI NO: 7486798 NR Description: hypothetical protein M4I22.130 - Arabidopsis
  misc_feature (1)..(242): Homolog of NCBI NO: 8885586 NR Description: gene_id:F24B18.5~pir||T05756~similar to unknown
  misc_feature (1)..(242): Homolog of NCBI NO: 18423628 NR Description: putative protein
MNPADSDHPQLPNIKIHHPPSPRHSHHHHSSSTPSSAATPTPTAGARRKIGVAVDLSEESSFAVRWAVDHYIRPGDAVVLLHVSPTSVLFGADWGPLPLKTQIEDPNAQPQPSQEDFDAFTSTKVADLAKPLKELGFPYKIHIVKDHDMRERLCLEIERLGLSAVIMGSRGFGAEKKRGSDGKLGSVSDYCVHHCVCPVVVVRYPDDRDGPVPIVTVKSGGDDDGDVVAASASAHHEHIKDE

SEQ ID NO: 24080 - DNA, 1308 bp, Arabidopsis thaliana
  misc_feature (1)..(1308): Ceres Seq. ID no. 12338611
  misc_feature: MA Experiment ID: 108434 Result: Up-regulated in Transcription
  misc_feature: MA Experiment 108434 PARAMETER Experiment Name: At_Root_Tips_cDNA_P Parameter: Tissue Value: Root Tips
  misc_feature: MA Experiment ID: 108595 Result: Down-regulated in Transcription
  misc_feature: MA Experiment 108595 PARAMETER Experiment Name: At_Ler-pi_Ovule_cDNA_P Parameter: Plant Line Value: null
  misc_feature: MA Experiment ID: 20000071 Result: Up-regulated in Transcription
  misc_feature: MA Experiment 20000071 PARAMETER Experiment Name: At_100uM_ABA_Mutants_cDNA_P Parameter: Plant Line Value: CS8104
  misc_feature: MA Experiment 20000071 PARAMETER Experiment Name: At_100uM_ABA_Mutants_cDNA_P Parameter: Timepoint (hr) Value: 6
  misc_feature: MA Experiment 20000071 PARAMETER Experiment Name: At_100uM_ABA_Mutants_cDNA_P Parameter: Tissue Value: Aerial
  misc_feature: MA Experiment 20000071 PARAMETER Experiment Name: At_100uM_ABA_Mutants_cDNA_P Parameter: Treatment Value: 100uM ABA vs. No Treatment
  misc_feature: MA Experiment ID: 20000495 Result: Down-regulated in Transcription
  misc_feature: MA Experiment 20000495 PARAMETER Experiment Name: At_Guard_Cells_P Parameter: Harvest Date Value: 8/2/2002
  misc_feature: MA Experiment 20000495 PARAMETER Experiment Name: At_Guard_Cells_P Parameter: Organism Value: A. thaliana
  misc_feature: MA Experiment 20000495 PARAMETER Experiment Name: At_Guard_Cells_P Parameter: Tissue Value: Guard Cells vs. Leaves
gtatttgcagaagaagaagagaaaaagtttgaaagaaaatgggagcagcgaagaatatctgggcattagccaacgccgaagatgcagctaacgacgccgaacaaatcccttattcttcgttcgtcgtcgacacgtctttgcctcttcctctcatgattcctcgtatcatagagttatgtaaagatctgttcaagaattggggagagcttgatgattcactcttctctgttgagagagtatctggaggcattacaaatcttttgctgaaggtttctgtgaaagaggacactaataaagaagtgtctgttacagtgcgactgtatgggcctaacactgagtatgttattaaccgggagagagagattctggctatcaagtatctctcggctgccggatttggtgccaagttgcttggtggttttggaaatggcatggtgcaatcgttcatcaatgcaagaaccttagagccatcagacatgagagagcaaaagattgctgcacaaattgccagagaacttggaaagtttcataaagttgacataccaggttccaaggaacctcagctgtgggttgatatcttgaagttctatgaaaaagcatctactcttacgtttgaggaacctgataagcagaagctctttgaaactatttcgtttgaagaactccatacagaaattattgagctaagggaattcacaggcttacttaacgcacctgtggtgtttgctcataacgatttactatcaggaaacttcatgctgaatgatgaagaagagaaactatacttgattgatttcgagtatggatcatacaactatagaggctttgacatcggaaatcacttcaatgaatatgcaggatacgactgtgattacagcctgtacccaagtaaagaggaacaatatcacttcatcaagcattacttacagccagacaaaccagacgaggtcagtatcgcagaagtagaatcagtctttgtagagacagatgcgtataaattagcatctcatttgtactgggcaatatgggcgatcatccaggcaaggatgtctcccattgagtttgaatatttgggttacttctttttgcggtacaatgaatacaagaagcagaagccacttactttttcccttgttacatctcacctctctgcatcgatgtagcctttgtttggccaaaatggttaaatctttgtttattttttgttgtgttttatcaattcttgtaaaatttgtttgtgttgttagttaaaccttgtatgatttgtatgaatgaacttgatttgtggaagtagttgcacttgatatt

SEQ ID NO: 24081 - protein, 374 aa, Arabidopsis thaliana
  peptide (1)..(374): Ceres Seq. ID no. 12338612
  misc_feature (86)..(357): Pfam Name: Choline/ethanolamine kinase Pfam Description: Choline/ethanolamine kinase
  misc_feature (14)..(368): Homolog of NCBI NO: 7488654 NR Description: choline kinase (EC 2.7.1.32) CK3 - soybean
  misc_feature (39)..(365): Homolog of NCBI NO: 14603244 NR Description: Similar to hypothetical protein FLJ10761 [Homo
  misc_feature (65)..(365): Homolog of NCBI NO: 37786753 NR Description: putative ethanolamine kinase [Mus musculus]
  misc_feature (8)..(360): Homolog of NCBI NO: 10092615 NR Description: ethanolamine kinase [Homo sapiens]
  misc_feature (44)..(360): Homolog of NCBI NO: 26340554 NR Description: unnamed protein product [Mus musculus]
  misc_feature (8)..(360): Homolog of NCBI NO: 14194720 NR Description: ETHANOLAMINE KINASE (EKI)
  misc_feature (8)..(360): Homolog of NCBI NO: 26328955 NR Description: unnamed protein product [Mus musculus]
  misc_feature (58)..(355): Homolog of NCBI NO: 28829950 NR Description: similar to Arabidopsis thaliana (Mouse-ear
  misc_feature (1)..(374): Homolog of NCBI NO: 15225800 NR Description: putative choline kinase
  misc_feature (1)..(374): Homolog of NCBI NO: 21593269 NR Description: putative choline kinase [Arabidopsis thaliana]
MGAAKNIWALANAEDAANDAEQIPYSSFVVDTSLPLPLMIPRIIELCKDLFKNWGELDDSLFSVERVSGGITNLLLKVSVKEDTNKEVSVTVRLYGPNTEYVINREREILAIKYLSAAGFGAKLLGGFGNGMVQSFINARTLEPSDMREQKIAAQIARELGKFHKVDIPGSKEPQLWVDILKFYEKASTLTFEEPDKQKLFETISFEELHTEIIELREFTGLLNAPVVFAHNDLLSGNFMLNDEEEKLYLIDFEYGSYNYRGFDIGNHFNEYAGYDCDYSLYPSKEEQYHFIKHYLQPDKPDEVSIAEVESVFVETDAYKLASHLYWAIWAIIQARMSPIEFEYLGYFFLRYNEYKKQKPLTFSLVTSHLSASM

SEQ ID NO: 24082 - protein, 336 aa, Arabidopsis thaliana
  peptide (1)..(336): Ceres Seq. ID no. 12338614
  misc_feature (48)..(319): Pfam Name: Choline/ethanolamine kinase Pfam Description: Choline/ethanolamine kinase
  misc_feature (1)..(330): Homolog of NCBI NO: 7488654 NR Description: choline kinase (EC 2.7.1.32) CK3 - soybean
  misc_feature (1)..(327): Homolog of NCBI NO: 14603244 NR Description: Similar to hypothetical protein FLJ10761 [Homo
  misc_feature (27)..(327): Homolog of NCBI NO: 37786753 NR Description: putative ethanolamine kinase [Mus musculus]
  misc_feature (1)..(322): Homolog of NCBI NO: 10092615 NR Description: ethanolamine kinase [Homo sapiens]
  misc_feature (6)..(322): Homolog of NCBI NO: 26340554 NR Description: unnamed protein product [Mus musculus]
  misc_feature (1)..(322): Homolog of NCBI NO: 14194720 NR Description: ETHANOLAMINE KINASE (EKI)
  misc_feature (1)..(322): Homolog of NCBI NO: 26328955 NR Description: unnamed protein product [Mus musculus]
  misc_feature (20)..(317): Homolog of NCBI NO: 28829950 NR Description: similar to Arabidopsis thaliana (Mouse-ear
  misc_feature (1)..(336): Homolog of NCBI NO: 15225800 NR Description: putative choline kinase
  misc_feature (1)..(336): Homolog of NCBI NO: 21593269 NR Description: putative choline kinase [Arabidopsis thaliana]
MIPRIIELCKDLFKNWGELDDSLFSVERVSGGITNLLLKVSVKEDTNKEVSVTVRLYGPNTEYVINREREILAIKYLSAAGFGAKLLGGFGNGMVQSFINARTLEPSDMREQKIAAQIARELGKFHKVDIPGSKEPQLWVDILKFYEKASTLTFEEPDKQKLFETISFEELHTEIIELREFTGLLNAPVVFAHNDLLSGNFMLNDEEEKLYLIDFEYGSYNYRGFDIGNHFNEYAGYDCDYSLYPSKEEQYHFIKHYLQPDKPDEVSIAEVESVFVETDAYKLASHLYWAIWAIIQARMSPIEFEYLGYFFLRYNEYKKQKPLTFSLVTSHLSASM

SEQ ID NO: 24083 - protein, 243 aa, Arabidopsis thaliana
  peptide (1)..(243): Ceres Seq. ID no. 12338615
  misc_feature (1)..(226): Pfam Name: Choline/ethanolamine kinase Pfam Description: Choline/ethanolamine kinase
  misc_feature (1)..(237): Homolog of NCBI NO: 7488654 NR Description: choline kinase (EC 2.7.1.32) CK3 - soybean
  misc_feature (1)..(234): Homolog of NCBI NO: 14603244 NR Description: Similar to hypothetical protein FLJ10761 [Homo
  misc_feature (1)..(234): Homolog of NCBI NO: 37786753 NR Description: putative ethanolamine kinase [Mus musculus]
  misc_feature (1)..(229): Homolog of NCBI NO: 10092615 NR Description: ethanolamine kinase [Homo sapiens]
  misc_feature (1)..(229): Homolog of NCBI NO: 26340554 NR Description: unnamed protein product [Mus musculus]
  misc_feature (1)..(229): Homolog of NCBI NO: 14194720 NR Description: ETHANOLAMINE KINASE (EKI)
  misc_feature (1)..(229): Homolog of NCBI NO: 26328955 NR Description: unnamed protein product [Mus musculus]
  misc_feature (1)..(224): Homolog of NCBI NO: 28829950 NR Description: similar to Arabidopsis thaliana (Mouse-ear
  misc_feature (1)..(243): Homolog of NCBI NO: 15225800 NR Description: putative choline kinase
  misc_feature (1)..(243): Homolog of NCBI NO: 21593269 NR Description: putative choline kinase [Arabidopsis thaliana]
MVQSFINARTLEPSDMREQKIAAQIARELGKFHKVDIPGSKEPQLWVDILKFYEKASTLTFEEPDKQKLFETISFEELHTEIIELREFTGLLNAPVVFAHNDLLSGNFMLNDEEEKLYLIDFEYGSYNYRGFDIGNHFNEYAGYDCDYSLYPSKEEQYHFIKHYLQPDKPDEVSIAEVESVFVETDAYKLASHLYWAIWAIIQARMSPIEFEYLGYFFLRYNEYKKQKPLTFSLVTSHLSASM

SEQ ID NO: 24084 - DNA, 1451 bp, Arabidopsis thaliana
  misc_feature (1)..(1451): Ceres Seq. ID no. 12324378
  misc_feature: MA Experiment ID: 108434 Result: Up-regulated in Transcription
  misc_feature: MA Experiment 108434 PARAMETER Experiment Name: At_Root_Tips_cDNA_P Parameter: Tissue Value: Root Tips
  misc_feature: MA Experiment ID: 108462 Result: Down-regulated in Transcription
  misc_feature: MA Experiment 108462 PARAMETER Experiment Name: At_Germinating_Seeds_cDNA_P Parameter: Age (day) Value: 2 vs. 0
  misc_feature: MA Experiment 108462 PARAMETER Experiment Name: At_Germinating_Seeds_cDNA_P Parameter: Tissue Value: Germinating Seeds
  misc_feature: MA Experiment ID: 108463 Result: Down-regulated in Transcription
  misc_feature: MA Experiment 108463 PARAMETER Experiment Name: At_Germinating_Seeds_cDNA_P Parameter: Age (day) Value: 3 vs. 0
  misc_feature: MA Experiment 108463 PARAMETER Experiment Name: At_Germinating_Seeds_cDNA_P Parameter: Tissue Value: Germinating Seeds
  misc_feature: MA Experiment ID: 108464 Result: Down-regulated in Transcription
  misc_feature: MA Experiment 108464 PARAMETER Experiment Name: At_Germinating_Seeds_cDNA_P Parameter: Age (day) Value: 4 vs. 0
  misc_feature: MA Experiment 108464 PARAMETER Experiment Name: At_Germinating_Seeds_cDNA_P Parameter: Tissue Value: Germinating Seeds
  misc_feature: MA Experiment ID: 108595 Result: Down-regulated in Transcription
  misc_feature: MA Experiment 108595 PARAMETER Experiment Name: At_Ler-pi_Ovule_cDNA_P Parameter: Plant Line Value: null
  misc_feature: MA Experiment ID: 20000224 Result: Down-regulated in Transcription
tctctatttccctatcaaaattcacaccggcgattttgagattgttctctgattggcttaatccgagagaatcaaggaattgaatggccagtgaatcagatgcatcgagcattgctactctttcctgtgctcgctgcgagaagcctgcacatcttcagtgtccgaaatgcatagacttaaagcttcctcgtgaacaagcctctttctgcactcaagaatgtttcaaggcagcttggagctcgcacaaatcagtacatgtgaaagctcagctgtcttcaatcggtgatcagaactctgatcttatttctcaaggctggctctattgcgtcaagaaaggccaggctagaacacctaagcttccacactttgattggactgggcctctaaagcaatatcccatatctaccaagcgtgttgtgcctgctgagattgagaaacctgactgggcaattgatgggactcccaaagttgaaccgaatagtgatctacaacatgttgttgagataaaaacgcctgaacaaatccagagaatgcgtgaaacctgtaaaattgccagagaggtcctggatgcagccgctagggtgattcaccccggtgtgactactgatgagattgatcgagtagttcatgaagcaactattgcagcaggaggatatccatcgcccctcaactactatttctttccgaaatcttgctgcacatctgttaatgaagtaatttgtcatggaattccggatgctaggaaactagaagatggtgatatagtaaatgtggatgtaacagtctgttataaaggttgccatggtgaccttaatgagacatactttgttggaaacgttgacgaagcatcacgtcaactggttaagtgcacatacgagtgcctggagaaagctatagcaattgttaaacctggagtaagatttcgtgaaattggagagatagtcaaccgccatgctacaatgtctgggttatcagtggtgagatcttattgtggtcatggtattggagatctcttccattgtgctccaaacattcctcactatgcaagaaacaaagcagttggagtgatgaaagcaggtcagactttcacaatcgagccaatgatcaacgcaggggggtggagggatcgaacatggcctgatggatggactgcagttaccgcagatggaaaacgcagcgctcagtttgagcataccctattggtaacggagactggtgttgaggttttaacagcgaggcttccttcatcgcctgacgtatatccttggcttaccaagtgattaagtgtttggttcctttttggttgtgattcgtaaacttgggaataatagtgtcatctttttgccattatagaccatttgatgttgttaccttgttgtctttgtttatgtaattttattattactatctgaaactgaatcttaaagacagagtcatactgtttcaaaccc

SEQ ID NO: 24085 - protein, 398 aa, Arabidopsis thaliana
  peptide (1)..(398): Ceres Seq. ID no. 12324379
  misc_feature (18)..(393): Homolog of NCBI NO: 32484310 NR Description: Unknown (protein for MGC:64362) [Xenopus laevis]
  misc_feature (9)..(58): Homolog of NCBI NO: 39583678 NR Description: Hypothetical protein CBG08323 [Caenorhabditis
  misc_feature (93)..(390): Homolog of NCBI NO: 39583678 NR Description: Hypothetical protein CBG08323 [Caenorhabditis
  misc_feature (8)..(389): Homolog of NCBI NO: 28202007 NR Description: methionyl aminopeptidase 1 [Mus musculus]
  misc_feature (18)..(393): Homolog of NCBI NO: 28436769 NR Description: Unknown (protein for IMAGE:5542221) [Xenopus
  misc_feature (8)..(389): Homolog of NCBI NO: 33302602 NR Description: Methionine aminopeptidase 1 (MetAP 1) (MAP 1)
  misc_feature (8)..(389): Homolog of NCBI NO: 577315 NR Description: KIAA0094 gene product is related to S.cerevisiae
  misc_feature (76)..(396): Homolog of NCBI NO: 37535920 NR Description: putative methionine aminopeptidase
  misc_feature (1)..(398): Homolog of NCBI NO: 21593270 NR Description: putative methionine aminopeptidase [Arabidopsis
  misc_feature (1)..(398): Homolog of NCBI NO: 15225437 NR Description: putative methionine aminopeptidase
MASESDASSIATLSCARCEKPAHLQCPKCIDLKLPREQASFCTQECFKAAWSSHKSVHVKAQLSSIGDQNSDLISQGWLYCVKKGQARTPKLPHFDWTGPLKQYPISTKRVVPAEIEKPDWAIDGTPKVEPNSDLQHVVEIKTPEQIQRMRETCKIAREVLDAAARVIHPGVTTDEIDRVVHEATIAAGGYPSPLNYYFFPKSCCTSVNEVICHGIPDARKLEDGDIVNVDVTVCYKGCHGDLNETYFVGNVDEASRQLVKCTYECLEKAIAIVKPGVRFREIGEIVNRHATMSGLSVVRSYCGHGIGDLFHCAPNIPHYARNKAVGVMKAGQTFTIEPMINAGGWRDRTWPDGWTAVTADGKRSAQFEHTLLVTETGVEVLTARLPSSPDVYPWLTK

SEQ ID NO: 24086 - protein, 249 aa, Arabidopsis thaliana
  peptide (1)..(249): Ceres Seq. ID no. 12324380
  misc_feature (1)..(241): Homolog of NCBI NO: 17543082 NR Description: Metallopeptidase family M24 [Caenorhabditis
  misc_feature (1)..(244): Homolog of NCBI NO: 32484310 NR Description: Unknown (protein for MGC:64362) [Xenopus laevis]
  misc_feature (1)..(241): Homolog of NCBI NO: 39583678 NR Description: Hypothetical protein CBG08323 [Caenorhabditis
  misc_feature (1)..(240): Homolog of NCBI NO: 28202007 NR Description: methionyl aminopeptidase 1 [Mus musculus]
  misc_feature (1)..(244): Homolog of NCBI NO: 28436769 NR Description: Unknown (protein for IMAGE:5542221) [Xenopus
  misc_feature (1)..(240): Homolog of NCBI NO: 33302602 NR Description: Methionine aminopeptidase 1 (MetAP 1) (MAP 1)
  misc_feature (1)..(240): Homolog of NCBI NO: 577315 NR Description: KIAA0094 gene product is related to S.cerevisiae
  misc_feature (1)..(247): Homolog of NCBI NO: 37535920 NR Description: putative methionine aminopeptidase
  misc_feature (1)..(249): Homolog of NCBI NO: 21593270 NR Description: putative methionine aminopeptidase [Arabidopsis
  misc_feature (1)..(249): Homolog of NCBI NO: 15225437 NR Description: putative methionine aminopeptidase
MRETCKIAREVLDAAARVIHPGVTTDEIDRVVHEATIAAGGYPSPLNYYFFPKSCCTSVNEVICHGIPDARKLEDGDIVNVDVTVCYKGCHGDLNETYFVGNVDEASRQLVKCTYECLEKAIAIVKPGVRFREIGEIVNRHATMSGLSVVRSYCGHGIGDLFHCAPNIPHYARNKAVGVMKAGQTFTIEPMINAGGWRDRTWPDGWTAVTADGKRSAQFEHTLLVTETGVEVLTARLPSSPDVYPWLTK

SEQ ID NO: 24087 - DNA, 1295 bp, Arabidopsis thaliana
  misc_feature (1)..(1295): Ceres Seq. ID no. 12324935
  misc_feature: MA Experiment ID: 108434 Result: Up-regulated in Transcription
  misc_feature: MA Experiment 108434 PARAMETER Experiment Name: At_Root_Tips_cDNA_P Parameter: Tissue Value: Root Tips
  misc_feature: MA Experiment ID: 108488 Result: Down-regulated in Transcription
  misc_feature: MA Experiment ID: 20000112 Result: Up-regulated in Transcription
  misc_feature: MA Experiment 20000112 PARAMETER Experiment Name: At_42deg_Heat_cDNA_P Parameter: Temperature (deg C) Value: 42 vs. 22
  misc_feature: MA Experiment 20000112 PARAMETER Experiment Name: At_42deg_Heat_cDNA_P Parameter: Timepoint (hr) Value: 2
  misc_feature: MA Experiment 20000112 PARAMETER Experiment Name: At_42deg_Heat_cDNA_P Parameter: Tissue Value: Aerial
  misc_feature: MA Experiment ID: 20000113 Result: Up-regulated in Transcription
  misc_feature: MA Experiment 20000113 PARAMETER Experiment Name: At_42deg_Heat_cDNA_P Parameter: Temperature (deg C) Value: 42 vs. 22
  misc_feature: MA Experiment 20000113 PARAMETER Experiment Name: At_42deg_Heat_cDNA_P Parameter: Timepoint (hr) Value: 8
  misc_feature: MA Experiment 20000113 PARAMETER Experiment Name: At_42deg_Heat_cDNA_P Parameter: Tissue Value: Aerial
aattcgttttccctcctcttctgcttaccggaaaagtctatatctccgacggaccttcttctctctagttaatcagacctcgcgctcgtgataatggcaacttttggtgcgcctgctaccgccaacagtaaccctaacaaatcctacgaggttactccatcaccggcagattctatttcgagcttaagttttagtccaagagctgatatacttgtggccacttcatgggacaatcaggtgaggtgttgggaaatatcccgtagtggagcctctctagccagtgctcctaaagcatcaatatcacatgatcagccggttttatgttctgcttggaaggatgatggaaccacagtctttagcggtggatgtgataagcaagcaaaaatgtggcccttgttgtctggtggtcaacctgtaactgttgctatgcatgagggtcctatcgcagctatggcttggatcccgggaatgaatctccttgcaactggaagttgggataaaactttgaaatattgggacacaagacagcaaaatcctgtacatacccaacagcttccagacaaatgttatacattgtctgtgaaacatcctctgatggttgtcgggactgccgatagaaatctgatagtcttcaacttgcaaaatcctcagactgagtttaagagaatccaatccccactgaagtaccagacgaggtgtgttactgccttccctgatcagcaaggttttttggttggttcaattgaggggcgggttggtgttcatcatctggatgattctcaacagagcaaaaacttcacattcaaatgccacagagatggaaatgatatatattctgtcaactctctgaatttccacccggtacatggcacttttgcaactgctgggtcagatggtgctttcaatttctgggacaaagatagtaaacaaagactcaaggccatgtcgaggtgcaatcagccaattccatgcagctcgttcaaccacgatggatcgatatatgcatatgcggcttgctatgactggagcaaaggtgcagaaaatcacaacccggcgactgcaaaaagcagcattttcttgcacctgccacaggaaagcgaggttaaggccaagccaagagttggagcaaccggcagaaaatgagcgttgcttagtctgatttcttcgctagtgattttttttttttttttagcttgtggacttcgttgggctttgttatctactttagttcatgacattttgaatatacattaggagtcttgtctaaaagactaaaagtaaatctctaatgtttc

SEQ ID NO: 24088 - protein, 349 aa, Arabidopsis thaliana
  peptide (1)..(349): Ceres Seq. ID no. 12324936
  misc_feature (4)..(342): Homolog of NCBI NO: 30039225 NR Description: Rae1/Gle2 [Xenopus laevis]
  misc_feature (4)..(342): Homolog of NCBI NO: 29436458 NR Description: Similar to RAE1 RNA export 1 homolog (S. pombe)
  misc_feature (4)..(342): Homolog of NCBI NO: 2231592 NR Description: mRNA-associated protein mrnp41 [Homo sapiens]
  misc_feature (4)..(342): Homolog of NCBI NO: 34860864 NR Description: similar to RAE1 RNA export 1 homolog
  misc_feature (4)..(342): Homolog of NCBI NO: 28201956 NR Description: RAE1 RNA export 1 homolog
  misc_feature (4)..(342): Homolog of NCBI NO: 4506399 NR Description: RAE1 (RNA export 1, S.pombe) homolog
  misc_feature (1)..(213): Homolog of NCBI NO: 3122671 NR Description: Hypothetical RAE1-like protein At1g80670
  misc_feature (1)..(343): Homolog of NCBI NO: 34913020 NR Description: putative mRNA export protein
  misc_feature (1)..(349): Homolog of NCBI NO: 38636797 NR Description: putative RAE1 (RNA export 1, S.pombe) homolog
  misc_feature (1)..(349): Homolog of NCBI NO: 15220198 NR Description: mRNA export protein, putative
MATFGAPATANSNPNKSYEVTPSPADSISSLSFSPRADILVATSWDNQVRCWEISRSGASLASAPKASISHDQPVLCSAWKDDGTTVFSGGCDKQAKMWPLLSGGQPVTVAMHEGPIAAMAWIPGMNLLATGSWDKTLKYWDTRQQNPVHTQQLPDKCYTLSVKHPLMVVGTADRNLIVFNLQNPQTEFKRIQSPLKYQTRCVTAFPDQQGFLVGSIEGRVGVHHLDDSQQSKNFTFKCHRDGNDIYSVNSLNFHPVHGTFATAGSDGAFNFWDKDSKQRLKAMSRCNQPIPCSSFNHDGSIYAYAACYDWSKGAENHNPATAKSSIFLHLPQESEVKAKPRVGATGRK

SEQ ID NO: 24089 - protein, 252 aa, Arabidopsis thaliana
  peptide (1)..(252): Ceres Seq. ID no. 12324937
  misc_feature (1)..(245): Homolog of NCBI NO: 4506399 NR Description: RAE1 (RNA export 1, S.pombe) homolog
  misc_feature (1)..(116): Homolog of NCBI NO: 3122671 NR Description: Hypothetical RAE1-like protein At1g80670
  misc_feature (1)..(246): Homolog of NCBI NO: 34913020 NR Description: putative mRNA export protein
  misc_feature (1)..(252): Homolog of NCBI NO: 38636797 NR Description: putative RAE1 (RNA export 1, S.pombe) homolog
  misc_feature (1)..(252): Homolog of NCBI NO: 15220198 NR Description: mRNA export protein, putative
  misc_feature (1)..(245): Homolog of NCBI NO: 30039225 NR Description: Rae1/Gle2 [Xenopus laevis]
  misc_feature (1)..(245): Homolog of NCBI NO: 29436458 NR Description: Similar to RAE1 RNA export 1 homolog (S. pombe)
  misc_feature (1)..(245): Homolog of NCBI NO: 2231592 NR Description: mRNA-associated protein mrnp41 [Homo sapiens]
  misc_feature (1)..(245): Homolog of NCBI NO: 34860864 NR Description: similar to RAE1 RNA export 1 homolog
  misc_feature (1)..(245): Homolog of NCBI NO: 28201956 NR Description: RAE1 RNA export 1 homolog
MWPLLSGGQPVTVAMHEGPIAAMAWIPGMNLLATGSWDKTLKYWDTRQQNPVHTQQLPDKCYTLSVKHPLMVVGTADRNLIVFNLQNPQTEFKRIQSPLKYQTRCVTAFPDQQGFLVGSIEGRVGVHHLDDSQQSKNFTFKCHRDGNDIYSVNSLNFHPVHGTFATAGSDGAFNFWDKDSKQRLKAMSRCNQPIPCSSFNHDGSIYAYAACYDWSKGAENHNPATAKSSIFLHLPQESEVKAKPRVGATGRK

SEQ ID NO: 24090 - protein, 238 aa, Arabidopsis thaliana
  peptide (1)..(238): Ceres Seq. ID no. 12324938
  misc_feature (1)..(231): Homolog of NCBI NO: 30039225 NR Description: Rae1/Gle2 [Xenopus laevis]
  misc_feature (1)..(231): Homolog of NCBI NO: 29436458 NR Description: Similar to RAE1 RNA export 1 homolog (S. pombe)
  misc_feature (1)..(231): Homolog of NCBI NO: 2231592 NR Description: mRNA-associated protein mrnp41 [Homo sapiens]
  misc_feature (1)..(231): Homolog of NCBI NO: 34860864 NR Description: similar to RAE1 RNA export 1 homolog
  misc_feature (1)..(231): Homolog of NCBI NO: 28201956 NR Description: RAE1 RNA export 1 homolog
  misc_feature (1)..(231): Homolog of NCBI NO: 4506399 NR Description: RAE1 (RNA export 1, S.pombe) homolog
  misc_feature (1)..(102): Homolog of NCBI NO: 3122671 NR Description: Hypothetical RAE1-like protein At1g80670
  misc_feature (1)..(232): Homolog of NCBI NO: 34913020 NR Description: putative mRNA export protein
  misc_feature (1)..(238): Homolog of NCBI NO: 38636797 NR Description: putative RAE1 (RNA export 1, S.pombe) homolog
  misc_feature (1)..(238): Homolog of NCBI NO: 15220198 NR Description: mRNA export protein, putative
MHEGPIAAMAWIPGMNLLATGSWDKTLKYWDTRQQNPVHTQQLPDKCYTLSVKHPLMVVGTADRNLIVFNLQNPQTEFKRIQSPLKYQTRCVTAFPDQQGFLVGSIEGRVGVHHLDDSQQSKNFTFKCHRDGNDIYSVNSLNFHPVHGTFATAGSDGAFNFWDKDSKQRLKAMSRCNQPIPCSSFNHDGSIYAYAACYDWSKGAENHNPATAKSSIFLHLPQESEVKAKPRVGATGRK

SEQ ID NO: 24091 - DNA, 665 bp, Arabidopsis thaliana
  misc_feature (1)..(665): Ceres Seq. ID no. 12321507
  misc_feature: MA Experiment ID: 108573 Result: Up-regulated in Transcription
  misc_feature: MA Experiment 108573 PARAMETER Experiment Name: At_Drought_cDNA_P Parameter: Timepoint (hr) Value: 6
  misc_feature: MA Experiment 108573 PARAMETER Experiment Name: At_Drought_cDNA_P Parameter: Tissue Value: Aerial
  misc_feature: MA Experiment 108573 PARAMETER Experiment Name: At_Drought_cDNA_P Parameter: Treatment Value: Drought vs. No Drought
  misc_feature: MA Experiment ID: 108668 Result: Up-regulated in Transcription
  misc_feature: MA Experiment 108668 PARAMETER Experiment Name: At_2mM_SA_cDNA_P Parameter: Plant Line Value: WS
  misc_feature: MA Experiment 108668 PARAMETER Experiment Name: At_2mM_SA_cDNA_P Parameter: Timepoint (hr) Value: 6
  misc_feature: MA Experiment 108668 PARAMETER Experiment Name: At_2mM_SA_cDNA_P Parameter: Treatment Value: 2mM SA vs. No Treatment
  misc_feature: MA Experiment ID: 20000182 Result: Up-regulated in Transcription
  misc_feature: MA Experiment 20000182 PARAMETER Experiment Name: At_2mM_SA_P Parameter: Age (day) Value: 14
  misc_feature: MA Experiment 20000182 PARAMETER Experiment Name: At_2mM_SA_P Parameter: Organism Value: A. thaliana
  misc_feature: MA Experiment 20000182 PARAMETER Experiment Name: At_2mM_SA_P Parameter: Plant Line Value: WS
  misc_feature: MA Experiment 20000182 PARAMETER Experiment Name: At_2mM_SA_P Parameter: Timepoint (hr) Value: 6
  misc_feature: MA Experiment 20000182 PARAMETER Experiment Name: At_2mM_SA_P Parameter: Tissue Value: Aerial
  misc_feature: MA Experiment 20000182 PARAMETER Experiment Name: At_2mM_SA_P Parameter: Treatment Value: 2mM SA vs. No Treatment
  misc_feature: MA Experiment ID: 20000437 Result: Up-regulated in Transcription
  misc_feature: MA Experiment 20000437 PARAMETER Experiment Name: At_Drought_P Parameter: Age (day) Value: 8
  misc_feature: MA Experiment 20000437 PARAMETER Experiment Name: At_Drought_P Parameter: Organism Value: A. thaliana
  misc_feature: MA Experiment 20000437 PARAMETER Experiment Name: At_Drought_P Parameter: Plant Line Value: WS
  misc_feature: MA Experiment 20000437 PARAMETER Experiment Name: At_Drought_P Parameter: Timepoint (hr) Value: 24
  misc_feature: MA Experiment 20000437 PARAMETER Experiment Name: At_Drought_P Parameter: Tissue Value: Whole Plant
  misc_feature: MA Experiment 20000437 PARAMETER Experiment Name: At_Drought_P Parameter: Treatment Value: Drought vs. No Drought
  misc_feature: MA Experiment ID: 20001905 Result: Up-regulated in Transcription
  misc_feature: MA Experiment 20001905 PARAMETER Experiment Name: At_Drought_Reproduction_P Parameter: Age (day) Value: 40
  misc_feature: MA Experiment 20001905 PARAMETER Experiment Name: At_Drought_Reproduction_P Parameter: Organism Value: A. thaliana
  misc_feature: MA Experiment 20001905 PARAMETER Experiment Name: At_Drought_Reproduction_P Parameter: Plant Line Value: WS
  misc_feature: MA Experiment 20001905 PARAMETER Experiment Name: At_Drought_Reproduction_P Parameter: Timepoint (day) Value: 10
  misc_feature: MA Experiment 20001905 PARAMETER Experiment Name: At_Drought_Reproduction_P Parameter: Tissue Value: Rosettes
  misc_feature: MA Experiment 20001905 PARAMETER Experiment Name: At_Drought_Reproduction_P Parameter: Treatment Value: Drought vs. No Drought
atcatctctattaaaaatattggaaaaaccctaattcctggtgttggcgaatcacttttcatttcatctttgaacttcagtctgtgaatttccaacagcaatgacaactccagcaaaaaagagactgatgtgggatttcaagagactgcagaaagatcctcctgtgggaataagtggagctccacaagataacaatatattgcattggaatgctctcatctttggacctgaggacactccatgggatggaggtactttcaagttgactcttcacttcaccgaggattacccgaacaaacccccgattgttcggtttgtttcggatgtttcatccaaacatttatgctgatggaagcatttgcttggatatcttgcaaaaccagtggagccccatctacgacgttgctgcagttctcacatcaattcagtctttgctctgtgacccaaaccctgactcaccagcgaacgcagaggctgcaaggttgttcagtgagaataaaagagaatataacaggaaagtaatcgagatcgtggagcagagctatgtataaatatgattcattttgttgtattgactaatgagtaattggatgttgaatagtatttattatctaccttgagtttattttacatggatgtttaaatttcggaaatgagatttctgc

SEQ ID NO: 24092 - protein, 93 aa, Arabidopsis thaliana
  peptide (1)..(93): Ceres Seq. ID no. 12321508
MGWRYFQVDSSLHRGLPEQTPDCSVCFGCFIQTFMLMEAFAWISCKTSGAPSTTLLQFSHQFSLCSVTQTLTHQRTQRLQGCSVRIKENITGK

SEQ ID NO: 24093 - protein, 82 aa, Arabidopsis thaliana
  peptide (1)..(82): Ceres Seq. ID no. 12321509
  misc_feature (1)..(74): Homolog of NCBI NO: 13516453 NR Description: ubiquitin-conjugating enzyme (E2) [Nicotiana
  misc_feature (1)..(74): Homolog of NCBI NO: 464980 NR Description: Ubiquitin-conjugating enzyme E2-17 kDa
  misc_feature (1)..(74): Homolog of NCBI NO: 136640 NR Description: Ubiquitin-conjugating enzyme E2-17 kDa
  misc_feature (1)..(74): Homolog of NCBI NO: 13516451 NR Description: ubiquitin-conjugating enzyme (E2) [Nicotiana
  misc_feature (1)..(74): Homolog of NCBI NO: 8118527 NR Description: ubiquitin conjugating protein [Avicennia marina]
  misc_feature (1)..(74): Homolog of NCBI NO: 33146810 NR Description: OsRad6 [Oryza sativa (japonica cultivar-group)]
  misc_feature (1)..(74): Homolog of NCBI NO: 18844990 NR Description: Rad6 [Oryza sativa (japonica cultivar-group)]
  misc_feature (1)..(74): Homolog of NCBI NO: 15081749 NR Description: AT5g62540/K19B1_15 [Arabidopsis thaliana]
  misc_feature (1)..(74): Homolog of NCBI NO: 23505769 NR Description: At5g62540/K19B1_15 [Arabidopsis thaliana]
  misc_feature (1)..(74): Homolog of NCBI NO: 18424601 NR Description: E2, ubiquitin-conjugating enzyme 3 (UBC3)
MTTPAKKRLMWDFKRLQKDPPVGISGAPQDNNILHWNALIFGPEDTPWDGGTFKLTLHFTEDYPNKPPIVRFVSDVSSKHLC

SEQ ID NO: 24094 - protein, 75 aa, Arabidopsis thaliana
  peptide (1)..(75): Ceres Seq. ID no. 12321510
  misc_feature (1)..(74): Homolog of NCBI NO: 464980 NR Description: Ubiquitin-conjugating enzyme E2-17 kDa
  misc_feature (1)..(74): Homolog of NCBI NO: 13516453 NR Description: ubiquitin-conjugating enzyme (E2) [Nicotiana
  misc_feature (1)..(74): Homolog of NCBI NO: 136640 NR Description: Ubiquitin-conjugating enzyme E2-17 kDa
  misc_feature (1)..(74): Homolog of NCBI NO: 13516451 NR Description: ubiquitin-conjugating enzyme (E2) [Nicotiana
  misc_feature (1)..(74): Homolog of NCBI NO: 8118527 NR Description: ubiquitin conjugating protein [Avicennia marina]
  misc_feature (1)..(74): Homolog of NCBI NO: 33146810 NR Description: OsRad6 [Oryza sativa (japonica cultivar-group)]
  misc_feature (1)..(74): Homolog of NCBI NO: 18844990 NR Description: Rad6 [Oryza sativa (japonica cultivar-group)]
  misc_feature (1)..(71): Homolog of NCBI NO: 15081749 NR Description: AT5g62540/K19B1_15 [Arabidopsis thaliana]
  misc_feature (1)..(71): Homolog of NCBI NO: 23505769 NR Description: At5g62540/K19B1_15 [Arabidopsis thaliana]
  misc_feature (1)..(75): Homolog of NCBI NO: 18424601 NR Description: E2, ubiquitin-conjugating enzyme 3 (UBC3)
MFHPNIYADGSICLDILQNQWSPIYDVAAVLTSIQSLLCDPNPDSPANAEAARLFSENKREYNRKVIEIVEQSYV

SEQ ID NO: 24095 - DNA, 1540 bp, Arabidopsis thaliana
  misc_feature (1)..(1540): Ceres Seq. ID no. 12335268
  misc_feature: MA Experiment ID: 108434 Result: Down-regulated in Transcription
  misc_feature: MA Experiment 108434 PARAMETER Experiment Name: At_Root_Tips_cDNA_P Parameter: Tissue Value: Root Tips
  misc_feature: MA Experiment ID: 108435 Result: Down-regulated in Transcription
  misc_feature: MA Experiment 108435 PARAMETER Experiment Name: At_stm_Mutants_cDNA_P Parameter: Plant Line Value: wt Landsburg vs stm
  misc_feature: MA Experiment 108435 PARAMETER Experiment Name: At_stm_Mutants_cDNA_P Parameter: Tissue Value: Shoot Apical Meristem Region
  misc_feature: MA Experiment ID: 108489 Result: Up-regulated in Transcription
  misc_feature: MA Experiment ID: 108572 Result: Up-regulated in Transcription
  misc_feature: MA Experiment 108572 PARAMETER Experiment Name: At_Drought_cDNA_P Parameter: Timepoint (hr) Value: 1
  misc_feature: MA Experiment 108572 PARAMETER Experiment Name: At_Drought_cDNA_P Parameter: Tissue Value: Aerial
  misc_feature: MA Experiment 108572 PARAMETER Experiment Name: At_Drought_cDNA_P Parameter: Treatment Value: Drought vs. No Drought
  misc_feature: MA Experiment ID: 108573 Result: Up-regulated in Transcription
  misc_feature: MA Experiment 108573 PARAMETER Experiment Name: At_Drought_cDNA_P Parameter: Timepoint (hr) Value: 6
  misc_feature: MA Experiment 108573 PARAMETER Experiment Name: At_Drought_cDNA_P Parameter: Tissue Value: Aerial
  misc_feature: MA Experiment 108573 PARAMETER Experiment Name: At_Drought_cDNA_P Parameter: Treatment Value: Drought vs. No Drought
  misc_feature: MA Experiment ID: 108574 Result: Up-regulated in Transcription
  misc_feature: MA Experiment 108574 PARAMETER Experiment Name: At_Wounding__cDNA_P Parameter: Timepoint (hr) Value: 1
  misc_feature: MA Experiment 108574 PARAMETER Experiment Name: At_Wounding__cDNA_P Parameter: Tissue Value: Aerial
  misc_feature: MA Experiment 108574 PARAMETER Experiment Name: At_Wounding__cDNA_P Parameter: Treatment Value: Wounding vs. No Wounding
  misc_feature: MA Experiment ID: 108577 Result: Up-regulated in Transcription
  misc_feature: MA Experiment 108577 PARAMETER Experiment Name: At_42deg_Heat_cDNA_P Parameter: Temperature (deg C) Value: 42 vs. 22
  misc_feature: MA Experiment 108577 PARAMETER Experiment Name: At_42deg_Heat_cDNA_P Parameter: Timepoint (hr) Value: 6
  misc_feature: MA Experiment 108577 PARAMETER Experiment Name: At_42deg_Heat_cDNA_P Parameter: Tissue Value: Aerial
  misc_feature: MA Experiment ID: 108585 Result: Up-regulated in Transcription
  misc_feature: MA Experiment 108585 PARAMETER Experiment Name: At_5mM_NaNP_cDNA_P Parameter: Timepoint (hr) Value: 6
  misc_feature: MA Experiment 108585 PARAMETER Experiment Name: At_5mM_NaNP_cDNA_P Parameter: Tissue Value: Aerial
  misc_feature: MA Experiment 108585 PARAMETER Experiment Name: At_5mM_NaNP_cDNA_P Parameter: Treatment Value: null
  misc_feature: MA Experiment ID: 20000093 Result: Up-regulated in Transcription
  misc_feature: MA Experiment 20000093 PARAMETER Experiment Name: At_42deg_Heat_cDNA_P Parameter: Temperature (deg C) Value: 42 vs. 22
  misc_feature: MA Experiment 20000093 PARAMETER Experiment Name: At_42deg_Heat_cDNA_P Parameter: Timepoint (hr) Value: 0.5
  misc_feature: MA Experiment 20000093 PARAMETER Experiment Name: At_42deg_Heat_cDNA_P Parameter: Tissue Value: Aerial
  misc_feature: MA Experiment ID: 20000111 Result: Up-regulated in Transcription
  misc_feature: MA Experiment 20000111 PARAMETER Experiment Name: At_42deg_Heat_cDNA_P Parameter: Temperature (deg C) Value: 42 vs. 22
  misc_feature: MA Experiment 20000111 PARAMETER Experiment Name: At_42deg_Heat_cDNA_P Parameter: Timepoint (hr) Value: 6
  misc_feature: MA Experiment 20000111 PARAMETER Experiment Name: At_42deg_Heat_cDNA_P Parameter: Tissue Value: Aerial
  misc_feature: MA Experiment ID: 20000112 Result: Up-regulated in Transcription
  misc_feature: MA Experiment 20000112 PARAMETER Experiment Name: At_42deg_Heat_cDNA_P Parameter: Temperature (deg C) Value: 42 vs. 22
  misc_feature: MA Experiment 20000112 PARAMETER Experiment Name: At_42deg_Heat_cDNA_P Parameter: Timepoint (hr) Value: 2
  misc_feature: MA Experiment 20000112 PARAMETER Experiment Name: At_42deg_Heat_cDNA_P Parameter: Tissue Value: Aerial
  misc_feature: MA Experiment ID: 20000144 Result: Up-regulated in Transcription
  misc_feature: MA Experiment 20000144 PARAMETER Experiment Name: At_42deg_Heat_cDNA_P Parameter: Temperature (deg C) Value: 42 vs. 22
  misc_feature: MA Experiment 20000144 PARAMETER Experiment Name: At_42deg_Heat_cDNA_P Parameter: Timepoint (hr) Value: 1
  misc_feature: MA Experiment 20000144 PARAMETER Experiment Name: At_42deg_Heat_cDNA_P Parameter: Tissue Value: Aerial
  misc_feature: MA Experiment ID: 20000171 Result: Up-regulated in Transcription
  misc_feature: MA Experiment 20000171 PARAMETER Experiment Name: At_42deg_Heat_P Parameter: Age (day) Value: 14
  misc_feature: MA Experiment 20000171 PARAMETER Experiment Name: At_42deg_Heat_P Parameter: Organism Value: A. thaliana
  misc_feature: MA Experiment 20000171 PARAMETER Experiment Name: At_42deg_Heat_P Parameter: Plant Line Value: WS
  misc_feature: MA Experiment 20000171 PARAMETER Experiment Name: At_42deg_Heat_P Parameter: Temperature (deg C) Value: 42 vs. 22
  misc_feature: MA Experiment 20000171 PARAMETER Experiment Name: At_42deg_Heat_P Parameter: Timepoint (hr) Value: 1
  misc_feature: MA Experiment 20000171 PARAMETER Experiment Name: At_42deg_Heat_P Parameter: Tissue Value: Aerial
  misc_feature: MA Experiment ID: 20000173 Result: Up-regulated in Transcription
  misc_feature: MA Experiment 20000173 PARAMETER Experiment Name: At_42deg_Heat_P Parameter: Age (day) Value: 14
  misc_feature: MA Experiment 20000173 PARAMETER Experiment Name: At_42deg_Heat_P Parameter: Organism Value: A. thaliana
  misc_feature: MA Experiment 20000173 PARAMETER Experiment Name: At_42deg_Heat_P Parameter: Plant Line Value: WS
  misc_feature: MA Experiment 20000173 PARAMETER Experiment Name: At_42deg_Heat_P Parameter: Temperature (deg C) Value: 42 vs. 22
  misc_feature: MA Experiment 20000173 PARAMETER Experiment Name: At_42deg_Heat_P Parameter: Timepoint (hr) Value: 6
  misc_feature: MA Experiment 20000173 PARAMETER Experiment Name: At_42deg_Heat_P Parameter: Tissue Value: Aerial
  misc_feature: MA Experiment ID: 20000184 Result: Down-regulated in Transcription
  misc_feature: MA Experiment 20000184 PARAMETER Experiment Name: At_Shoots__P Parameter: Age (day) Value: 7
  misc_feature: MA Experiment 20000184 PARAMETER Experiment Name: At_Shoots__P Parameter: Tissue Value: Shoots vs. Whole Plant
  misc_feature: MA Experiment ID: 20000185 Result: Down-regulated in Transcription
  misc_feature: MA Experiment 20000185 PARAMETER Experiment Name: At_Roots__P Parameter: Age (day) Value: 7 vs. 21
  misc_feature: MA Experiment 20000185 PARAMETER Experiment Name: At_Roots__P Parameter: Organism Value: A. thaliana
  misc_feature: MA Experiment 20000185 PARAMETER Experiment Name: At_Roots__P Parameter: Tissue Value: Roots vs. Whole Plant
  misc_feature: MA Experiment ID: 20000224 Result: Up-regulated in Transcription
  misc_feature: MA Experiment ID: 20000227 Result: Down-regulated in Transcription
  misc_feature: MA Experiment 20000227 PARAMETER Experiment Name: At_Root-Tips-vs-Tops_P Parameter: Tissue Value: Root Tips vs. Root Tops
  misc_feature: MA Experiment ID: 20000234 Result: Down-regulated in Transcription
  misc_feature: MA Experiment 20000234 PARAMETER Experiment Name: At_Siliques_P Parameter: Age (day) Value: 21
  misc_feature: MA Experiment 20000234 PARAMETER Experiment Name: At_Siliques_P Parameter: Organism Value: A. thaliana
  misc_feature: MA Experiment 20000234 PARAMETER Experiment Name: At_Siliques_P Parameter: Plant Line Value: WS
  misc_feature: MA Experiment 20000234 PARAMETER Experiment Name: At_Siliques_P Parameter: Tissue Value: Less Than 5mm Siliques vs. Whole Plant
  misc_feature: MA Experiment ID: 20000264 Result: Down-regulated in Transcription
  misc_feature: MA Experiment 20000264 PARAMETER Experiment Name: At_Open_Flower_P Parameter: Age (day) Value: 21
  misc_feature: MA Experiment 20000264 PARAMETER Experiment Name: At_Open_Flower_P Parameter: Plant Line Value: WS
  misc_feature: MA Experiment 20000264 PARAMETER Experiment Name: At_Open_Flower_P Parameter: Tissue Value: Open Flower vs. Whole Plant
  misc_feature: MA Experiment ID: 20000286 Result: Down-regulated in Transcription
  misc_feature: MA Experiment 20000286 PARAMETER Experiment Name: At_Open_Flower_P Parameter: Age (day) Value: 21
  misc_feature: MA Experiment 20000286 PARAMETER Experiment Name: At_Open_Flower_P Parameter: Plant Line Value: WS
  misc_feature: MA Experiment 20000286 PARAMETER Experiment Name: At_Open_Flower_P Parameter: Tissue Value: Half Open vs. Whole Plant
  misc_feature: MA Experiment ID: 20000439 Result: Down-regulated in Transcription
  misc_feature: MA Experiment 20000439 PARAMETER Experiment Name: At_Roots__P Parameter: Age (day) Value: 14 vs. 21
  misc_feature: MA Experiment 20000439 PARAMETER Experiment Name: At_Roots__P Parameter: Organism Value: A. thaliana
  misc_feature: MA Experiment 20000439 PARAMETER Experiment Name: At_Roots__P Parameter: Tissue Value: Roots vs. Whole Plant
  misc_feature: MA Experiment ID: 20000527 Result: Up-regulated in Transcription
  misc_feature: MA Experiment 20000527 PARAMETER Experiment Name: At_10percent_PEG_P Parameter: Age (day) Value: 20
  misc_feature: MA Experiment 20000527 PARAMETER Experiment Name: At_10percent_PEG_P Parameter: Organism Value: A. thaliana
  misc_feature: MA Experiment 20000527 PARAMETER Experiment Name: At_10percent_PEG_P Parameter: Plant Line Value: WS
  misc_feature: MA Experiment 20000527 PARAMETER Experiment Name: At_10percent_PEG_P Parameter: Timepoint (day) Value: 20
  misc_feature: MA Experiment 20000527 PARAMETER Experiment Name: At_10percent_PEG_P Parameter: Tissue Value: Whole Plant
  misc_feature: MA Experiment 20000527 PARAMETER Experiment Name: At_10percent_PEG_P Parameter: Treatment Value: 10percent PEG vs. No Treatment
  misc_feature: MA Experiment ID: 20000709 Result: Up-regulated in Transcription
  misc_feature: MA Experiment 20000709 PARAMETER Experiment Name: At_15mM_NH4NO3_L-to-H_P Parameter: Age (hr) Value: 14
  misc_feature: MA Experiment 20000709 PARAMETER Experiment Name: At_15mM_NH4NO3_L-to-H_P Parameter: Organism Value: A. thaliana
  misc_feature: MA Experiment 20000709 PARAMETER Experiment Name: At_15mM_NH4NO3_L-to-H_P Parameter: Plant Line Value: WS
  misc_feature: MA Experiment 20000709 PARAMETER Experiment Name: At_15mM_NH4NO3_L-to-H_P Parameter: Timepoint (hr) Value: 4
  misc_feature: MA Experiment 20000709 PARAMETER Experiment Name: At_15mM_NH4NO3_L-to-H_P Parameter: Tissue Value: Aerial
  misc_feature: MA Experiment 20000709 PARAMETER Experiment Name: At_15mM_NH4NO3_L-to-H_P Parameter: Treatment Value: 15mM NH4NO3 vs. 30mM Mannitol
  misc_feature: MA Experiment ID: 20001458 Result: Up-regulated in Transcription
  misc_feature: MA Experiment 20001458 PARAMETER Experiment Name: At_50mM_NH4NO3_L-to-H_P Parameter: Age (day) Value: Undefined
  misc_feature: MA Experiment 20001458 PARAMETER Experiment Name: At_50mM_NH4NO3_L-to-H_P Parameter: Organism Value: Undefined
  misc_feature: MA Experiment 20001458 PARAMETER Experiment Name: At_50mM_NH4NO3_L-to-H_P Parameter: Plant Line Value: Undefined
  misc_feature: MA Experiment 20001458 PARAMETER Experiment Name: At_50mM_NH4NO3_L-to-H_P Parameter: Timepoint (hr) Value: 2
  misc_feature: MA Experiment 20001458 PARAMETER Experiment Name: At_50mM_NH4NO3_L-to-H_P Parameter: Tissue Value: Siliques
  misc_feature: MA Experiment 20001458 PARAMETER Experiment Name: At_50mM_NH4NO3_L-to-H_P Parameter: Treatment Value: 50mM NH4NO3 vs. 100mM Manitol
  misc_feature: MA Experiment ID: 20001459 Result: Up-regulated in Transcription
  misc_feature: MA Experiment 20001459 PARAMETER Experiment Name: At_50mM_NH4NO3_L-to-H_P Parameter: Age (day) Value: Undefined
  misc_feature: MA Experiment 20001459 PARAMETER Experiment Name: At_50mM_NH4NO3_L-to-H_P Parameter: Organism Value: Undefined
  misc_feature: MA Experiment 20001459 PARAMETER Experiment Name: At_50mM_NH4NO3_L-to-H_P Parameter: Plant Line Value: Undefined
  misc_feature: MA Experiment 20001459 PARAMETER Experiment Name: At_50mM_NH4NO3_L-to-H_P Parameter: Timepoint (hr) Value: 4
  misc_feature: MA Experiment 20001459 PARAMETER Experiment Name: At_50mM_NH4NO3_L-to-H_P Parameter: Tissue Value: Siliques
  misc_feature: MA Experiment 20001459 PARAMETER Experiment Name: At_50mM_NH4NO3_L-to-H_P Parameter: Treatment Value: 50mM NH4NO3 vs. 100mM Manitol
atcctctgcaaagttatggctttgcttgagagtataatattagggctaatcacaggatggttagcttttgttattgggttggttattggatgggcatggaaaccaagatgggtttcttcttctaataatcgacaagtcaaattacaatgttctgctccaagatcttttgatttgtctttaccatcttcttctcctagttctgttgttacttctcctttgaagggttttggatcagctccttgcttaaaggctcttgtttgtgatacatggactatggctttaagacaacagagacaaacagtttctcctgattcttcttcttcttcatatgattcttctgaacaacatttggatttggtttcaagagtgaagaaaacaaaggagagattgcctaatactgtaacagagttagatttgagacatcttgtgcaattggttgagaggaaagatggtggtcaagcttggattcagatgatggatcgttttactcctggtatgagataccaagcttggttgagagaacctaagaatggtcctactgagtatagaagtagaactgtgtttgaagatgcaactcctgtgatgttaagagactttttctgggatgatgagtttagaccaacttgggatacaatgctttctaattccactactgttgaagagtgtcccagtactggaaccatgattgttagatggatacgcaagttcccgttcttctgcagtgatagagagtatgtaatcggtcgcaggatatggaattgtggaaactcttattactgtgttacaaagggagtatcggttccttctataccgcctaacaacaaacaaaaacgcgtggatttgttctactcaagctgtgcattcgaccagtggaatcaagaagagacgatggggtaacaagtgcctgcgaagtacttctattccaccacgaagacatgggaatacctagagaaatcgcaaagcttggagtgaaacgaggaatgtggggagcagtgaagaagatggaacccggtttacgtgcttaccaaacgcatagactctcagatggaggaaccaagctttctcggtctgctttcatggctcaaatgaacaccaagatcacacaagaccatctcatctccctcagcaacggtgcatcgcctgtcactgaaactcccgttacattaaaccaaggaaaccgagctgcgaatctgaagaaactgttgattatcggtggagctgttgcggttgtctgcagtttaagcggaggtgcttttgttcctcctgcgtttcttttaggttttgggaaaaggtttgttaatggtggaagaaaacgtcagctcgaaggaacaacaagaagtgagagtcagactacttcttcatagaatcttgagaccaagaatatagatcaacatataaatttagattcgttttaagtagattaagaataatccattccaaaattagtttatagaattggaataagctgtatgattattaatctttatacaaaggaaggaacattttttttacaagtaatgaataaaatctctttatcatc

SEQ ID NO: 24096 - protein, 298 aa, Arabidopsis thaliana
  peptide (1)..(298): Ceres Seq. ID no. 12335269
  misc_feature (182)..(261): Pfam Name: START domain Pfam Description: START domain
  misc_feature (138)..(285): Homolog of NCBI NO: 38344869 NR Description: OSJNBa0020P07.12 [Oryza sativa (japonica
  misc_feature (20)..(63): Homolog of NCBI NO: 15217736 NR Description: membrane related protein CP5, putative
  misc_feature (126)..(285): Homolog of NCBI NO: 15217736 NR Description: membrane related protein CP5, putative
  misc_feature (20)..(63): Homolog of NCBI NO: 22135902 NR Description: membrane related protein CP5, putative
  misc_feature (126)..(285): Homolog of NCBI NO: 22135902 NR Description: membrane related protein CP5, putative
  misc_feature (21)..(285): Homolog of NCBI NO: 18033654 NR Description: putative nodule membrane protein [Medicago sativa]
  misc_feature (6)..(78): Homolog of NCBI NO: 10178166 NR Description: membrane related protein-like [Arabidopsis
  misc_feature (95)..(285): Homolog of NCBI NO: 10178166 NR Description: membrane related protein-like [Arabidopsis
  misc_feature (6)..(285): Homolog of NCBI NO: 21593272 NR Description: membrane related protein-like [Arabidopsis
  misc_feature (6)..(285): Homolog of NCBI NO: 18423599 NR Description: membrane related protein-like
ILCKVMALLESIILGLITGWLAFVIGLVIGWAWKPRWVSSSNNRQVKLQCSAPRSFDLSLPSSSPSSVVTSPLKGFGSAPCLKALVCDTWTMALRQQRQTVSPDSSSSSYDSSEQHLDLVSRVKKTKERLPNTVTELDLRHLVQLVERKDGGQAWIQMMDRFTPGMRYQAWLREPKNGPTEYRSRTVFEDATPVMLRDFFWDDEFRPTWDTMLSNSTTVEECPSTGTMIVRWIRKFPFFCSDREYVIGRRIWNCGNSYYCVTKGVSVPSIPPNNKQKRVDLFYSSCAFDQWNQEETMG

SEQ ID NO: 24097 - protein, 293 aa, Arabidopsis thaliana
  peptide (1)..(293): Ceres Seq. ID no. 12335270
  misc_feature (177)..(256): Pfam Name: START domain Pfam Description: START domain
  misc_feature (133)..(280): Homolog of NCBI NO: 38344869 NR Description: OSJNBa0020P07.12 [Oryza sativa (japonica
  misc_feature (15)..(58): Homolog of NCBI NO: 15217736 NR Description: membrane related protein CP5, putative
  misc_feature (121)..(280): Homolog of NCBI NO: 15217736 NR Description: membrane related protein CP5, putative
  misc_feature (15)..(58): Homolog of NCBI NO: 22135902 NR Description: membrane related protein CP5, putative
  misc_feature (121)..(280): Homolog of NCBI NO: 22135902 NR Description: membrane related protein CP5, putative
  misc_feature (16)..(280): Homolog of NCBI NO: 18033654 NR Description: putative nodule membrane protein [Medicago sativa]
  misc_feature (1)..(73): Homolog of NCBI NO: 10178166 NR Description: membrane related protein-like [Arabidopsis
  misc_feature (90)..(280): Homolog of NCBI NO: 10178166 NR Description: membrane related protein-like [Arabidopsis
  misc_feature (1)..(280): Homolog of NCBI NO: 21593272 NR Description: membrane related protein-like [Arabidopsis
  misc_feature (1)..(280): Homolog of NCBI NO: 18423599 NR Description: membrane related protein-like
MALLESIILGLITGWLAFVIGLVIGWAWKPRWVSSSNNRQVKLQCSAPRSFDLSLPSSSPSSVVTSPLKGFGSAPCLKALVCDTWTMALRQQRQTVSPDSSSSSYDSSEQHLDLVSRVKKTKERLPNTVTELDLRHLVQLVERKDGGQAWIQMMDRFTPGMRYQAWLREPKNGPTEYRSRTVFEDATPVMLRDFFWDDEFRPTWDTMLSNSTTVEECPSTGTMIVRWIRKFPFFCSDREYVIGRRIWNCGNSYYCVTKGVSVPSIPPNNKQKRVDLFYSSCAFDQWNQEETMG

SEQ ID NO: 24098 - protein, 207 aa, Arabidopsis thaliana
  peptide (1)..(207): Ceres Seq. ID no. 12335271
  misc_feature (91)..(170): Pfam Name: START domain Pfam Description: START domain
  misc_feature (1)..(194): Homolog of NCBI NO: 18414239 NR Description: expressed protein
  misc_feature (9)..(194): Homolog of NCBI NO: 18403635 NR Description: expressed protein
  misc_feature (35)..(194): Homolog of NCBI NO: 4741929 NR Description: membrane related protein CP5 [Arabidopsis
  misc_feature (47)..(194): Homolog of NCBI NO: 38344869 NR Description: OSJNBa0020P07.12 [Oryza sativa (japonica
  misc_feature (35)..(194): Homolog of NCBI NO: 15217736 NR Description: membrane related protein CP5, putative
  misc_feature (35)..(194): Homolog of NCBI NO: 22135902 NR Description: membrane related protein CP5, putative
  misc_feature (1)..(194): Homolog of NCBI NO: 18033654 NR Description: putative nodule membrane protein [Medicago sativa]
  misc_feature (4)..(194): Homolog of NCBI NO: 10178166 NR Description: membrane related protein-like [Arabidopsis
  misc_feature (1)..(194): Homolog of NCBI NO: 21593272 NR Description: membrane related protein-like [Arabidopsis
  misc_feature (1)..(194): Homolog of NCBI NO: 18423599 NR Description: membrane related protein-like
MALRQQRQTVSPDSSSSSYDSSEQHLDLVSRVKKTKERLPNTVTELDLRHLVQLVERKDGGQAWIQMMDRFTPGMRYQAWLREPKNGPTEYRSRTVFEDATPVMLRDFFWDDEFRPTWDTMLSNSTTVEECPSTGTMIVRWIRKFPFFCSDREYVIGRRIWNCGNSYYCVTKGVSVPSIPPNNKQKRVDLFYSSCAFDQWNQEETMG

SEQ ID NO: 24099 - DNA, 1376 bp, Arabidopsis thaliana
  misc_feature (1)..(1376): Ceres Seq. ID no. 13490838
  misc_feature: MA Experiment ID: 108434 Result: Up-regulated in Transcription
  misc_feature: MA Experiment 108434 PARAMETER Experiment Name: At_Root_Tips_cDNA_P Parameter: Tissue Value: Root Tips
  misc_feature: MA Experiment ID: 108463 Result: Down-regulated in Transcription
  misc_feature: MA Experiment 108463 PARAMETER Experiment Name: At_Germinating_Seeds_cDNA_P Parameter: Age (day) Value: 3 vs. 0
  misc_feature: MA Experiment 108463 PARAMETER Experiment Name: At_Germinating_Seeds_cDNA_P Parameter: Tissue Value: Germinating Seeds
  misc_feature: MA Experiment ID: 20000090 Result: Up-regulated in Transcription
  misc_feature: MA Experiment ID: 20000495 Result: Up-regulated in Transcription
  misc_feature: MA Experiment 20000495 PARAMETER Experiment Name: At_Guard_Cells_P Parameter: Harvest Date Value: 8/2/2002
  misc_feature: MA Experiment 20000495 PARAMETER Experiment Name: At_Guard_Cells_P Parameter: Organism Value: A. thaliana
  misc_feature: MA Experiment 20000495 PARAMETER Experiment Name: At_Guard_Cells_P Parameter: Tissue Value: Guard Cells vs. Leaves
ctcttcttcttcttcttcatcttttttttttaacagatctggtggaaattttatcttttgaccccaccactggatctctctatatacacattcatctgagtaatagagtaaaaacgaaacacaagaagcaattatgaagaattgtgagagatttgctaatctcgctctcgcaggtttgacattggcaccactcgttgtgagagtaaatccaaatttgaatgttattctcacagcatgtatcactgtttatgtgggttgctttcgttcggtcaaggatactcctccaacggagacgatgtcaaaagaacatgccatgcgtttcccattggttgggagtgctatgcttctctcacttttcttattgttcaagtttctctcaaaggacttggttaatgctgtgctaacagcttacttctttgttcttgggattgtcgctctttcagcgacattgttaccagccatcagaagatttttaccaaatccttggaatgacaatcttatcgtctggcgttttccttatttcaagtctttggaggtagagttcacaaagtcccaagttgttgcgggaatccctggaacattcttctgtgcgtggtatgcgtggaaaaaacattggctggctaacaatatcctcggcctttccttctgcattcagggaattgagatgctctctctcggatcattcaagactggtgccatccttttggcaggactatttttctatgatatcttctgggttttctttactccagttatggttagtgttgccaaatccttcgatgctccaattaagctcttattccctacgggtgatgctctaagaccctattctatgcttggtcttggtgacattgtcattccgggtattttcgttgcactagctctaagatttgatgtgtcaagacgtagacaaccacaatacttcacaagtgcatttatcggatacgctgttggtgtgatcctcacgattgtagtcatgaactggtttcaagcagcacagcctgctttgttatacattgtcccagccgtaattgggttcttggcttctcactgcatttggaacggtgacatcaaaccgttgttggcgtttgatgaatcaaagacagaggaagcaacgactgatgaatcaaagactagtgaggaggttaataaagctcatgatgaatgaggaaaaatcgagaaagaagggcagaggagaaatatatacacataaatgtgtcttaatatatggaacaagaaggaaaacaattttgtttccaaatgatcatcaatcagtcccttctaaccccttttttgtttttttagattttcaaactttcttttggccaagacttgtgtaagttactataagttacaacaaattttctttgactaat

SEQ ID NO: 24100 - protein, 344 aa, Arabidopsis thaliana
  peptide (1)..(344): Ceres Seq. ID no. 13490839
  misc_feature (47)..(321): Pfam Name: Signal peptide peptidase Pfam Description: Signal peptide peptidase
  misc_feature (29)..(339): Homolog of NCBI NO: 14286280 NR Description: Similar to histocompatibility 13 [Homo sapiens]
  misc_feature (29)..(344): Homolog of NCBI NO: 26389558 NR Description: unnamed protein product [Mus musculus]
  misc_feature (29)..(344): Homolog of NCBI NO: 34858994 NR Description: similar to histocompatibility 13; presenilin-like
  misc_feature (29)..(344): Homolog of NCBI NO: 18034682 NR Description: histocompatibility 13; presenilin-like protein 3
  misc_feature (29)..(344): Homolog of NCBI NO: 25992191 NR Description: putative presenilin-like aspartyl protease [Mus
  misc_feature (29)..(339): Homolog of NCBI NO: 23308607 NR Description: minor histocompatibility antigen 13 isoform 1
  misc_feature (29)..(339): Homolog of NCBI NO: 22761270 NR Description: unnamed protein product [Homo sapiens]
  misc_feature (29)..(344): Homolog of NCBI NO: 17647929 NR Description: shanti CG11840-PA [Drosophila melanogaster]
  misc_feature (1)..(344): Homolog of NCBI NO: 21593273 NR Description: unknown [Arabidopsis thaliana]
  misc_feature (1)..(344): Homolog of NCBI NO: 18395487 NR Description: expressed protein [Arabidopsis thaliana]
MKNCERFANLALAGLTLAPLVVRVNPNLNVILTACITVYVGCFRSVKDTPPTETMSKEHAMRFPLVGSAMLLSLFLLFKFLSKDLVNAVLTAYFFVLGIVALSATLLPAIRRFLPNPWNDNLIVWRFPYFKSLEVEFTKSQVVAGIPGTFFCAWYAWKKHWLANNILGLSFCIQGIEMLSLGSFKTGAILLAGLFFYDIFWVFFTPVMVSVAKSFDAPIKLLFPTGDALRPYSMLGLGDIVIPGIFVALALRFDVSRRRQPQYFTSAFIGYAVGVILTIVVMNWFQAAQPALLYIVPAVIGFLASHCIWNGDIKPLLAFDESKTEEATTDESKTSEEVNKAHDE

SEQ ID NO: 24101 - protein, 290 aa, Arabidopsis thaliana
  peptide (1)..(290): Ceres Seq. ID no. 13490840
  misc_feature (1)..(267): Pfam Name: Signal peptide peptidase Pfam Description: Signal peptide peptidase
  misc_feature (1)..(285): Homolog of NCBI NO: 14286280 NR Description: Similar to histocompatibility 13 [Homo sapiens]
  misc_feature (1)..(290): Homolog of NCBI NO: 26389558 NR Description: unnamed protein product [Mus musculus]
  misc_feature (1)..(290): Homolog of NCBI NO: 34858994 NR Description: similar to histocompatibility 13; presenilin-like
  misc_feature (1)..(290): Homolog of NCBI NO: 18034682 NR Description: histocompatibility 13; presenilin-like protein 3
  misc_feature (1)..(290): Homolog of NCBI NO: 25992191 NR Description: putative presenilin-like aspartyl protease [Mus
  misc_feature (1)..(285): Homolog of NCBI NO: 23308607 NR Description: minor histocompatibility antigen 13 isoform 1
  misc_feature (1)..(285): Homolog of NCBI NO: 22761270 NR Description: unnamed protein product [Homo sapiens]
  misc_feature (1)..(290): Homolog of NCBI NO: 17647929 NR Description: shanti CG11840-PA [Drosophila melanogaster]
  misc_feature (1)..(290): Homolog of NCBI NO: 21593273 NR Description: unknown [Arabidopsis thaliana]
  misc_feature (1)..(290): Homolog of NCBI NO: 18395487 NR Description: expressed protein [Arabidopsis thaliana]
MSKEHAMRFPLVGSAMLLSLFLLFKFLSKDLVNAVLTAYFFVLGIVALSATLLPAIRRFLPNPWNDNLIVWRFPYFKSLEVEFTKSQVVAGIPGTFFCAWYAWKKHWLANNILGLSFCIQGIEMLSLGSFKTGAILLAGLFFYDIFWVFFTPVMVSVAKSFDAPIKLLFPTGDALRPYSMLGLGDIVIPGIFVALALRFDVSRRRQPQYFTSAFIGYAVGVILTIVVMNWFQAAQPALLYIVPAVIGFLASHCIWNGDIKPLLAFDESKTEEATTDESKTSEEVNKAHDE

SEQ ID NO: 24102 - protein, 284 aa, Arabidopsis thaliana
  peptide (1)..(284): Ceres Seq. ID no. 13490841
  misc_feature (1)..(261): Pfam Name: Signal peptide peptidase Pfam Description: Signal peptide peptidase
  misc_feature (1)..(284): Homolog of NCBI NO: 34858994 NR Description: similar to histocompatibility 13; presenilin-like
  misc_feature (1)..(284): Homolog of NCBI NO: 18034682 NR Description: histocompatibility 13; presenilin-like protein 3
  misc_feature (1)..(284): Homolog of NCBI NO: 25992191 NR Description: putative presenilin-like aspartyl protease [Mus
  misc_feature (1)..(279): Homolog of NCBI NO: 23308607 NR Description: minor histocompatibility antigen 13 isoform 1
  misc_feature (1)..(279): Homolog of NCBI NO: 14286280 NR Description: Similar to histocompatibility 13 [Homo sapiens]
  misc_feature (1)..(284): Homolog of NCBI NO: 26389558 NR Description: unnamed protein product [Mus musculus]
  misc_feature (1)..(279): Homolog of NCBI NO: 22761270 NR Description: unnamed protein product [Homo sapiens]
  misc_feature (1)..(284): Homolog of NCBI NO: 17647929 NR Description: shanti CG11840-PA [Drosophila melanogaster]
  misc_feature (1)..(284): Homolog of NCBI NO: 21593273 NR Description: unknown [Arabidopsis thaliana]
  misc_feature (1)..(284): Homolog of NCBI NO: 18395487 NR Description: expressed protein [Arabidopsis thaliana]
MRFPLVGSAMLLSLFLLFKFLSKDLVNAVLTAYFFVLGIVALSATLLPAIRRFLPNPWNDNLIVWRFPYFKSLEVEFTKSQVVAGIPGTFFCAWYAWKKHWLANNILGLSFCIQGIEMLSLGSFKTGAILLAGLFFYDIFWVFFTPVMVSVAKSFDAPIKLLFPTGDALRPYSMLGLGDIVIPGIFVALALRFDVSRRRQPQYFTSAFIGYAVGVILTIVVMNWFQAAQPALLYIVPAVIGFLASHCIWNGDIKPLLAFDESKTEEATTDESKTSEEVNKAHDE

SEQ ID NO: 24103 - DNA, 1551 bp, Arabidopsis thaliana
  misc_feature (1)..(1551): Ceres Seq. ID no. 12339154
  misc_feature: MA Experiment ID: 20000179 Result: Up-regulated in Transcription
  misc_feature: MA Experiment 20000179 PARAMETER Experiment Name: At_Germinating_Seeds_P Parameter: Age (hr) Value: 6 vs. 0
  misc_feature: MA Experiment 20000179 PARAMETER Experiment Name: At_Germinating_Seeds_P Parameter: Tissue Value: Germinating Seeds
  misc_feature: MA Experiment ID: 20000180 Result: Up-regulated in Transcription
  misc_feature: MA Experiment 20000180 PARAMETER Experiment Name: At_Germinating_Seeds_P Parameter: Age (hr) Value: 24 vs. 0
  misc_feature: MA Experiment 20000180 PARAMETER Experiment Name: At_Germinating_Seeds_P Parameter: Tissue Value: Germinating Seeds
  misc_feature: MA Experiment ID: 20000184 Result: Up-regulated in Transcription
  misc_feature: MA Experiment 20000184 PARAMETER Experiment Name: At_Shoots__P Parameter: Age (day) Value: 7
  misc_feature: MA Experiment 20000184 PARAMETER Experiment Name: At_Shoots__P Parameter: Tissue Value: Shoots vs. Whole Plant
  misc_feature: MA Experiment ID: 20000185 Result: Up-regulated in Transcription
  misc_feature: MA Experiment 20000185 PARAMETER Experiment Name: At_Roots__P Parameter: Age (day) Value: 7 vs. 21
  misc_feature: MA Experiment 20000185 PARAMETER Experiment Name: At_Roots__P Parameter: Organism Value: A. thaliana
  misc_feature: MA Experiment 20000185 PARAMETER Experiment Name: At_Roots__P Parameter: Tissue Value: Roots vs. Whole Plant
  misc_feature: MA Experiment ID: 20001450 Result: Up-regulated in Transcription
  misc_feature: MA Experiment 20001450 PARAMETER Experiment Name: At_Far-red-induction_P Parameter: Age (day) Value: 7
  misc_feature: MA Experiment 20001450 PARAMETER Experiment Name: At_Far-red-induction_P Parameter: Light Value: Far-red vs. White
  misc_feature: MA Experiment 20001450 PARAMETER Experiment Name: At_Far-red-induction_P Parameter: Organism Value: A. thaliana
  misc_feature: MA Experiment 20001450 PARAMETER Experiment Name: At_Far-red-induction_P Parameter: Plant Line Value: Columbia
  misc_feature: MA Experiment 20001450 PARAMETER Experiment Name: At_Far-red-induction_P Parameter: Timepoint (hr) Value: 8
  misc_feature: MA Experiment 20001450 PARAMETER Experiment Name: At_Far-red-induction_P Parameter: Tissue Value: Whole Plant
ctcctctgcctctcatctcttgttctctccgcccatctctgctctcttttattttcccagaaagtttttttttttcccgaattccgttaatctcattggggtttccattgatagcaatggcgacggctttcgctcccactaagctcactgccacggttcctctgcatggatcccatgagaatcgtctcttgctcccgatccgattggctcctccttcttctttcctcggatccacccgttccctctcccttcgcagactcaatcactccaacgccacccgtcgatctcccgtcgtctctgtccaggaagttgtcaaggagaagcaatccaccaataataccagcctgttgataaccaaagaggaaggattggatttgtatgaagatatgatactaggtagatctttcgaagacatgtgtgctcaaatgtattaccgaggcaagatgtttggttttgttcacttgtacaatggccaagaggctgtttctactggctttatcaagctccttaccaagtctgactctgtcgttagtacctaccgtgaccatgtccatgccctcagcaaaggtgtctctgctcgtgctgttatgagcgagctcttcggcaaggttactggatgctgcagaggccaaggtggatccatgcacatgttctccaaagaacacaacatgcttggtggctttgcttttattggtgaaggcattcctgtcgccactggtgctgcctttagctccaagtacaggagggaagtcttgaaacaggattgtgatgatgtcactgtcgcctttttcggagatggaacttgtaacaacggacagttcttcgagtgtctcaacatggctgctctctataaactgcctattatctttgttgtcgagaataacttgtgggccattgggatgtctcacttgagagccacttctgaccccgagatttggaagaaaggtcctgcatttgggatgcctggtgttcatgttgacggtatggatgtcttgaaggtcagggaagtcgctaaagaggctgtcactagagctagaagaggagaaggtccaaccttggttgaatgtgagacttatagatttagaggacactccttggctgatcccgatgagctccgtgatgctgctgagaaagccaaatacgcggctagagacccaatcgcagcattgaagaagtatttgatagagaacaagcttgcaaaggaagcagagctaaagtcaatagagaaaaagatagacgagttggtggaggaagcggttgagtttgcagacgctagtccacagcccggtcgcagtcagttgctagagaatgtgtttgctgatccaaaaggatttggaattggacctgatggacggtacagatgtgaggaccccaagtttaccgaaggcacagctcaagtctgagaagacaagtttaaccataagctgtctactgtctcttcgatgtttctatatatcttattaagttaaatgctacagagaatcagtttgaatcatttgcactttttgctttttgtttggtgttactaaattatcacaaggttcttcttgt

SEQ ID NO: 24104 - protein, 466 aa, Arabidopsis thaliana
  peptide (1)..(466): Ceres Seq. ID no. 12339155
  misc_feature (127)..(431): Pfam Name: Dehydrogenase E1 component Pfam Description: Dehydrogenase E1 component
  misc_feature (123)..(439): Homolog of NCBI NO: 30468172 NR Description: pyruvate dehydrogenase E1 component alpha subunit
  misc_feature (117)..(440): Homolog of NCBI NO: 22298712 NR Description: pyruvate dehydrogenase E1 component, alpha
  misc_feature (110)..(440): Homolog of NCBI NO: 11465733 NR Description: pyruvate dehydrogenase E1 component alpha subunit
  misc_feature (111)..(440): Homolog of NCBI NO: 16331186 NR Description: pyruvate dehydrogenase E1 component, alpha
  misc_feature (111)..(440): Homolog of NCBI NO: 23128827 NR Description: hypothetical protein [Nostoc punctiforme]
  misc_feature (100)..(440): Homolog of NCBI NO: 17230200 NR Description: pyruvate dehydrogenase E1 component, alpha
  misc_feature (100)..(440): Homolog of NCBI NO: 23041416 NR Description: hypothetical protein [Trichodesmium erythraeum
  misc_feature (117)..(466): Homolog of NCBI NO: 38344868 NR Description: OSJNBa0020P07.11 [Oryza sativa (japonica
  misc_feature (39)..(455): Homolog of NCBI NO: 6715645 NR Description: T25K16.8 [Arabidopsis thaliana]
  misc_feature (39)..(466): Homolog of NCBI NO: 15223294 NR Description: pyruvate dehydrogenase E1 alpha subunit
PLPLISCSLRPSLLSFIFPESFFFSRIPLISLGFPLIAMATAFAPTKLTATVPLHGSHENRLLLPIRLAPPSSFLGSTRSLSLRRLNHSNATRRSPVVSVQEVVKEKQSTNNTSLLITKEEGLDLYEDMILGRSFEDMCAQMYYRGKMFGFVHLYNGQEAVSTGFIKLLTKSDSVVSTYRDHVHALSKGVSARAVMSELFGKVTGCCRGQGGSMHMFSKEHNMLGGFAFIGEGIPVATGAAFSSKYRREVLKQDCDDVTVAFFGDGTCNNGQFFECLNMAALYKLPIIFVVENNLWAIGMSHLRATSDPEIWKKGPAFGMPGVHVDGMDVLKVREVAKEAVTRARRGEGPTLVECETYRFRGHSLADPDELRDAAEKAKYAARDPIAALKKYLIENKLAKEAELKSIEKKIDELVEEAVEFADASPQPGRSQLLENVFADPKGFGIGPDGRYRCEDPKFTEGTAQV

SEQ ID NO: 24105 - protein, 428 aa, Arabidopsis thaliana
  peptide (1)..(428): Ceres Seq. ID no. 12339157
  misc_feature (89)..(393): Pfam Name: Dehydrogenase E1 component Pfam Description: Dehydrogenase E1 component
  misc_feature (85)..(401): Homolog of NCBI NO: 30468172 NR Description: pyruvate dehydrogenase E1 component alpha subunit
  misc_feature (79)..(402): Homolog of NCBI NO: 22298712 NR Description: pyruvate dehydrogenase E1 component, alpha
  misc_feature (72)..(402): Homolog of NCBI NO: 11465733 NR Description: pyruvate dehydrogenase E1 component alpha subunit
  misc_feature (73)..(402): Homolog of NCBI NO: 16331186 NR Description: pyruvate dehydrogenase E1 component, alpha
  misc_feature (73)..(402): Homolog of NCBI NO: 23128827 NR Description: hypothetical protein [Nostoc punctiforme]
  misc_feature (62)..(402): Homolog of NCBI NO: 17230200 NR Description: pyruvate dehydrogenase E1 component, alpha
  misc_feature (62)..(402): Homolog of NCBI NO: 23041416 NR Description: hypothetical protein [Trichodesmium erythraeum
  misc_feature (79)..(428): Homolog of NCBI NO: 38344868 NR Description: OSJNBa0020P07.11 [Oryza sativa (japonica
  misc_feature (1)..(417): Homolog of NCBI NO: 6715645 NR Description: T25K16.8 [Arabidopsis thaliana]
  misc_feature (1)..(428): Homolog of NCBI NO: 15223294 NR Description: pyruvate dehydrogenase E1 alpha subunit
MATAFAPTKLTATVPLHGSHENRLLLPIRLAPPSSFLGSTRSLSLRRLNHSNATRRSPVVSVQEVVKEKQSTNNTSLLITKEEGLDLYEDMILGRSFEDMCAQMYYRGKMFGFVHLYNGQEAVSTGFIKLLTKSDSVVSTYRDHVHALSKGVSARAVMSELFGKVTGCCRGQGGSMHMFSKEHNMLGGFAFIGEGIPVATGAAFSSKYRREVLKQDCDDVTVAFFGDGTCNNGQFFECLNMAALYKLPIIFVVENNLWAIGMSHLRATSDPEIWKKGPAFGMPGVHVDGMDVLKVREVAKEAVTRARRGEGPTLVECETYRFRGHSLADPDELRDAAEKAKYAARDPIAALKKYLIENKLAKEAELKSIEKKIDELVEEAVEFADASPQPGRSQLLENVFADPKGFGIGPDGRYRCEDPKFTEGTAQV

SEQ ID NO: 24106 - protein, 338 aa, Arabidopsis thaliana
  peptide (1)..(338): Ceres Seq. ID no. 12339158
  misc_feature (1)..(303): Pfam Name: Dehydrogenase E1 component Pfam Description: Dehydrogenase E1 component
  misc_feature (1)..(311): Homolog of NCBI NO: 30468172 NR Description: pyruvate dehydrogenase E1 component alpha subunit
  misc_feature (1)..(312): Homolog of NCBI NO: 22298712 NR Description: pyruvate dehydrogenase E1 component, alpha
  misc_feature (1)..(312): Homolog of NCBI NO: 11465733 NR Description: pyruvate dehydrogenase E1 component alpha subunit
  misc_feature (1)..(312): Homolog of NCBI NO: 16331186 NR Description: pyruvate dehydrogenase E1 component, alpha
  misc_feature (1)..(312): Homolog of NCBI NO: 23128827 NR Description: hypothetical protein [Nostoc punctiforme]
  misc_feature (1)..(312): Homolog of NCBI NO: 17230200 NR Description: pyruvate dehydrogenase E1 component, alpha
  misc_feature (1)..(312): Homolog of NCBI NO: 23041416 NR Description: hypothetical protein [Trichodesmium erythraeum
  misc_feature (1)..(338): Homolog of NCBI NO: 38344868 NR Description: OSJNBa0020P07.11 [Oryza sativa (japonica
  misc_feature (1)..(327): Homolog of NCBI NO: 6715645 NR Description: T25K16.8 [Arabidopsis thaliana]
  misc_feature (1)..(338): Homolog of NCBI NO: 15223294 NR Description: pyruvate dehydrogenase E1 alpha subunit
MILGRSFEDMCAQMYYRGKMFGFVHLYNGQEAVSTGFIKLLTKSDSVVSTYRDHVHALSKGVSARAVMSELFGKVTGCCRGQGGSMHMFSKEHNMLGGFAFIGEGIPVATGAAFSSKYRREVLKQDCDDVTVAFFGDGTCNNGQFFECLNMAALYKLPIIFVVENNLWAIGMSHLRATSDPEIWKKGPAFGMPGVHVDGMDVLKVREVAKEAVTRARRGEGPTLVECETYRFRGHSLADPDELRDAAEKAKYAARDPIAALKKYLIENKLAKEAELKSIEKKIDELVEEAVEFADASPQPGRSQLLENVFADPKGFGIGPDGRYRCEDPKFTEGTAQV

SEQ ID NO: 24107 - DNA, 1275 bp, Arabidopsis thaliana
  misc_feature (1)..(1275): Ceres Seq. ID no. 12394481
  misc_feature: MA Experiment ID: 108573 Result: Up-regulated in Transcription
  misc_feature: MA Experiment 108573 PARAMETER Experiment Name: At_Drought_cDNA_P Parameter: Timepoint (hr) Value: 6
  misc_feature: MA Experiment 108573 PARAMETER Experiment Name: At_Drought_cDNA_P Parameter: Tissue Value: Aerial
  misc_feature: MA Experiment 108573 PARAMETER Experiment Name: At_Drought_cDNA_P Parameter: Treatment Value: Drought vs. No Drought
  misc_feature: MA Experiment ID: 108577 Result: Down-regulated in Transcription
  misc_feature: MA Experiment 108577 PARAMETER Experiment Name: At_42deg_Heat_cDNA_P Parameter: Temperature (deg C) Value: 42 vs. 22
  misc_feature: MA Experiment 108577 PARAMETER Experiment Name: At_42deg_Heat_cDNA_P Parameter: Timepoint (hr) Value: 6
  misc_feature: MA Experiment 108577 PARAMETER Experiment Name: At_42deg_Heat_cDNA_P Parameter: Tissue Value: Aerial
  misc_feature: MA Experiment ID: 108595 Result: Up-regulated in Transcription
  misc_feature: MA Experiment 108595 PARAMETER Experiment Name: At_Ler-pi_Ovule_cDNA_P Parameter: Plant Line Value: null
  misc_feature: MA Experiment ID: 20000111 Result: Down-regulated in Transcription
  misc_feature: MA Experiment 20000111 PARAMETER Experiment Name: At_42deg_Heat_cDNA_P Parameter: Temperature (deg C) Value: 42 vs. 22
  misc_feature: MA Experiment 20000111 PARAMETER Experiment Name: At_42deg_Heat_cDNA_P Parameter: Timepoint (hr) Value: 6
  misc_feature: MA Experiment 20000111 PARAMETER Experiment Name: At_42deg_Heat_cDNA_P Parameter: Tissue Value: Aerial
  misc_feature: MA Experiment ID: 20000113 Result: Down-regulated in Transcription
  misc_feature: MA Experiment 20000113 PARAMETER Experiment Name: At_42deg_Heat_cDNA_P Parameter: Temperature (deg C) Value: 42 vs. 22
  misc_feature: MA Experiment 20000113 PARAMETER Experiment Name: At_42deg_Heat_cDNA_P Parameter: Timepoint (hr) Value: 8
  misc_feature: MA Experiment 20000113 PARAMETER Experiment Name: At_42deg_Heat_cDNA_P Parameter: Tissue Value: Aerial
  misc_feature: MA Experiment ID: 20000214 Result: Down-regulated in Transcription
  misc_feature: MA Experiment 20000214 PARAMETER Experiment Name: At_4deg_Cold_P Parameter: Timepoint (hr) Value: 6
  misc_feature: MA Experiment ID: 20000495 Result: Up-regulated in Transcription
  misc_feature: MA Experiment 20000495 PARAMETER Experiment Name: At_Guard_Cells_P Parameter: Harvest Date Value: 8/2/2002
  misc_feature: MA Experiment 20000495 PARAMETER Experiment Name: At_Guard_Cells_P Parameter: Organism Value: A. thaliana
  misc_feature: MA Experiment 20000495 PARAMETER Experiment Name: At_Guard_Cells_P Parameter: Tissue Value: Guard Cells vs. Leaves
aaagaagttcctcattcaaaaaagatttctcagccatcaaaattctctttctcttcatccaacaaaaaaaaagcatacctctttttcttccatatagataagttaattaagaaaacgaattatcaggttttgtttcggctgatctgaggaagttcatctatggatacggctcagtggccacaggagattgtagtgaagcccttggaagaaatagtaacaaacacatgcccaaagccacaaccgcaaccgcttcaaacgcagcagccaccgtcggtgggtggagagaggaaggcaagaccagaaaaggatcaagctgtaaactgtccgagatgtaactcaaccaacacaaagttttgttactacaacaattatagtttgacgcagccaagatacttctgcaaaggttgtagaaggtattggaccgaaggcggttcgcttaggaacattcctgttggcggtggctcaagaaagaacaagagatctcactctttttcttctgatattagtaacaatcactcggattctacacaaccagctacaaagaagcatctctctgatcatcaccaccacctcatgagcatgtctcaacaaggtttgaccggtcaaaaccctaaattccttgagacgacccaacaagatctcaatttaggtttttcaccacatgggatgattaggaccaacttcactgacctcatccacaacattggcaacaacaccaacaagagcaacaacaataacaatccattgattgtttcttcatgttctaccatggctacttcttctctggatctcataagaaacaatagtaacaatgggaattcttcaaattcttccttcatgggatttccagttcataatgaagatccagcatcaggagggttttcaatgcaagatcattacaagccttgcaacacaaacaccacactgctagggttttcattagatcatcatcataataatggatttcatggagggtttcaaggaggagaagaaggtggagaaggtggtgatgatgtgaatggaaggcacttgtttccttttgaggatttgaaattgccagtttcttcttcatcagcaacaattaatgtcgacattaatgaacatcagaagcgaggaagcggtagtgatgcagctgctacgtctggtgggtattggactgggatgttgagtggaggatcatggtgctaattaatttctcggtttggttgatgaagatagtactattagtggttaattattgctatttatttaattaatcaatatgttcttaatttc

SEQ ID NO: 24108 - protein, 342 aa, Arabidopsis thaliana
  peptide (1)..(342): Ceres Seq. ID no. 12394482
  misc_feature (48)..(110): Pfam Name: Dof domain, zinc finger Pfam Description: Dof domain, zinc finger
  misc_feature (38)..(341): Homolog of NCBI NO: 24211633 NR Description: DOF zinc finger protein DAG2 (Dof affecting
  misc_feature (36)..(340): Homolog of NCBI NO: 38344272 NR Description: OSJNBa0005N02.10 [Oryza sativa (japonica
  misc_feature (36)..(340): Homolog of NCBI NO: 4996640 NR Description: Dof zinc finger protein [Oryza sativa]
  misc_feature (15)..(340): Homolog of NCBI NO: 25404940 NR Description: protein F1N19.19 [imported] - Arabidopsis
  misc_feature (1)..(340): Homolog of NCBI NO: 21537120 NR Description: zinc finger protein, putative [Arabidopsis
  misc_feature (1)..(340): Homolog of NCBI NO: 18408092 NR Description: Dof zinc finger protein
  misc_feature (139)..(342): Homolog of NCBI NO: 14335082 NR Description: AT4g24060/T19F6_50 [Arabidopsis thaliana]
  misc_feature (8)..(342): Homolog of NCBI NO: 7487175 NR Description: hypothetical protein T19F6.50 - Arabidopsis
  misc_feature (1)..(342): Homolog of NCBI NO: 18416267 NR Description: Dof zinc finger protein
  misc_feature (1)..(342): Homolog of NCBI NO: 21593274 NR Description: unknown [Arabidopsis thaliana]
MDTAQWPQEIVVKPLEEIVTNTCPKPQPQPLQTQQPPSVGGERKARPEKDQAVNCPRCNSTNTKFCYYNNYSLTQPRYFCKGCRRYWTEGGSLRNIPVGGGSRKNKRSHSFSSDISNNHSDSTQPATKKHLSDHHHHLMSMSQQGLTGQNPKFLETTQQDLNLGFSPHGMIRTNFTDLIHNIGNNTNKSNNNNNPLIVSSCSTMATSSLDLIRNNSNNGNSSNSSFMGFPVHNEDPASGGFSMQDHYKPCNTNTTLLGFSLDHHHNNGFHGGFQGGEEGGEGGDDVNGRHLFPFEDLKLPVSSSSATINVDINEHQKRGSGSDAAATSGGYWTGMLSGGSWC

SEQ ID NO: 24109 - protein, 204 aa, Arabidopsis thaliana
  peptide (1)..(204): Ceres Seq. ID no. 12394483
  misc_feature (1)..(203): Homolog of NCBI NO: 24211633 NR Description: DOF zinc finger protein DAG2 (Dof affecting
  misc_feature (1)..(202): Homolog of NCBI NO: 38344272 NR Description: OSJNBa0005N02.10 [Oryza sativa (japonica
  misc_feature (1)..(202): Homolog of NCBI NO: 4996640 NR Description: Dof zinc finger protein [Oryza sativa]
  misc_feature (1)..(202): Homolog of NCBI NO: 25404940 NR Description: protein F1N19.19 [imported] - Arabidopsis
  misc_feature (1)..(202): Homolog of NCBI NO: 21537120 NR Description: zinc finger protein, putative [Arabidopsis
  misc_feature (1)..(202): Homolog of NCBI NO: 18408092 NR Description: Dof zinc finger protein
  misc_feature (1)..(204): Homolog of NCBI NO: 14335082 NR Description: AT4g24060/T19F6_50 [Arabidopsis thaliana]
  misc_feature (1)..(204): Homolog of NCBI NO: 7487175 NR Description: hypothetical protein T19F6.50 - Arabidopsis
  misc_feature (1)..(204): Homolog of NCBI NO: 18416267 NR Description: Dof zinc finger protein
  misc_feature (1)..(204): Homolog of NCBI NO: 21593274 NR Description: unknown [Arabidopsis thaliana]
MSMSQQGLTGQNPKFLETTQQDLNLGFSPHGMIRTNFTDLIHNIGNNTNKSNNNNNPLIVSSCSTMATSSLDLIRNNSNNGNSSNSSFMGFPVHNEDPASGGFSMQDHYKPCNTNTTLLGFSLDHHHNNGFHGGFQGGEEGGEGGDDVNGRHLFPFEDLKLPVSSSSATINVDINEHQKRGSGSDAAATSGGYWTGMLSGGSWC

SEQ ID NO: 24110 - protein, 202 aa, Arabidopsis thaliana
  peptide (1)..(202): Ceres Seq. ID no. 12394484
  misc_feature (1)..(201): Homolog of NCBI NO: 24211633 NR Description: DOF zinc finger protein DAG2 (Dof affecting
  misc_feature (1)..(200): Homolog of NCBI NO: 38344272 NR Description: OSJNBa0005N02.10 [Oryza sativa (japonica
  misc_feature (1)..(200): Homolog of NCBI NO: 4996640 NR Description: Dof zinc finger protein [Oryza sativa]
  misc_feature (1)..(200): Homolog of NCBI NO: 25404940 NR Description: protein F1N19.19 [imported] - Arabidopsis
  misc_feature (1)..(200): Homolog of NCBI NO: 21537120 NR Description: zinc finger protein, putative [Arabidopsis
  misc_feature (1)..(200): Homolog of NCBI NO: 18408092 NR Description: Dof zinc finger protein
  misc_feature (1)..(202): Homolog of NCBI NO: 14335082 NR Description: AT4g24060/T19F6_50 [Arabidopsis thaliana]
  misc_feature (1)..(202): Homolog of NCBI NO: 7487175 NR Description: hypothetical protein T19F6.50 - Arabidopsis
  misc_feature (1)..(202): Homolog of NCBI NO: 18416267 NR Description: Dof zinc finger protein
  misc_feature (1)..(202): Homolog of NCBI NO: 21593274 NR Description: unknown [Arabidopsis thaliana]
MSQQGLTGQNPKFLETTQQDLNLGFSPHGMIRTNFTDLIHNIGNNTNKSNNNNNPLIVSSCSTMATSSLDLIRNNSNNGNSSNSSFMGFPVHNEDPASGGFSMQDHYKPCNTNTTLLGFSLDHHHNNGFHGGFQGGEEGGEGGDDVNGRHLFPFEDLKLPVSSSSATINVDINEHQKRGSGSDAAATSGGYWTGMLSGGSWC

SEQ ID NO: 24111 - DNA, 1201 bp, Arabidopsis thaliana
  misc_feature (1)..(1201): Ceres Seq. ID no. 12371528
  misc_feature: MA Experiment ID: 108434 Result: Down-regulated in Transcription
  misc_feature: MA Experiment 108434 PARAMETER Experiment Name: At_Root_Tips_cDNA_P Parameter: Tissue Value: Root Tips
  misc_feature: MA Experiment ID: 108435 Result: Down-regulated in Transcription
  misc_feature: MA Experiment 108435 PARAMETER Experiment Name: At_stm_Mutants_cDNA_P Parameter: Plant Line Value: wt Landsburg vs stm
  misc_feature: MA Experiment 108435 PARAMETER Experiment Name: At_stm_Mutants_cDNA_P Parameter: Tissue Value: Shoot Apical Meristem Region
  misc_feature: MA Experiment ID: 108462 Result: Up-regulated in Transcription
  misc_feature: MA Experiment 108462 PARAMETER Experiment Name: At_Germinating_Seeds_cDNA_P Parameter: Age (day) Value: 2 vs. 0
  misc_feature: MA Experiment 108462 PARAMETER Experiment Name: At_Germinating_Seeds_cDNA_P Parameter: Tissue Value: Germinating Seeds
  misc_feature: MA Experiment ID: 108463 Result: Up-regulated in Transcription
  misc_feature: MA Experiment 108463 PARAMETER Experiment Name: At_Germinating_Seeds_cDNA_P Parameter: Age (day) Value: 3 vs. 0
  misc_feature: MA Experiment 108463 PARAMETER Experiment Name: At_Germinating_Seeds_cDNA_P Parameter: Tissue Value: Germinating Seeds
  misc_feature: MA Experiment ID: 108464 Result: Up-regulated in Transcription
  misc_feature: MA Experiment 108464 PARAMETER Experiment Name: At_Germinating_Seeds_cDNA_P Parameter: Age (day) Value: 4 vs. 0
  misc_feature: MA Experiment 108464 PARAMETER Experiment Name: At_Germinating_Seeds_cDNA_P Parameter: Tissue Value: Germinating Seeds
  misc_feature: MA Experiment ID: 108489 Result: Down-regulated in Transcription
  misc_feature: MA Experiment ID: 108573 Result: Up-regulated in Transcription
  misc_feature: MA Experiment 108573 PARAMETER Experiment Name: At_Drought_cDNA_P Parameter: Timepoint (hr) Value: 6
  misc_feature: MA Experiment 108573 PARAMETER Experiment Name: At_Drought_cDNA_P Parameter: Tissue Value: Aerial
  misc_feature: MA Experiment 108573 PARAMETER Experiment Name: At_Drought_cDNA_P Parameter: Treatment Value: Drought vs. No Drought
  misc_feature: MA Experiment ID: 108595 Result: Down-regulated in Transcription
  misc_feature: MA Experiment 108595 PARAMETER Experiment Name: At_Ler-pi_Ovule_cDNA_P Parameter: Plant Line Value: null
  misc_feature: MA Experiment ID: 20000087 Result: Down-regulated in Transcription
  misc_feature: MA Experiment 20000087 PARAMETER Experiment Name: At_100uM_ABA_Mutants_cDNA_P Parameter: Plant Line Value: WS
  misc_feature: MA Experiment 20000087 PARAMETER Experiment Name: At_100uM_ABA_Mutants_cDNA_P Parameter: Timepoint (hr) Value: 6
  misc_feature: MA Experiment 20000087 PARAMETER Experiment Name: At_100uM_ABA_Mutants_cDNA_P Parameter: Tissue Value: Aerial
  misc_feature: MA Experiment 20000087 PARAMETER Experiment Name: At_100uM_ABA_Mutants_cDNA_P Parameter: Treatment Value: 100uM ABA vs. No Treatment
  misc_feature: MA Experiment ID: 20000185 Result: Down-regulated in Transcription
  misc_feature: MA Experiment 20000185 PARAMETER Experiment Name: At_Roots__P Parameter: Age (day) Value: 7 vs. 21
  misc_feature: MA Experiment 20000185 PARAMETER Experiment Name: At_Roots__P Parameter: Organism Value: A. thaliana
  misc_feature: MA Experiment 20000185 PARAMETER Experiment Name: At_Roots__P Parameter: Tissue Value: Roots vs. Whole Plant
  misc_feature: MA Experiment ID: 20000227 Result: Down-regulated in Transcription
  misc_feature: MA Experiment 20000227 PARAMETER Experiment Name: At_Root-Tips-vs-Tops_P Parameter: Tissue Value: Root Tips vs. Root Tops
  misc_feature: MA Experiment ID: 20000439 Result: Down-regulated in Transcription
  misc_feature: MA Experiment 20000439 PARAMETER Experiment Name: At_Roots__P Parameter: Age (day) Value: 14 vs. 21
  misc_feature: MA Experiment 20000439 PARAMETER Experiment Name: At_Roots__P Parameter: Organism Value: A. thaliana
  misc_feature: MA Experiment 20000439 PARAMETER Experiment Name: At_Roots__P Parameter: Tissue Value: Roots vs. Whole Plant
  misc_feature: MA Experiment ID: 20001451 Result: Down-regulated in Transcription
  misc_feature: MA Experiment 20001451 PARAMETER Experiment Name: At_Far-red-induction_P Parameter: Age (day) Value: 7
  misc_feature: MA Experiment 20001451 PARAMETER Experiment Name: At_Far-red-induction_P Parameter: Light Value: Far-red vs. White
  misc_feature: MA Experiment 20001451 PARAMETER Experiment Name: At_Far-red-induction_P Parameter: Organism Value: A. thaliana
  misc_feature: MA Experiment 20001451 PARAMETER Experiment Name: At_Far-red-induction_P Parameter: Plant Line Value: Columbia
  misc_feature: MA Experiment 20001451 PARAMETER Experiment Name: At_Far-red-induction_P Parameter: Timepoint (hr) Value: 24
  misc_feature: MA Experiment 20001451 PARAMETER Experiment Name: At_Far-red-induction_P Parameter: Tissue Value: Whole Plant
  misc_feature: MA Experiment ID: 20001557 Result: Down-regulated in Transcription
  misc_feature: MA Experiment 20001557 PARAMETER Experiment Name: At_Drought_Soil_Dry_P Parameter: Age (day) Value: 27
  misc_feature: MA Experiment 20001557 PARAMETER Experiment Name: At_Drought_Soil_Dry_P Parameter: Organism Value: A. thaliana
  misc_feature: MA Experiment 20001557 PARAMETER Experiment Name: At_Drought_Soil_Dry_P Parameter: Plant Line Value: WS
  misc_feature: MA Experiment 20001557 PARAMETER Experiment Name: At_Drought_Soil_Dry_P Parameter: Post Timepoint (hr) Value: 3
  misc_feature: MA Experiment 20001557 PARAMETER Experiment Name: At_Drought_Soil_Dry_P Parameter: Post-Treatment Value: Re-Water vs. No Drought
  misc_feature: MA Experiment 20001557 PARAMETER Experiment Name: At_Drought_Soil_Dry_P Parameter: Timepoint (day) Value: 13
  misc_feature: MA Experiment 20001557 PARAMETER Experiment Name: At_Drought_Soil_Dry_P Parameter: Treatment Value: Drought vs. No Drought
  misc_feature: MA Experiment ID: 20001558 Result: Down-regulated in Transcription
  misc_feature: MA Experiment 20001558 PARAMETER Experiment Name: At_Drought_Soil_Dry_P Parameter: Age (day) Value: 27
  misc_feature: MA Experiment 20001558 PARAMETER Experiment Name: At_Drought_Soil_Dry_P Parameter: Organism Value: A. thaliana
  misc_feature: MA Experiment 20001558 PARAMETER Experiment Name: At_Drought_Soil_Dry_P Parameter: Plant Line Value: WS
  misc_feature: MA Experiment 20001558 PARAMETER Experiment Name: At_Drought_Soil_Dry_P Parameter: Post Timepoint (hr) Value: 6
  misc_feature: MA Experiment 20001558 PARAMETER Experiment Name: At_Drought_Soil_Dry_P Parameter: Post-Treatment Value: Re-Water vs. No Drought
  misc_feature: MA Experiment 20001558 PARAMETER Experiment Name: At_Drought_Soil_Dry_P Parameter: Timepoint (day) Value: 13
  misc_feature: MA Experiment 20001558 PARAMETER Experiment Name: At_Drought_Soil_Dry_P Parameter: Treatment Value: Drought vs. No Drought
  misc_feature: MA Experiment ID: 20001560 Result: Down-regulated in Transcription
  misc_feature: MA Experiment 20001560 PARAMETER Experiment Name: At_Drought_Soil_Dry_P Parameter: Age (day) Value: 28
  misc_feature: MA Experiment 20001560 PARAMETER Experiment Name: At_Drought_Soil_Dry_P Parameter: Organism Value: A. thaliana
  misc_feature: MA Experiment 20001560 PARAMETER Experiment Name: At_Drought_Soil_Dry_P Parameter: Plant Line Value: WS
  misc_feature: MA Experiment 20001560 PARAMETER Experiment Name: At_Drought_Soil_Dry_P Parameter: Post Timepoint (hr) Value: None
  misc_feature: MA Experiment 20001560 PARAMETER Experiment Name: At_Drought_Soil_Dry_P Parameter: Post-Treatment Value: None
  misc_feature: MA Experiment 20001560 PARAMETER Experiment Name: At_Drought_Soil_Dry_P Parameter: Timepoint (day) Value: 14
  misc_feature: MA Experiment 20001560 PARAMETER Experiment Name: At_Drought_Soil_Dry_P Parameter: Treatment Value: Drought vs. No Drought
  misc_feature: MA Experiment ID: 20001905 Result: Down-regulated in Transcription
  misc_feature: MA Experiment 20001905 PARAMETER Experiment Name: At_Drought_Reproduction_P Parameter: Age (day) Value: 40
  misc_feature: MA Experiment 20001905 PARAMETER Experiment Name: At_Drought_Reproduction_P Parameter: Organism Value: A. thaliana
  misc_feature: MA Experiment 20001905 PARAMETER Experiment Name: At_Drought_Reproduction_P Parameter: Plant Line Value: WS
  misc_feature: MA Experiment 20001905 PARAMETER Experiment Name: At_Drought_Reproduction_P Parameter: Timepoint (day) Value: 10
  misc_feature: MA Experiment 20001905 PARAMETER Experiment Name: At_Drought_Reproduction_P Parameter: Tissue Value: Rosettes
  misc_feature: MA Experiment 20001905 PARAMETER Experiment Name: At_Drought_Reproduction_P Parameter: Treatment Value: Drought vs. No Drought
aaaaacaaattagaagaagaaaaatcgatggcggggatactagtgaacaatatcctccctcaacctccgattctccgatcgctttcttcttcttcgcgaagaagttcaattcgaaccctagttatggtcaaagcttcttcctctgaaccttccgagtctgtttcagtctccacgaagaccagtgacgacactggagctgttgttgtgttcactgctcctcctggtttcaagccaccggagccaaaacggttcgccgtcaaatccggaaaactcttcgatgtcttgggtgcagcaattggattgtttttccgattcggcactggtgttttcgtttctgggtactctgcatcttttgtgtctaaggaagagattccagctgatcagtatgcgttgcgtttaggcgggatcacggtaaaggaaactgctaaggtcgggcctcgtcctgagaaacccattgagatatatgagtttgaaggctgtcccttctgccggaaggtcagggaaatggttgcagtgttggatcttgatattctctactatccttgtccaagagggagtccaaatttccgcccgaaggttaaacagatgggcgggaaacaacagtttccgtacatggttgatcccaataccggagtgtccatgtatgaatcagatggaatcatcaaatatctatccgagaaatatggagatggaacagttcctttaagtctgtcacttggtgctttaacggctataacagcaggctttgcaatgattggtcgtatgggaaagggtaacttgtacacaccagcgaaactaccacctaagccactcgaattctgggcatatgagggttctccgttttgtaagcttgtacgcgaagttcttgtagaactggagttaccacacattcagcgcagttgtgctcgtggtagccccaaacggcaggtattgcttgagaaagctggtcactttcaggtgccttacctggaagatccaaacactggagtcgcgatgtttgagagtgcagaaattgttgagtatctcaagcaaacttatgctgcctaagtgttcgtcttcctcactttataccgtatagatatatgttaattgttgtgtgtatgttcagcctactttctgttccaacaataaactgaacgcagttatctgtagaggttttaaatgaagacatgtacttatatataagtaaaggaattgtgac

SEQ ID NO: 24112 - protein, 348 aa, Arabidopsis thaliana
  peptide (1)..(348): Ceres Seq. ID no. 12371529
  misc_feature (142)..(258): Homolog of NCBI NO: 15488040 NR Description: unknown [Photobacterium profundum]
  misc_feature (144)..(348): Homolog of NCBI NO: 7487730 NR Description: hypothetical protein T5L19.130 - Arabidopsis
  misc_feature (144)..(348): Homolog of NCBI NO: 21593568 NR Description: unknown [Arabidopsis thaliana]
  misc_feature (144)..(348): Homolog of NCBI NO: 18413285 NR Description: putative protein
  misc_feature (10)..(348): Homolog of NCBI NO: 11282317 NR Description: hypothetical protein F8F6.90 - Arabidopsis
  misc_feature (10)..(348): Homolog of NCBI NO: 21593275 NR Description: unknown [Arabidopsis thaliana]
  misc_feature (10)..(348): Homolog of NCBI NO: 18414386 NR Description: auxin-regulated protein
KNKLEEEKSMAGILVNNILPQPPILRSLSSSSRRSSIRTLVMVKASSSEPSESVSVSTKTSDDTGAVVVFTAPPGFKPPEPKRFAVKSGKLFDVLGAAIGLFFRFGTGVFVSGYSASFVSKEEIPADQYALRLGGITVKETAKVGPRPEKPIEIYEFEGCPFCRKVREMVAVLDLDILYYPCPRGSPNFRPKVKQMGGKQQFPYMVDPNTGVSMYESDGIIKYLSEKYGDGTVPLSLSLGALTAITAGFAMIGRMGKGNLYTPAKLPPKPLEFWAYEGSPFCKLVREVLVELELPHIQRSCARGSPKRQVLLEKAGHFQVPYLEDPNTGVAMFESAEIVEYLKQTYAA

SEQ ID NO: 24113 - protein, 339 aa, Arabidopsis thaliana
  peptide (1)..(339): Ceres Seq. ID no. 12371530
  misc_feature (133)..(249): Homolog of NCBI NO: 15488040 NR Description: unknown [Photobacterium profundum]
  misc_feature (135)..(339): Homolog of NCBI NO: 7487730 NR Description: hypothetical protein T5L19.130 - Arabidopsis
  misc_feature (135)..(339): Homolog of NCBI NO: 21593568 NR Description: unknown [Arabidopsis thaliana]
  misc_feature (135)..(339): Homolog of NCBI NO: 18413285 NR Description: putative protein
  misc_feature (1)..(339): Homolog of NCBI NO: 11282317 NR Description: hypothetical protein F8F6.90 - Arabidopsis
  misc_feature (1)..(339): Homolog of NCBI NO: 21593275 NR Description: unknown [Arabidopsis thaliana]
  misc_feature (1)..(339): Homolog of NCBI NO: 18414386 NR Description: auxin-regulated protein
MAGILVNNILPQPPILRSLSSSSRRSSIRTLVMVKASSSEPSESVSVSTKTSDDTGAVVVFTAPPGFKPPEPKRFAVKSGKLFDVLGAAIGLFFRFGTGVFVSGYSASFVSKEEIPADQYALRLGGITVKETAKVGPRPEKPIEIYEFEGCPFCRKVREMVAVLDLDILYYPCPRGSPNFRPKVKQMGGKQQFPYMVDPNTGVSMYESDGIIKYLSEKYGDGTVPLSLSLGALTAITAGFAMIGRMGKGNLYTPAKLPPKPLEFWAYEGSPFCKLVREVLVELELPHIQRSCARGSPKRQVLLEKAGHFQVPYLEDPNTGVAMFESAEIVEYLKQTYAA

SEQ ID NO: 24114 - protein, 307 aa, Arabidopsis thaliana
  peptide (1)..(307): Ceres Seq. ID no. 12371531
  misc_feature (101)..(217): Homolog of NCBI NO: 15488040 NR Description: unknown [Photobacterium profundum]
  misc_feature (103)..(307): Homolog of NCBI NO: 7487730 NR Description: hypothetical protein T5L19.130 - Arabidopsis
  misc_feature (103)..(307): Homolog of NCBI NO: 21593568 NR Description: unknown [Arabidopsis thaliana]
  misc_feature (103)..(307): Homolog of NCBI NO: 18413285 NR Description: putative protein
  misc_feature (1)..(307): Homolog of NCBI NO: 11282317 NR Description: hypothetical protein F8F6.90 - Arabidopsis
  misc_feature (1)..(307): Homolog of NCBI NO: 21593275 NR Description: unknown [Arabidopsis thaliana]
  misc_feature (1)..(307): Homolog of NCBI NO: 18414386 NR Description: auxin-regulated protein
MVKASSSEPSESVSVSTKTSDDTGAVVVFTAPPGFKPPEPKRFAVKSGKLFDVLGAAIGLFFRFGTGVFVSGYSASFVSKEEIPADQYALRLGGITVKETAKVGPRPEKPIEIYEFEGCPFCRKVREMVAVLDLDILYYPCPRGSPNFRPKVKQMGGKQQFPYMVDPNTGVSMYESDGIIKYLSEKYGDGTVPLSLSLGALTAITAGFAMIGRMGKGNLYTPAKLPPKPLEFWAYEGSPFCKLVREVLVELELPHIQRSCARGSPKRQVLLEKAGHFQVPYLEDPNTGVAMFESAEIVEYLKQTYAA

SEQ ID NO: 24115 - DNA, 1467 bp, Arabidopsis thaliana
  misc_feature (1)..(1467): Ceres Seq. ID no. 13492141
  misc_feature: MA Experiment ID: 108434 Result: Down-regulated in Transcription
  misc_feature: MA Experiment 108434 PARAMETER Experiment Name: At_Root_Tips_cDNA_P Parameter: Tissue Value: Root Tips
  misc_feature: MA Experiment ID: 108573 Result: Up-regulated in Transcription
  misc_feature: MA Experiment 108573 PARAMETER Experiment Name: At_Drought_cDNA_P Parameter: Timepoint (hr) Value: 6
  misc_feature: MA Experiment 108573 PARAMETER Experiment Name: At_Drought_cDNA_P Parameter: Tissue Value: Aerial
  misc_feature: MA Experiment 108573 PARAMETER Experiment Name: At_Drought_cDNA_P Parameter: Treatment Value: Drought vs. No Drought
  misc_feature: MA Experiment ID: 108574 Result: Up-regulated in Transcription
  misc_feature: MA Experiment 108574 PARAMETER Experiment Name: At_Wounding__cDNA_P Parameter: Timepoint (hr) Value: 1
  misc_feature: MA Experiment 108574 PARAMETER Experiment Name: At_Wounding__cDNA_P Parameter: Tissue Value: Aerial
  misc_feature: MA Experiment 108574 PARAMETER Experiment Name: At_Wounding__cDNA_P Parameter: Treatment Value: Wounding vs. No Wounding
  misc_feature: MA Experiment ID: 108579 Result: Up-regulated in Transcription
  misc_feature: MA Experiment 108579 PARAMETER Experiment Name: At_4deg_Cold_cDNA_P Parameter: Temperature (deg C) Value: 4 vs. 22
  misc_feature: MA Experiment 108579 PARAMETER Experiment Name: At_4deg_Cold_cDNA_P Parameter: Timepoint (hr) Value: 6
  misc_feature: MA Experiment 108579 PARAMETER Experiment Name: At_4deg_Cold_cDNA_P Parameter: Tissue Value: Aerial
  misc_feature: MA Experiment ID: 108608 Result: Up-regulated in Transcription
  misc_feature: MA Experiment 108608 PARAMETER Experiment Name: At_100uM_ABA_cDNA_P Parameter: Timepoint (hr) Value: 1
  misc_feature: MA Experiment 108608 PARAMETER Experiment Name: At_100uM_ABA_cDNA_P Parameter: Tissue Value: Aerial
  misc_feature: MA Experiment 108608 PARAMETER Experiment Name: At_100uM_ABA_cDNA_P Parameter: Treatment Value: 100uM ABA vs. No Treatment
  misc_feature: MA Experiment ID: 20000437 Result: Up-regulated in Transcription
  misc_feature: MA Experiment 20000437 PARAMETER Experiment Name: At_Drought_P Parameter: Age (day) Value: 8
  misc_feature: MA Experiment 20000437 PARAMETER Experiment Name: At_Drought_P Parameter: Organism Value: A. thaliana
  misc_feature: MA Experiment 20000437 PARAMETER Experiment Name: At_Drought_P Parameter: Plant Line Value: WS
  misc_feature: MA Experiment 20000437 PARAMETER Experiment Name: At_Drought_P Parameter: Timepoint (hr) Value: 24
  misc_feature: MA Experiment 20000437 PARAMETER Experiment Name: At_Drought_P Parameter: Tissue Value: Whole Plant
  misc_feature: MA Experiment 20000437 PARAMETER Experiment Name: At_Drought_P Parameter: Treatment Value: Drought vs. No Drought
  misc_feature: MA Experiment ID: 20001911 Result: Up-regulated in Transcription
  misc_feature: MA Experiment 20001911 PARAMETER Experiment Name: At_Drought_Reproduction_P Parameter: Age (day) Value: 40
  misc_feature: MA Experiment 20001911 PARAMETER Experiment Name: At_Drought_Reproduction_P Parameter: Organism Value: A. thaliana
  misc_feature: MA Experiment 20001911 PARAMETER Experiment Name: At_Drought_Reproduction_P Parameter: Plant Line Value: WS
  misc_feature: MA Experiment 20001911 PARAMETER Experiment Name: At_Drought_Reproduction_P Parameter: Timepoint (day) Value: 10
  misc_feature: MA Experiment 20001911 PARAMETER Experiment Name: At_Drought_Reproduction_P Parameter: Tissue Value: Flowers
  misc_feature: MA Experiment 20001911 PARAMETER Experiment Name: At_Drought_Reproduction_P Parameter: Treatment Value: Drought vs. No Drought
gataagccacatttcttctctctttctctcctacacaacacagctttttaaacccaacagagcaaaaaagcaaaagattcaacaaaaatctcctcaaattctattcatggtctctagaaattctgacggatatttcttggatccgaccggtatgactgttcctggtctcggaccttcctttacagccgccgtttcttcttcttcttcaccaacgacttcttctacggccgtggctgtggcggatgtgacggcgatggtttcttcttcggaggaggatttgagtaagaagattaggaagccttatactattactaagtctagagagagctggacggagcctgagcatgataaattccttgaagctcttcaattgtttgatagagactggaagaagattgaagcttttattggttcaaagacagtgattcagatacgaagtcatgctcagaagtattttcttaaggtacaaaagagtgggaccggtgaacatctccctcctcctcgacctaaaaggaaagccgctcatccatatcctcagaaggctcacaagaatgtgcaactgcaagtaccagggtcattcaagtcaacatctgaaccaaatgacccaagttttatgtttaggcctgagtcttcttcaatgctgatgacttcgccaaccactgctgctgcggctccatggacaaataatgcgcaaacaattagcttcactcccctcccaaaagcaggagcaggagctaataacaattgttctagtagttctgaaaatactccaagaccacgatccaacagggacgcaagagaccatggaaatgttggccattcattaagagttttaccggactttgcccaagtatacggcttcattggaagtgtgtttgacccatatgcaagtaatcatctacaaaagctgaagaagatggaccccatagatgttgaaacagtgttactattgatgagaaatctatccatcaacttgtctagtcctgactttgaggatcatagacggcttctttcgtcttatgatatcggatctgagacagcaactgatcatggtggagtgaataaaaccttaaacaaagacccacctgaaatctctacttaatgtttaatagaagaggagaactgtgaaaagtgtctcaggtgagccagccaacaaccagatggctacaaaatacagagattctgttgtggttttttgtttgtacataggaagaagatgaagctgatgttactcggtttagttgttgttactgttataaatagtctgttgggttaaggatggtatatgtacagtgtattatcataagttagatctcaagtttaaacatatgtatcagtctctttgatgggagaccaaaatctcttaatagagttgtctttgctttcgttttcattcgtttatagaggaagaaataaggtgactgtgaccatttgtataacaatatggataaactatttttagtggcc

SEQ ID NO: 24116 - protein, 366 aa, Arabidopsis thaliana
  peptide (1)..(366): Ceres Seq. ID no. 13492142
  misc_feature (107)..(152): Pfam Name: Myb-like DNA-binding domain Pfam Description: Myb-like DNA-binding domain
  misc_feature (36)..(366): Homolog of NCBI NO: 30696221 NR Description: myb family transcription factor [Arabidopsis
  misc_feature (73)..(345): Homolog of NCBI NO: 18414039 NR Description: myb family transcription factor [Arabidopsis
  misc_feature (73)..(225): Homolog of NCBI NO: 11357907 NR Description: hypothetical protein F9G14.150 - Arabidopsis
  misc_feature (70)..(341): Homolog of NCBI NO: 15223419 NR Description: myb family transcription factor [Arabidopsis
  misc_feature (83)..(340): Homolog of NCBI NO: 15234118 NR Description: myb family transcription factor [Arabidopsis
  misc_feature (51)..(337): Homolog of NCBI NO: 8953721 NR Description: contains similarity to MYB-related DNA-binding
  misc_feature (67)..(341): Homolog of NCBI NO: 30680926 NR Description: myb family transcription factor [Arabidopsis
  misc_feature (70)..(341): Homolog of NCBI NO: 25517982 NR Description: F22L4.6 protein - Arabidopsis thaliana
  misc_feature (274)..(345): Homolog of NCBI NO: 11357907 NR Description: hypothetical protein F9G14.150 - Arabidopsis
  misc_feature (36)..(366): Homolog of NCBI NO: 30696225 NR Description: myb family transcription factor [Arabidopsis
ISHISSLFLSYTTQLFKPNRAKKQKIQQKSPQILFMVSRNSDGYFLDPTGMTVPGLGPSFTAAVSSSSSPTTSSTAVAVADVTAMVSSSEEDLSKKIRKPYTITKSRESWTEPEHDKFLEALQLFDRDWKKIEAFIGSKTVIQIRSHAQKYFLKVQKSGTGEHLPPPRPKRKAAHPYPQKAHKNVQLQVPGSFKSTSEPNDPSFMFRPESSSMLMTSPTTAAAAPWTNNAQTISFTPLPKAGAGANNNCSSSSENTPRPRSNRDARDHGNVGHSLRVLPDFAQVYGFIGSVFDPYASNHLQKLKKMDPIDVETVLLLMRNLSINLSSPDFEDHRRLLSSYDIGSETATDHGGVNKTLNKDPPEIST

SEQ ID NO: 24117 - protein, 331 aa, Arabidopsis thaliana
  peptide (1)..(331): Ceres Seq. ID no. 13492143
  misc_feature (72)..(117): Pfam Name: Myb-like DNA-binding domain Pfam Description: Myb-like DNA-binding domain
  misc_feature (38)..(310): Homolog of NCBI NO: 18414039 NR Description: myb family transcription factor [Arabidopsis
  misc_feature (239)..(310): Homolog of NCBI NO: 11357907 NR Description: hypothetical protein F9G14.150 - Arabidopsis
  misc_feature (38)..(190): Homolog of NCBI NO: 11357907 NR Description: hypothetical protein F9G14.150 - Arabidopsis
  misc_feature (35)..(306): Homolog of NCBI NO: 25517982 NR Description: F22L4.6 protein - Arabidopsis thaliana
  misc_feature (35)..(306): Homolog of NCBI NO: 15223419 NR Description: myb family transcription factor [Arabidopsis
  misc_feature (32)..(306): Homolog of NCBI NO: 30680926 NR Description: myb family transcription factor [Arabidopsis
  misc_feature (48)..(305): Homolog of NCBI NO: 15234118 NR Description: myb family transcription factor [Arabidopsis
  misc_feature (16)..(302): Homolog of NCBI NO: 8953721 NR Description: contains similarity to MYB-related DNA-binding
  misc_feature (1)..(331): Homolog of NCBI NO: 30696221 NR Description: myb family transcription factor [Arabidopsis
  misc_feature (1)..(331): Homolog of NCBI NO: 30696225 NR Description: myb family transcription factor [Arabidopsis
MVSRNSDGYFLDPTGMTVPGLGPSFTAAVSSSSSPTTSSTAVAVADVTAMVSSSEEDLSKKIRKPYTITKSRESWTEPEHDKFLEALQLFDRDWKKIEAFIGSKTVIQIRSHAQKYFLKVQKSGTGEHLPPPRPKRKAAHPYPQKAHKNVQLQVPGSFKSTSEPNDPSFMFRPESSSMLMTSPTTAAAAPWTNNAQTISFTPLPKAGAGANNNCSSSSENTPRPRSNRDARDHGNVGHSLRVLPDFAQVYGFIGSVFDPYASNHLQKLKKMDPIDVETVLLLMRNLSINLSSPDFEDHRRLLSSYDIGSETATDHGGVNKTLNKDPPEIST

SEQ ID NO: 24118 - protein, 316 aa, Arabidopsis thaliana
  peptide (1)..(316): Ceres Seq. ID no. 13492144
  misc_feature (57)..(102): Pfam Name: Myb-like DNA-binding domain Pfam Description: Myb-like DNA-binding domain
  misc_feature (23)..(295): Homolog of NCBI NO: 18414039 NR Description: myb family transcription factor [Arabidopsis
  misc_feature (224)..(295): Homolog of NCBI NO: 11357907 NR Description: hypothetical protein F9G14.150 - Arabidopsis
  misc_feature (23)..(175): Homolog of NCBI NO: 11357907 NR Description: hypothetical protein F9G14.150 - Arabidopsis
  misc_feature (20)..(291): Homolog of NCBI NO: 25517982 NR Description: F22L4.6 protein - Arabidopsis thaliana
  misc_feature (20)..(291): Homolog of NCBI NO: 15223419 NR Description: myb family transcription factor [Arabidopsis
  misc_feature (17)..(291): Homolog of NCBI NO: 30680926 NR Description: myb family transcription factor [Arabidopsis
  misc_feature (33)..(290): Homolog of NCBI NO: 15234118 NR Description: myb family transcription factor [Arabidopsis
  misc_feature (1)..(287): Homolog of NCBI NO: 8953721 NR Description: contains similarity to MYB-related DNA-binding
  misc_feature (1)..(316): Homolog of NCBI NO: 30696221 NR Description: myb family transcription factor [Arabidopsis
  misc_feature (1)..(316): Homolog of NCBI NO: 30696225 NR Description: myb family transcription factor [Arabidopsis
MTVPGLGPSFTAAVSSSSSPTTSSTAVAVADVTAMVSSSEEDLSKKIRKPYTITKSRESWTEPEHDKFLEALQLFDRDWKKIEAFIGSKTVIQIRSHAQKYFLKVQKSGTGEHLPPPRPKRKAAHPYPQKAHKNVQLQVPGSFKSTSEPNDPSFMFRPESSSMLMTSPTTAAAAPWTNNAQTISFTPLPKAGAGANNNCSSSSENTPRPRSNRDARDHGNVGHSLRVLPDFAQVYGFIGSVFDPYASNHLQKLKKMDPIDVETVLLLMRNLSINLSSPDFEDHRRLLSSYDIGSETATDHGGVNKTLNKDPPEIST

SEQ ID NO: 24119 - DNA, 1712 bp, Arabidopsis thaliana
  misc_feature (1)..(1712): Ceres Seq. ID no. 12337203
  misc_feature: MA Experiment ID: 108569 Result: Up-regulated in Transcription
  misc_feature: MA Experiment 108569 PARAMETER Experiment Name: At_0.001%_MeJA__cDNA_P Parameter: Timepoint (hr) Value: 6
  misc_feature: MA Experiment 108569 PARAMETER Experiment Name: At_0.001%_MeJA__cDNA_P Parameter: Tissue Value: Aerial
  misc_feature: MA Experiment 108569 PARAMETER Experiment Name: At_0.001%_MeJA__cDNA_P Parameter: Treatment Value: 0.001% MeJA vs. No Treatment
  misc_feature: MA Experiment ID: 108573 Result: Up-regulated in Transcription
  misc_feature: MA Experiment 108573 PARAMETER Experiment Name: At_Drought_cDNA_P Parameter: Timepoint (hr) Value: 6
  misc_feature: MA Experiment 108573 PARAMETER Experiment Name: At_Drought_cDNA_P Parameter: Tissue Value: Aerial
  misc_feature: MA Experiment 108573 PARAMETER Experiment Name: At_Drought_cDNA_P Parameter: Treatment Value: Drought vs. No Drought
  misc_feature: MA Experiment ID: 20000185 Result: Down-regulated in Transcription
  misc_feature: MA Experiment 20000185 PARAMETER Experiment Name: At_Roots__P Parameter: Age (day) Value: 7 vs. 21
  misc_feature: MA Experiment 20000185 PARAMETER Experiment Name: At_Roots__P Parameter: Organism Value: A. thaliana
  misc_feature: MA Experiment 20000185 PARAMETER Experiment Name: At_Roots__P Parameter: Tissue Value: Roots vs. Whole Plant
  misc_feature: MA Experiment ID: 20000227 Result: Down-regulated in Transcription
  misc_feature: MA Experiment 20000227 PARAMETER Experiment Name: At_Root-Tips-vs-Tops_P Parameter: Tissue Value: Root Tips vs. Root Tops
  misc_feature: MA Experiment ID: 20000234 Result: Down-regulated in Transcription
  misc_feature: MA Experiment 20000234 PARAMETER Experiment Name: At_Siliques_P Parameter: Age (day) Value: 21
  misc_feature: MA Experiment 20000234 PARAMETER Experiment Name: At_Siliques_P Parameter: Organism Value: A. thaliana
  misc_feature: MA Experiment 20000234 PARAMETER Experiment Name: At_Siliques_P Parameter: Plant Line Value: WS
  misc_feature: MA Experiment 20000234 PARAMETER Experiment Name: At_Siliques_P Parameter: Tissue Value: Less Than 5mm Siliques vs. Whole Plant
  misc_feature: MA Experiment ID: 20000264 Result: Down-regulated in Transcription
  misc_feature: MA Experiment 20000264 PARAMETER Experiment Name: At_Open_Flower_P Parameter: Age (day) Value: 21
  misc_feature: MA Experiment 20000264 PARAMETER Experiment Name: At_Open_Flower_P Parameter: Plant Line Value: WS
  misc_feature: MA Experiment 20000264 PARAMETER Experiment Name: At_Open_Flower_P Parameter: Tissue Value: Open Flower vs. Whole Plant
  misc_feature: MA Experiment ID: 20000265 Result: Down-regulated in Transcription
  misc_feature: MA Experiment 20000265 PARAMETER Experiment Name: At_Open_Flower_P Parameter: Age (day) Value: 21
  misc_feature: MA Experiment 20000265 PARAMETER Experiment Name: At_Open_Flower_P Parameter: Plant Line Value: WS
  misc_feature: MA Experiment 20000265 PARAMETER Experiment Name: At_Open_Flower_P Parameter: Tissue Value: Closed Flower vs. Whole Plant
  misc_feature: MA Experiment ID: 20001451 Result: Up-regulated in Transcription
  misc_feature: MA Experiment 20001451 PARAMETER Experiment Name: At_Far-red-induction_P Parameter: Age (day) Value: 7
  misc_feature: MA Experiment 20001451 PARAMETER Experiment Name: At_Far-red-induction_P Parameter: Light Value: Far-red vs. White
  misc_feature: MA Experiment 20001451 PARAMETER Experiment Name: At_Far-red-induction_P Parameter: Organism Value: A. thaliana
  misc_feature: MA Experiment 20001451 PARAMETER Experiment Name: At_Far-red-induction_P Parameter: Plant Line Value: Columbia
  misc_feature: MA Experiment 20001451 PARAMETER Experiment Name: At_Far-red-induction_P Parameter: Timepoint (hr) Value: 24
  misc_feature: MA Experiment 20001451 PARAMETER Experiment Name: At_Far-red-induction_P Parameter: Tissue Value: Whole Plant
  misc_feature: MA Experiment ID: 20001560 Result: Down-regulated in Transcription
  misc_feature: MA Experiment 20001560 PARAMETER Experiment Name: At_Drought_Soil_Dry_P Parameter: Age (day) Value: 28
  misc_feature: MA Experiment 20001560 PARAMETER Experiment Name: At_Drought_Soil_Dry_P Parameter: Organism Value: A. thaliana
  misc_feature: MA Experiment 20001560 PARAMETER Experiment Name: At_Drought_Soil_Dry_P Parameter: Plant Line Value: WS
  misc_feature: MA Experiment 20001560 PARAMETER Experiment Name: At_Drought_Soil_Dry_P Parameter: Post Timepoint (hr) Value: None
  misc_feature: MA Experiment 20001560 PARAMETER Experiment Name: At_Drought_Soil_Dry_P Parameter: Post-Treatment Value: None
  misc_feature: MA Experiment 20001560 PARAMETER Experiment Name: At_Drought_Soil_Dry_P Parameter: Timepoint (day) Value: 14
  misc_feature: MA Experiment 20001560 PARAMETER Experiment Name: At_Drought_Soil_Dry_P Parameter: Treatment Value: Drought vs. No Drought
atcttctacggacagcttctttctctttcctctctgatttttcttttctctttctacctttttcttttttttattttctttcttttttttgttagtttttttttttctttcttcatctcgttaacgatatagtacctgaaccctagcgaaaatcaaaaattgtctaggagaaacaaacagagatatctttctttctttttatcagtggggaaaaaaaatgcagaatccgagactgaagcaacatcagcagcaacaacaacaacaagctatgatgcagcaacaagctctgatgcagcaacactctctttaccatcctggtgttttggctcctcctcagttagagcctgttccaagtggaaaccttcctcctggttttgatcccagtacttgccgtagcgtgtatgttggaaacatccatacacaggtcacagagcctttgcttcaagagatttttacaagcactggccctgttgaaagcagtaaactcatcagaaaggataagtcatcatatggatttgttcactactttgatcgaagatccgctgctctggctatactgtctctgaacggaaggcatctgtttggacagcctatcaaagtcaattgggcgtatgccactggtcagagggaagatacatcaagtcatttcaacatttttgttggagatctcagtccagaggtcactgatgcaacattatatcaaagcttttctgtcttttccagttgttcggatgcgagagttatgtgggaccaaaaaactgggcgctcgagaggctttgggtttgtttccttccgcaatcaacaggatgctcaaactgccattaatgagatgaatggtaagtggttaagtagcagacaaatcagatgcaactgggccacgaagggcgctacttctggtgatgataagctcagttctgatggaaaaagtgttgtggaacttacaactggctcatcagaggatggtaaagagacattaaatgaggaaacacctgaaaataattctcagtttaccactgtttatgtgggaaaccttgctccagaggtaactcagcttgatctacaccgttacttccatgctcttggcgctggagttattgaggaggtccgtgtccaacgagacaaaggctttggtttcgtgagatataacactcatcccgaagctgctcttgctattcagatgggtaacactcagccttacctctttaacagacagataaagtgctcatggggaaacaagccaactccaccaggtacagcctcaaacccacttcccccacctgccccagctccagttcctggtctatctgcagctgatctcctaaactatgagaggcaattggcacttagcaagatggcaagtgtgaatgcgttaatgcatcaacagggtcaacaccctctaaggcaggctcatggaataaatgccgctggagcaactgcagccatgtatgatggtggctttcagaatgtagccgccgcacagcaactcatgtactatcagtaataaacctcagttcgtggcgccgatctcaagtttcaatctctttgctttttctcttttttttttgtttgtctagaacttgtttgtgtgtgtctgtttgtctctcacttaagttatctatataaagttttatctgcagttgtatgattagttatgtattcccatggattgtaagacaagcgaattacattcaataaaagggatttggatatcg

SEQ ID NO: 24120 - protein, 427 aa, Arabidopsis thaliana
  peptide (1)..(427): Ceres Seq. ID no. 12337204
  misc_feature (146)..(217): Pfam Name: RNA recognition motif. (a.k.a. RRM, RBD, or RNP domain) Pfam Description: RNA recognition motif. (a.k.a. RRM, RBD, or RNP
  misc_feature (146)..(217): Pfam Name: RNA recognition motif. (a.k.a. RRM, RBD, or RNP domain) Pfam Description: RNA recognition motif. (a.k.a. RRM, RBD, or RNP
  misc_feature (12)..(426): Homolog of NCBI NO: 6996560 NR Description: oligouridylate binding protein [Nicotiana
  misc_feature (5)..(41): Homolog of NCBI NO: 25402821 NR Description: protein F1L3.2 [imported] - Arabidopsis thaliana
  misc_feature (333)..(427): Homolog of NCBI NO: 25402821 NR Description: protein F1L3.2 [imported] - Arabidopsis thaliana
  misc_feature (206)..(339): Homolog of NCBI NO: 25402821 NR Description: protein F1L3.2 [imported] - Arabidopsis thaliana
  misc_feature (40)..(208): Homolog of NCBI NO: 25402821 NR Description: protein F1L3.2 [imported] - Arabidopsis thaliana
  misc_feature (12)..(426): Homolog of NCBI NO: 6996560 NR Description: oligouridylate binding protein [Nicotiana
  misc_feature (333)..(427): Homolog of NCBI NO: 25402821 NR Description: protein F1L3.2 [imported] - Arabidopsis thaliana
  misc_feature (40)..(208): Homolog of NCBI NO: 25402821 NR Description: protein F1L3.2 [imported] - Arabidopsis thaliana
  misc_feature (1)..(427): Homolog of NCBI NO: 15231783 NR Description: oligouridylate binding protein (UBP1), putative
  misc_feature (1)..(427): Homolog of NCBI NO: 21593280 NR Description: oligouridylate binding protein, putative
  misc_feature (1)..(427): Homolog of NCBI NO: 15221031 NR Description: oligouridylate binding protein (UBP1), putative
  misc_feature (1)..(427): Homolog of NCBI NO: 30695647 NR Description: oligouridylate binding protein (UBP1), putative
  misc_feature (5)..(427): Homolog of NCBI NO: 18394471 NR Description: oligouridylate binding protein (UBP1), putative
  misc_feature (206)..(339): Homolog of NCBI NO: 25402821 NR Description: protein F1L3.2 [imported] - Arabidopsis thaliana
  misc_feature (5)..(41): Homolog of NCBI NO: 25402821 NR Description: protein F1L3.2 [imported] - Arabidopsis thaliana
  misc_feature (5)..(427): Homolog of NCBI NO: 18394471 NR Description: oligouridylate binding protein (UBP1), putative
  misc_feature (1)..(427): Homolog of NCBI NO: 30695647 NR Description: oligouridylate binding protein (UBP1), putative
  misc_feature (1)..(427): Homolog of NCBI NO: 15221031 NR Description: oligouridylate binding protein (UBP1), putative
  misc_feature (1)..(427): Homolog of NCBI NO: 21593280 NR Description: oligouridylate binding protein, putative
  misc_feature (1)..(427): Homolog of NCBI NO: 15231783 NR Description: oligouridylate binding protein (UBP1), putative
MQNPRLKQHQQQQQQQAMMQQQALMQQHSLYHPGVLAPPQLEPVPSGNLPPGFDPSTCRSVYVGNIHTQVTEPLLQEIFTSTGPVESSKLIRKDKSSYGFVHYFDRRSAALAILSLNGRHLFGQPIKVNWAYATGQREDTSSHFNIFVGDLSPEVTDATLYQSFSVFSSCSDARVMWDQKTGRSRGFGFVSFRNQQDAQTAINEMNGKWLSSRQIRCNWATKGATSGDDKLSSDGKSVVELTTGSSEDGKETLNEETPENNSQFTTVYVGNLAPEVTQLDLHRYFHALGAGVIEEVRVQRDKGFGFVRYNTHPEAALAIQMGNTQPYLFNRQIKCSWGNKPTPPGTASNPLPPPAPAPVPGLSAADLLNYERQLALSKMASVNALMHQQGQHPLRQAHGINAAGATAAMYDGGFQNVAAAQQLMYYQ

SEQ ID NO: 24121 - protein, 410 aa, Arabidopsis thaliana
  peptide (1)..(410): Ceres Seq. ID no. 12337205
  misc_feature (129)..(200): Pfam Name: RNA recognition motif. (a.k.a. RRM, RBD, or RNP domain) Pfam Description: RNA recognition motif. (a.k.a. RRM, RBD, or RNP
  misc_feature (129)..(200): Pfam Name: RNA recognition motif. (a.k.a. RRM, RBD, or RNP domain) Pfam Description: RNA recognition motif. (a.k.a. RRM, RBD, or RNP
  misc_feature (1)..(409): Homolog of NCBI NO: 6996560 NR Description: oligouridylate binding protein [Nicotiana
  misc_feature (1)..(24): Homolog of NCBI NO: 25402821 NR Description: protein F1L3.2 [imported] - Arabidopsis thaliana
  misc_feature (316)..(410): Homolog of NCBI NO: 25402821 NR Description: protein F1L3.2 [imported] - Arabidopsis thaliana
  misc_feature (189)..(322): Homolog of NCBI NO: 25402821 NR Description: protein F1L3.2 [imported] - Arabidopsis thaliana
  misc_feature (23)..(191): Homolog of NCBI NO: 25402821 NR Description: protein F1L3.2 [imported] - Arabidopsis thaliana
  misc_feature (1)..(409): Homolog of NCBI NO: 6996560 NR Description: oligouridylate binding protein [Nicotiana
  misc_feature (316)..(410): Homolog of NCBI NO: 25402821 NR Description: protein F1L3.2 [imported] - Arabidopsis thaliana
  misc_feature (23)..(191): Homolog of NCBI NO: 25402821 NR Description: protein F1L3.2 [imported] - Arabidopsis thaliana
  misc_feature (1)..(410): Homolog of NCBI NO: 15231783 NR Description: oligouridylate binding protein (UBP1), putative
  misc_feature (1)..(410): Homolog of NCBI NO: 21593280 NR Description: oligouridylate binding protein, putative
  misc_feature (1)..(410): Homolog of NCBI NO: 15221031 NR Description: oligouridylate binding protein (UBP1), putative
  misc_feature (1)..(410): Homolog of NCBI NO: 30695647 NR Description: oligouridylate binding protein (UBP1), putative
  misc_feature (1)..(410): Homolog of NCBI NO: 18394471 NR Description: oligouridylate binding protein (UBP1), putative
  misc_feature (189)..(322): Homolog of NCBI NO: 25402821 NR Description: protein F1L3.2 [imported] - Arabidopsis thaliana
  misc_feature (1)..(24): Homolog of NCBI NO: 25402821 NR Description: protein F1L3.2 [imported] - Arabidopsis thaliana
  misc_feature (1)..(410): Homolog of NCBI NO: 18394471 NR Description: oligouridylate binding protein (UBP1), putative
  misc_feature (1)..(410): Homolog of NCBI NO: 30695647 NR Description: oligouridylate binding protein (UBP1), putative
  misc_feature (1)..(410): Homolog of NCBI NO: 15221031 NR Description: oligouridylate binding protein (UBP1), putative
  misc_feature (1)..(410): Homolog of NCBI NO: 21593280 NR Description: oligouridylate binding protein, putative
  misc_feature (1)..(410): Homolog of NCBI NO: 15231783 NR Description: oligouridylate binding protein (UBP1), putative
MMQQQALMQQHSLYHPGVLAPPQLEPVPSGNLPPGFDPSTCRSVYVGNIHTQVTEPLLQEIFTSTGPVESSKLIRKDKSSYGFVHYFDRRSAALAILSLNGRHLFGQPIKVNWAYATGQREDTSSHFNIFVGDLSPEVTDATLYQSFSVFSSCSDARVMWDQKTGRSRGFGFVSFRNQQDAQTAINEMNGKWLSSRQIRCNWATKGATSGDDKLSSDGKSVVELTTGSSEDGKETLNEETPENNSQFTTVYVGNLAPEVTQLDLHRYFHALGAGVIEEVRVQRDKGFGFVRYNTHPEAALAIQMGNTQPYLFNRQIKCSWGNKPTPPGTASNPLPPPAPAPVPGLSAADLLNYERQLALSKMASVNALMHQQGQHPLRQAHGINAAGATAAMYDGGFQNVAAAQQLMYYQ

SEQ ID NO: 24122 - protein, 409 aa, Arabidopsis thaliana
  peptide (1)..(409): Ceres Seq. ID no. 12337206
  misc_feature (128)..(199): Pfam Name: RNA recognition motif. (a.k.a. RRM, RBD, or RNP domain) Pfam Description: RNA recognition motif. (a.k.a. RRM, RBD, or RNP
  misc_feature (128)..(199): Pfam Name: RNA recognition motif. (a.k.a. RRM, RBD, or RNP domain) Pfam Description: RNA recognition motif. (a.k.a. RRM, RBD, or RNP
  misc_feature (1)..(408): Homolog of NCBI NO: 6996560 NR Description: oligouridylate binding protein [Nicotiana
  misc_feature (1)..(23): Homolog of NCBI NO: 25402821 NR Description: protein F1L3.2 [imported] - Arabidopsis thaliana
  misc_feature (315)..(409): Homolog of NCBI NO: 25402821 NR Description: protein F1L3.2 [imported] - Arabidopsis thaliana
  misc_feature (188)..(321): Homolog of NCBI NO: 25402821 NR Description: protein F1L3.2 [imported] - Arabidopsis thaliana
  misc_feature (22)..(190): Homolog of NCBI NO: 25402821 NR Description: protein F1L3.2 [imported] - Arabidopsis thaliana
  misc_feature (1)..(408): Homolog of NCBI NO: 6996560 NR Description: oligouridylate binding protein [Nicotiana
  misc_feature (315)..(409): Homolog of NCBI NO: 25402821 NR Description: protein F1L3.2 [imported] - Arabidopsis thaliana
  misc_feature (22)..(190): Homolog of NCBI NO: 25402821 NR Description: protein F1L3.2 [imported] - Arabidopsis thaliana
  misc_feature (1)..(409): Homolog of NCBI NO: 15231783 NR Description: oligouridylate binding protein (UBP1), putative
  misc_feature (1)..(409): Homolog of NCBI NO: 21593280 NR Description: oligouridylate binding protein, putative
  misc_feature (1)..(409): Homolog of NCBI NO: 15221031 NR Description: oligouridylate binding protein (UBP1), putative
  misc_feature (1)..(409): Homolog of NCBI NO: 30695647 NR Description: oligouridylate binding protein (UBP1), putative
  misc_feature (1)..(409): Homolog of NCBI NO: 18394471 NR Description: oligouridylate binding protein (UBP1), putative
  misc_feature (188)..(321): Homolog of NCBI NO: 25402821 NR Description: protein F1L3.2 [imported] - Arabidopsis thaliana
  misc_feature (1)..(23): Homolog of NCBI NO: 25402821 NR Description: protein F1L3.2 [imported] - Arabidopsis thaliana
  misc_feature (1)..(409): Homolog of NCBI NO: 18394471 NR Description: oligouridylate binding protein (UBP1), putative
  misc_feature (1)..(409): Homolog of NCBI NO: 30695647 NR Description: oligouridylate binding protein (UBP1), putative
  misc_feature (1)..(409): Homolog of NCBI NO: 15221031 NR Description: oligouridylate binding protein (UBP1), putative
  misc_feature (1)..(409): Homolog of NCBI NO: 21593280 NR Description: oligouridylate binding protein, putative
  misc_feature (1)..(409): Homolog of NCBI NO: 15231783 NR Description: oligouridylate binding protein (UBP1), putative
MQQQALMQQHSLYHPGVLAPPQLEPVPSGNLPPGFDPSTCRSVYVGNIHTQVTEPLLQEIFTSTGPVESSKLIRKDKSSYGFVHYFDRRSAALAILSLNGRHLFGQPIKVNWAYATGQREDTSSHFNIFVGDLSPEVTDATLYQSFSVFSSCSDARVMWDQKTGRSRGFGFVSFRNQQDAQTAINEMNGKWLSSRQIRCNWATKGATSGDDKLSSDGKSVVELTTGSSEDGKETLNEETPENNSQFTTVYVGNLAPEVTQLDLHRYFHALGAGVIEEVRVQRDKGFGFVRYNTHPEAALAIQMGNTQPYLFNRQIKCSWGNKPTPPGTASNPLPPPAPAPVPGLSAADLLNYERQLALSKMASVNALMHQQGQHPLRQAHGINAAGATAAMYDGGFQNVAAAQQLMYYQ

SEQ ID NO: 24123 - DNA, 1247 bp, Arabidopsis thaliana
  misc_feature (1)..(1247): Ceres Seq. ID no. 12335798
  misc_feature: MA Experiment ID: 108461 Result: Up-regulated in Transcription
  misc_feature: MA Experiment 108461 PARAMETER Experiment Name: At_Germinating_Seeds_cDNA_P Parameter: Age (day) Value: 1 vs. 0
  misc_feature: MA Experiment 108461 PARAMETER Experiment Name: At_Germinating_Seeds_cDNA_P Parameter: Tissue Value: Germinating Seeds
  misc_feature: MA Experiment ID: 108462 Result: Up-regulated in Transcription
  misc_feature: MA Experiment 108462 PARAMETER Experiment Name: At_Germinating_Seeds_cDNA_P Parameter: Age (day) Value: 2 vs. 0
  misc_feature: MA Experiment 108462 PARAMETER Experiment Name: At_Germinating_Seeds_cDNA_P Parameter: Tissue Value: Germinating Seeds
  misc_feature: MA Experiment ID: 108464 Result: Up-regulated in Transcription
  misc_feature: MA Experiment 108464 PARAMETER Experiment Name: At_Germinating_Seeds_cDNA_P Parameter: Age (day) Value: 4 vs. 0
  misc_feature: MA Experiment 108464 PARAMETER Experiment Name: At_Germinating_Seeds_cDNA_P Parameter: Tissue Value: Germinating Seeds
ttgaaactcttgactggttctaaacacagctcattatatgtctatttagtattttacacattggtttcagacggctcttaaaggtctctctagcttcatgtcaaccatctaaaccaaccaccattaatgttcctctgcccattttcaagaaattagaaatcatttttctctaagttcttgatcgtcgccatgaacgatcttatctcaagctcattcaagagatacacagacttaaaccaccaggtccaactcgatgacatcgagtctcaaaatgtttctcttgattcaggcaacctcgatgagttctttggatatgtcgagagtgttaaagaagacatgaaagctgtcgacgagattcataagcgtctccaagatgctaatgaagagtccaagaccgtacatgattccaaggccgtgaagaagcttcgtgctcgtatggattcgagtgttacagaggtcttgaaacgtgtcaagatgataaagactaagcttgtagctttggagaaatcaaatgctgcgcagaggaaagtcgctggttgtggtcctggctcgtctgctgatcggaccagaacatcggtcgttagtggattggggaagaagcttaaagacatgatggatgattttcagagactacgaaccaaaatggctactgaatacaaagaaacggtcgagagaaggtacttcactgtaacggggcaaaaagcggacgaagagacggtcgagaagctcatatcgagcggagagagcgaacgttttctccaaaaagcaatacaagagcaaggtcgcggacaggtcatggacacattatcagagattcaagaacgacacgacacggtcaaggagatagaacggagtctgttagagctgcaccaagtgttcctcgacatggctgctcttgtcgaagctcaagggaatatgctcaatgacattgaatcaaatgtctcaaaggcgagctctttcgtcatgagagggactgatcaattgcatggggctaaagtacttcagaggaacaacaggaaatgggcttgtatcgccactatcctcgctattgtagttgttattgtgattcttttcccaatcctctttaacactctacttcgaccttgatttcaaaatgtaacttattgttttctccaaactccttttgttagagccctttcgatttcttgtattgaatccagagctgaagcgagagtttaatttgaagctctctctaaccattcttgctactgtgattgctttatatc

SEQ ID NO: 24124 - protein, 305 aa, Arabidopsis thaliana
  peptide (1)..(305): Ceres Seq. ID no. 12335799
  misc_feature (211)..(273): Pfam Name: SNARE domain Pfam Description: SNARE domain
  misc_feature (1)..(297): Homolog of NCBI NO: 29788865 NR Description: putative cytokinesis-specific syntaxin-related
  misc_feature (1)..(297): Homolog of NCBI NO: 5912543 NR Description: Knolle [Capsicum annuum]
  misc_feature (1)..(297): Homolog of NCBI NO: 28974542 NR Description: knolle [Antirrhinum majus]
  misc_feature (1)..(297): Homolog of NCBI NO: 15231205 NR Description: syntaxin SYP122
  misc_feature (1)..(297): Homolog of NCBI NO: 11358871 NR Description: syntaxin synt4 [imported] - Arabidopsis thaliana
  misc_feature (1)..(297): Homolog of NCBI NO: 4206787 NR Description: syntaxin-related protein Nt-syr1 [Nicotiana
  misc_feature (1)..(298): Homolog of NCBI NO: 15229865 NR Description: syntaxin SYP121
  misc_feature (1)..(303): Homolog of NCBI NO: 15220328 NR Description: syntaxin SYP125; protein id: At1g11250.1
  misc_feature (1)..(303): Homolog of NCBI NO: 15219900 NR Description: syntaxin SYP124; protein id: At1g61290.1
  misc_feature (1)..(305): Homolog of NCBI NO: 15236285 NR Description: syntaxin SYP123
MNDLISSSFKRYTDLNHQVQLDDIESQNVSLDSGNLDEFFGYVESVKEDMKAVDEIHKRLQDANEESKTVHDSKAVKKLRARMDSSVTEVLKRVKMIKTKLVALEKSNAAQRKVAGCGPGSSADRTRTSVVSGLGKKLKDMMDDFQRLRTKMATEYKETVERRYFTVTGQKADEETVEKLISSGESERFLQKAIQEQGRGQVMDTLSEIQERHDTVKEIERSLLELHQVFLDMAALVEAQGNMLNDIESNVSKASSFVMRGTDQLHGAKVLQRNNRKWACIATILAIVVVIVILFPILFNTLLRP

SEQ ID NO: 24125 - protein, 256 aa, Arabidopsis thaliana
  peptide (1)..(256): Ceres Seq. ID no. 12335800
  misc_feature (162)..(224): Pfam Name: SNARE domain Pfam Description: SNARE domain
  misc_feature (1)..(248): Homolog of NCBI NO: 28974542 NR Description: knolle [Antirrhinum majus]
  misc_feature (1)..(248): Homolog of NCBI NO: 15231205 NR Description: syntaxin SYP122
  misc_feature (1)..(248): Homolog of NCBI NO: 11358871 NR Description: syntaxin synt4 [imported] - Arabidopsis thaliana
  misc_feature (1)..(248): Homolog of NCBI NO: 4206787 NR Description: syntaxin-related protein Nt-syr1 [Nicotiana
  misc_feature (1)..(248): Homolog of NCBI NO: 29788865 NR Description: putative cytokinesis-specific syntaxin-related
  misc_feature (1)..(248): Homolog of NCBI NO: 5912543 NR Description: Knolle [Capsicum annuum]
  misc_feature (1)..(249): Homolog of NCBI NO: 15229865 NR Description: syntaxin SYP121
  misc_feature (1)..(254): Homolog of NCBI NO: 15220328 NR Description: syntaxin SYP125; protein id: At1g11250.1
  misc_feature (1)..(254): Homolog of NCBI NO: 15219900 NR Description: syntaxin SYP124; protein id: At1g61290.1
  misc_feature (1)..(256): Homolog of NCBI NO: 15236285 NR Description: syntaxin SYP123
MKAVDEIHKRLQDANEESKTVHDSKAVKKLRARMDSSVTEVLKRVKMIKTKLVALEKSNAAQRKVAGCGPGSSADRTRTSVVSGLGKKLKDMMDDFQRLRTKMATEYKETVERRYFTVTGQKADEETVEKLISSGESERFLQKAIQEQGRGQVMDTLSEIQERHDTVKEIERSLLELHQVFLDMAALVEAQGNMLNDIESNVSKASSFVMRGTDQLHGAKVLQRNNRKWACIATILAIVVVIVILFPILFNTLLRP

SEQ ID NO: 24126 - protein, 223 aa, Arabidopsis thaliana
  peptide (1)..(223): Ceres Seq. ID no. 12335801
  misc_feature (129)..(191): Pfam Name: SNARE domain Pfam Description: SNARE domain
  misc_feature (1)..(215): Homolog of NCBI NO: 29788865 NR Description: putative cytokinesis-specific syntaxin-related
  misc_feature (1)..(215): Homolog of NCBI NO: 5912543 NR Description: Knolle [Capsicum annuum]
  misc_feature (1)..(215): Homolog of NCBI NO: 28974542 NR Description: knolle [Antirrhinum majus]
  misc_feature (1)..(215): Homolog of NCBI NO: 15231205 NR Description: syntaxin SYP122
  misc_feature (1)..(215): Homolog of NCBI NO: 11358871 NR Description: syntaxin synt4 [imported] - Arabidopsis thaliana
  misc_feature (1)..(215): Homolog of NCBI NO: 4206787 NR Description: syntaxin-related protein Nt-syr1 [Nicotiana
  misc_feature (1)..(216): Homolog of NCBI NO: 15229865 NR Description: syntaxin SYP121
  misc_feature (1)..(221): Homolog of NCBI NO: 15220328 NR Description: syntaxin SYP125; protein id: At1g11250.1
  misc_feature (1)..(221): Homolog of NCBI NO: 15219900 NR Description: syntaxin SYP124; protein id: At1g61290.1
  misc_feature (1)..(223): Homolog of NCBI NO: 15236285 NR Description: syntaxin SYP123
MDSSVTEVLKRVKMIKTKLVALEKSNAAQRKVAGCGPGSSADRTRTSVVSGLGKKLKDMMDDFQRLRTKMATEYKETVERRYFTVTGQKADEETVEKLISSGESERFLQKAIQEQGRGQVMDTLSEIQERHDTVKEIERSLLELHQVFLDMAALVEAQGNMLNDIESNVSKASSFVMRGTDQLHGAKVLQRNNRKWACIATILAIVVVIVILFPILFNTLLRP

SEQ ID NO: 24127 - DNA, 946 bp, Arabidopsis thaliana
  misc_feature (1)..(946): Ceres Seq. ID no. 13499698
  misc_feature: MA Experiment ID: 108434 Result: Up-regulated in Transcription
  misc_feature: MA Experiment 108434 PARAMETER Experiment Name: At_Root_Tips_cDNA_P Parameter: Tissue Value: Root Tips
  misc_feature: MA Experiment ID: 108462 Result: Down-regulated in Transcription
  misc_feature: MA Experiment 108462 PARAMETER Experiment Name: At_Germinating_Seeds_cDNA_P Parameter: Age (day) Value: 2 vs. 0
  misc_feature: MA Experiment 108462 PARAMETER Experiment Name: At_Germinating_Seeds_cDNA_P Parameter: Tissue Value: Germinating Seeds
  misc_feature: MA Experiment ID: 108463 Result: Down-regulated in Transcription
  misc_feature: MA Experiment 108463 PARAMETER Experiment Name: At_Germinating_Seeds_cDNA_P Parameter: Age (day) Value: 3 vs. 0
  misc_feature: MA Experiment 108463 PARAMETER Experiment Name: At_Germinating_Seeds_cDNA_P Parameter: Tissue Value: Germinating Seeds
  misc_feature: MA Experiment ID: 108464 Result: Down-regulated in Transcription
  misc_feature: MA Experiment 108464 PARAMETER Experiment Name: At_Germinating_Seeds_cDNA_P Parameter: Age (day) Value: 4 vs. 0
  misc_feature: MA Experiment 108464 PARAMETER Experiment Name: At_Germinating_Seeds_cDNA_P Parameter: Tissue Value: Germinating Seeds
  misc_feature: MA Experiment ID: 20000111 Result: Up-regulated in Transcription
  misc_feature: MA Experiment 20000111 PARAMETER Experiment Name: At_42deg_Heat_cDNA_P Parameter: Temperature (deg C) Value: 42 vs. 22
  misc_feature: MA Experiment 20000111 PARAMETER Experiment Name: At_42deg_Heat_cDNA_P Parameter: Timepoint (hr) Value: 6
  misc_feature: MA Experiment 20000111 PARAMETER Experiment Name: At_42deg_Heat_cDNA_P Parameter: Tissue Value: Aerial
  misc_feature: MA Experiment ID: 20000173 Result: Up-regulated in Transcription
  misc_feature: MA Experiment 20000173 PARAMETER Experiment Name: At_42deg_Heat_P Parameter: Age (day) Value: 14
  misc_feature: MA Experiment 20000173 PARAMETER Experiment Name: At_42deg_Heat_P Parameter: Organism Value: A. thaliana
  misc_feature: MA Experiment 20000173 PARAMETER Experiment Name: At_42deg_Heat_P Parameter: Plant Line Value: WS
  misc_feature: MA Experiment 20000173 PARAMETER Experiment Name: At_42deg_Heat_P Parameter: Temperature (deg C) Value: 42 vs. 22
  misc_feature: MA Experiment 20000173 PARAMETER Experiment Name: At_42deg_Heat_P Parameter: Timepoint (hr) Value: 6
  misc_feature: MA Experiment 20000173 PARAMETER Experiment Name: At_42deg_Heat_P Parameter: Tissue Value: Aerial
  misc_feature: MA Experiment ID: 20000180 Result: Down-regulated in Transcription
  misc_feature: MA Experiment 20000180 PARAMETER Experiment Name: At_Germinating_Seeds_P Parameter: Age (hr) Value: 24 vs. 0
  misc_feature: MA Experiment 20000180 PARAMETER Experiment Name: At_Germinating_Seeds_P Parameter: Tissue Value: Germinating Seeds
gaagaagaacagaagccgaaaccctcaccggcgatggctcttatcagcacacggcgaacattatcgacactcctaaacaaaaccctctcttcctctacttcatattcttcttcatttcctacgctctcttctcgttctcgattcgccatgcctctaattgaaaaggtttcctcttcccgaaccagcctgggcccgtgttacatctcgacccgacccaagacatccgggtccggatactcgccgctgaatgatccttcgccgaattggagcaaccgtccgccgaaggagacgattcttcttgatgggtgcgattatgagcactggctcatcgtcatggagttcactgatcctaaacctactgaagaagagatgatcaattcttatgtcaaaaccttaacttccgtccttggctgtgaggaagaggccaagaagaagatttactctgtttgtacttcgacctacactggctttggtgctttgatctctgaagagctctcttgcaaagtcaaagcattgcctggtgttctctgggtgctgccggattcctatctcgatgtaccaaacaaagactacggaggtgacttgtacgttgaaggaaaggtcatacccagaccacagtacaggttcacggaacagcgtcatactagaccccgtcctaggccaaggtatgataggcgccgtgagacaatgcaggttgagaggagagagccatccatgggtcttcattctccagtaaatccgggagagttcaacaagcccagtgcttaatattaaacatgaacaatgcattatgtaatggatggagtttattaggattatggtatttacatgcttgtcttaaacactcatgtgagagacttttcagtttttatccacttaatcaaacaaatcaatcatcattcatgtctctaatgatgactaaacactactctaaacagaacaaatt

SEQ ID NO: 24128 - protein, 255 aa, Arabidopsis thaliana
  peptide (1)..(255): Ceres Seq. ID no. 13499699
  misc_feature (42)..(236): Homolog of NCBI NO: 2440029 NR Description: DAL1 protein [Arabidopsis thaliana]
  misc_feature (12)..(231): Homolog of NCBI NO: 15223247 NR Description: plastid protein -related [Arabidopsis thaliana]
  misc_feature (12)..(236): Homolog of NCBI NO: 15226934 NR Description: expressed protein [Arabidopsis thaliana]
  misc_feature (12)..(237): Homolog of NCBI NO: 21593052 NR Description: DAG protein, putative [Arabidopsis thaliana]
  misc_feature (12)..(237): Homolog of NCBI NO: 15220382 NR Description: DAG protein -related [Arabidopsis thaliana]
  misc_feature (37)..(235): Homolog of NCBI NO: 38636775 NR Description: putative DAG protein [Oryza sativa (japonica
  misc_feature (41)..(237): Homolog of NCBI NO: 6014904 NR Description: DAG PROTEIN, CHLOROPLAST PRECURSOR
  misc_feature (19)..(230): Homolog of NCBI NO: 18400602 NR Description: expressed protein [Arabidopsis thaliana]
  misc_feature (12)..(255): Homolog of NCBI NO: 15230785 NR Description: DAG protein -related [Arabidopsis thaliana]
  misc_feature (12)..(255): Homolog of NCBI NO: 27754695 NR Description: putative DAG protein [Arabidopsis thaliana]
EEEQKPKPSPAMALISTRRTLSTLLNKTLSSSTSYSSSFPTLSSRSRFAMPLIEKVSSSRTSLGPCYISTRPKTSGSGYSPLNDPSPNWSNRPPKETILLDGCDYEHWLIVMEFTDPKPTEEEMINSYVKTLTSVLGCEEEAKKKIYSVCTSTYTGFGALISEELSCKVKALPGVLWVLPDSYLDVPNKDYGGDLYVEGKVIPRPQYRFTEQRHTRPRPRPRYDRRRETMQVERREPSMGLHSPVNPGEFNKPSA

SEQ ID NO: 24129 - protein, 244 aa, Arabidopsis thaliana
  peptide (1)..(244): Ceres Seq. ID no. 13499700
  misc_feature (31)..(225): Homolog of NCBI NO: 2440029 NR Description: DAL1 protein [Arabidopsis thaliana]
  misc_feature (1)..(220): Homolog of NCBI NO: 15223247 NR Description: plastid protein -related [Arabidopsis thaliana]
  misc_feature (1)..(225): Homolog of NCBI NO: 15226934 NR Description: expressed protein [Arabidopsis thaliana]
  misc_feature (1)..(226): Homolog of NCBI NO: 21593052 NR Description: DAG protein, putative [Arabidopsis thaliana]
  misc_feature (1)..(226): Homolog of NCBI NO: 15220382 NR Description: DAG protein -related [Arabidopsis thaliana]
  misc_feature (26)..(224): Homolog of NCBI NO: 38636775 NR Description: putative DAG protein [Oryza sativa (japonica
  misc_feature (30)..(226): Homolog of NCBI NO: 6014904 NR Description: DAG PROTEIN, CHLOROPLAST PRECURSOR
  misc_feature (8)..(219): Homolog of NCBI NO: 18400602 NR Description: expressed protein [Arabidopsis thaliana]
  misc_feature (1)..(244): Homolog of NCBI NO: 15230785 NR Description: DAG protein -related [Arabidopsis thaliana]
  misc_feature (1)..(244): Homolog of NCBI NO: 27754695 NR Description: putative DAG protein [Arabidopsis thaliana]
MALISTRRTLSTLLNKTLSSSTSYSSSFPTLSSRSRFAMPLIEKVSSSRTSLGPCYISTRPKTSGSGYSPLNDPSPNWSNRPPKETILLDGCDYEHWLIVMEFTDPKPTEEEMINSYVKTLTSVLGCEEEAKKKIYSVCTSTYTGFGALISEELSCKVKALPGVLWVLPDSYLDVPNKDYGGDLYVEGKVIPRPQYRFTEQRHTRPRPRPRYDRRRETMQVERREPSMGLHSPVNPGEFNKPSA

SEQ ID NO: 24130 - protein, 206 aa, Arabidopsis thaliana
  peptide (1)..(206): Ceres Seq. ID no. 13499701
  misc_feature (1)..(187): Homolog of NCBI NO: 2440029 NR Description: DAL1 protein [Arabidopsis thaliana]
  misc_feature (1)..(182): Homolog of NCBI NO: 15223247 NR Description: plastid protein -related [Arabidopsis thaliana]
  misc_feature (1)..(187): Homolog of NCBI NO: 15226934 NR Description: expressed protein [Arabidopsis thaliana]
  misc_feature (1)..(188): Homolog of NCBI NO: 21593052 NR Description: DAG protein, putative [Arabidopsis thaliana]
  misc_feature (1)..(188): Homolog of NCBI NO: 15220382 NR Description: DAG protein -related [Arabidopsis thaliana]
  misc_feature (1)..(186): Homolog of NCBI NO: 38636775 NR Description: putative DAG protein [Oryza sativa (japonica
  misc_feature (1)..(188): Homolog of NCBI NO: 6014904 NR Description: DAG PROTEIN, CHLOROPLAST PRECURSOR
  misc_feature (1)..(181): Homolog of NCBI NO: 18400602 NR Description: expressed protein [Arabidopsis thaliana]
  misc_feature (1)..(206): Homolog of NCBI NO: 15230785 NR Description: DAG protein -related [Arabidopsis thaliana]
  misc_feature (1)..(206): Homolog of NCBI NO: 27754695 NR Description: putative DAG protein [Arabidopsis thaliana]
MPLIEKVSSSRTSLGPCYISTRPKTSGSGYSPLNDPSPNWSNRPPKETILLDGCDYEHWLIVMEFTDPKPTEEEMINSYVKTLTSVLGCEEEAKKKIYSVCTSTYTGFGALISEELSCKVKALPGVLWVLPDSYLDVPNKDYGGDLYVEGKVIPRPQYRFTEQRHTRPRPRPRYDRRRETMQVERREPSMGLHSPVNPGEFNKPSA

SEQ ID NO: 24131 - DNA, 1342 bp, Arabidopsis thaliana
  misc_feature (1)..(1342): Ceres Seq. ID no. 12466367
  misc_feature: MA Experiment ID: 108462 Result: Up-regulated in Transcription
  misc_feature: MA Experiment 108462 PARAMETER Experiment Name: At_Germinating_Seeds_cDNA_P Parameter: Age (day) Value: 2 vs. 0
  misc_feature: MA Experiment 108462 PARAMETER Experiment Name: At_Germinating_Seeds_cDNA_P Parameter: Tissue Value: Germinating Seeds
  misc_feature: MA Experiment ID: 108463 Result: Up-regulated in Transcription
  misc_feature: MA Experiment 108463 PARAMETER Experiment Name: At_Germinating_Seeds_cDNA_P Parameter: Age (day) Value: 3 vs. 0
  misc_feature: MA Experiment 108463 PARAMETER Experiment Name: At_Germinating_Seeds_cDNA_P Parameter: Tissue Value: Germinating Seeds
  misc_feature: MA Experiment ID: 108464 Result: Up-regulated in Transcription
  misc_feature: MA Experiment 108464 PARAMETER Experiment Name: At_Germinating_Seeds_cDNA_P Parameter: Age (day) Value: 4 vs. 0
  misc_feature: MA Experiment 108464 PARAMETER Experiment Name: At_Germinating_Seeds_cDNA_P Parameter: Tissue Value: Germinating Seeds
  misc_feature: MA Experiment ID: 108579 Result: Up-regulated in Transcription
  misc_feature: MA Experiment 108579 PARAMETER Experiment Name: At_4deg_Cold_cDNA_P Parameter: Temperature (deg C) Value: 4 vs. 22
  misc_feature: MA Experiment 108579 PARAMETER Experiment Name: At_4deg_Cold_cDNA_P Parameter: Timepoint (hr) Value: 6
  misc_feature: MA Experiment 108579 PARAMETER Experiment Name: At_4deg_Cold_cDNA_P Parameter: Tissue Value: Aerial
  misc_feature: MA Experiment ID: 20000069 Result: Down-regulated in Transcription
  misc_feature: MA Experiment 20000069 PARAMETER Experiment Name: At_100uM_ABA_Mutants_cDNA_P Parameter: Plant Line Value: CS23
  misc_feature: MA Experiment 20000069 PARAMETER Experiment Name: At_100uM_ABA_Mutants_cDNA_P Parameter: Timepoint (hr) Value: 6
  misc_feature: MA Experiment 20000069 PARAMETER Experiment Name: At_100uM_ABA_Mutants_cDNA_P Parameter: Tissue Value: Aerial
  misc_feature: MA Experiment 20000069 PARAMETER Experiment Name: At_100uM_ABA_Mutants_cDNA_P Parameter: Treatment Value: 100uM ABA vs. No Treatment
  misc_feature: MA Experiment ID: 20000072 Result: Down-regulated in Transcription
  misc_feature: MA Experiment 20000072 PARAMETER Experiment Name: At_100uM_ABA_Mutants_cDNA_P Parameter: Plant Line Value: CS8105
  misc_feature: MA Experiment 20000072 PARAMETER Experiment Name: At_100uM_ABA_Mutants_cDNA_P Parameter: Timepoint (hr) Value: 6
  misc_feature: MA Experiment 20000072 PARAMETER Experiment Name: At_100uM_ABA_Mutants_cDNA_P Parameter: Tissue Value: Aerial
  misc_feature: MA Experiment 20000072 PARAMETER Experiment Name: At_100uM_ABA_Mutants_cDNA_P Parameter: Treatment Value: 100uM ABA vs. No Treatment
  misc_feature: MA Experiment ID: 20000087 Result: Down-regulated in Transcription
  misc_feature: MA Experiment 20000087 PARAMETER Experiment Name: At_100uM_ABA_Mutants_cDNA_P Parameter: Plant Line Value: WS
  misc_feature: MA Experiment 20000087 PARAMETER Experiment Name: At_100uM_ABA_Mutants_cDNA_P Parameter: Timepoint (hr) Value: 6
  misc_feature: MA Experiment 20000087 PARAMETER Experiment Name: At_100uM_ABA_Mutants_cDNA_P Parameter: Tissue Value: Aerial
  misc_feature: MA Experiment 20000087 PARAMETER Experiment Name: At_100uM_ABA_Mutants_cDNA_P Parameter: Treatment Value: 100uM ABA vs. No Treatment
  misc_feature: MA Experiment ID: 20000184 Result: Up-regulated in Transcription
  misc_feature: MA Experiment 20000184 PARAMETER Experiment Name: At_Shoots__P Parameter: Age (day) Value: 7
  misc_feature: MA Experiment 20000184 PARAMETER Experiment Name: At_Shoots__P Parameter: Tissue Value: Shoots vs. Whole Plant
  misc_feature: MA Experiment ID: 20000235 Result: Up-regulated in Transcription
  misc_feature: MA Experiment 20000235 PARAMETER Experiment Name: At_Siliques_P Parameter: Age (day) Value: 21
  misc_feature: MA Experiment 20000235 PARAMETER Experiment Name: At_Siliques_P Parameter: Organism Value: A. thaliana
  misc_feature: MA Experiment 20000235 PARAMETER Experiment Name: At_Siliques_P Parameter: Plant Line Value: WS
  misc_feature: MA Experiment 20000235 PARAMETER Experiment Name: At_Siliques_P Parameter: Tissue Value: 5-10mm Siliques vs. Whole Plant
  misc_feature: MA Experiment ID: 20000264 Result: Up-regulated in Transcription
  misc_feature: MA Experiment 20000264 PARAMETER Experiment Name: At_Open_Flower_P Parameter: Age (day) Value: 21
  misc_feature: MA Experiment 20000264 PARAMETER Experiment Name: At_Open_Flower_P Parameter: Plant Line Value: WS
  misc_feature: MA Experiment 20000264 PARAMETER Experiment Name: At_Open_Flower_P Parameter: Tissue Value: Open Flower vs. Whole Plant
  misc_feature: MA Experiment ID: 20000267 Result: Up-regulated in Transcription
  misc_feature: MA Experiment 20000267 PARAMETER Experiment Name: At_Drought_P Parameter: Age (day) Value: 7
  misc_feature: MA Experiment 20000267 PARAMETER Experiment Name: At_Drought_P Parameter: Organism Value: A. thaliana
  misc_feature: MA Experiment 20000267 PARAMETER Experiment Name: At_Drought_P Parameter: Plant Line Value: WS
  misc_feature: MA Experiment 20000267 PARAMETER Experiment Name: At_Drought_P Parameter: Timepoint (hr) Value: 6
  misc_feature: MA Experiment 20000267 PARAMETER Experiment Name: At_Drought_P Parameter: Tissue Value: Whole Plant
  misc_feature: MA Experiment 20000267 PARAMETER Experiment Name: At_Drought_P Parameter: Treatment Value: Drought vs. No Drought
  misc_feature: MA Experiment ID: 20000268 Result: Up-regulated in Transcription
  misc_feature: MA Experiment 20000268 PARAMETER Experiment Name: At_100mM_NaCl__P Parameter: Age (day) Value: 14
  misc_feature: MA Experiment 20000268 PARAMETER Experiment Name: At_100mM_NaCl__P Parameter: Organism Value: A. thaliana
  misc_feature: MA Experiment 20000268 PARAMETER Experiment Name: At_100mM_NaCl__P Parameter: Plant Line Value: WS
  misc_feature: MA Experiment 20000268 PARAMETER Experiment Name: At_100mM_NaCl__P Parameter: Timepoint (hr) Value: 6
  misc_feature: MA Experiment 20000268 PARAMETER Experiment Name: At_100mM_NaCl__P Parameter: Tissue Value: Whole Plant
  misc_feature: MA Experiment 20000268 PARAMETER Experiment Name: At_100mM_NaCl__P Parameter: Treatment Value: 100mM NaCl vs. No Treatment
  misc_feature: MA Experiment ID: 20000436 Result: Up-regulated in Transcription
  misc_feature: MA Experiment 20000436 PARAMETER Experiment Name: At_Drought_P Parameter: Age (day) Value: 7
  misc_feature: MA Experiment 20000436 PARAMETER Experiment Name: At_Drought_P Parameter: Organism Value: A. thaliana
  misc_feature: MA Experiment 20000436 PARAMETER Experiment Name: At_Drought_P Parameter: Plant Line Value: WS
  misc_feature: MA Experiment 20000436 PARAMETER Experiment Name: At_Drought_P Parameter: Timepoint (hr) Value: 12
  misc_feature: MA Experiment 20000436 PARAMETER Experiment Name: At_Drought_P Parameter: Tissue Value: Whole Plant
  misc_feature: MA Experiment 20000436 PARAMETER Experiment Name: At_Drought_P Parameter: Treatment Value: Drought vs. No Drought
  misc_feature: MA Experiment ID: 20000437 Result: Up-regulated in Transcription
  misc_feature: MA Experiment 20000437 PARAMETER Experiment Name: At_Drought_P Parameter: Age (day) Value: 8
  misc_feature: MA Experiment 20000437 PARAMETER Experiment Name: At_Drought_P Parameter: Organism Value: A. thaliana
  misc_feature: MA Experiment 20000437 PARAMETER Experiment Name: At_Drought_P Parameter: Plant Line Value: WS
  misc_feature: MA Experiment 20000437 PARAMETER Experiment Name: At_Drought_P Parameter: Timepoint (hr) Value: 24
  misc_feature: MA Experiment 20000437 PARAMETER Experiment Name: At_Drought_P Parameter: Tissue Value: Whole Plant
  misc_feature: MA Experiment 20000437 PARAMETER Experiment Name: At_Drought_P Parameter: Treatment Value: Drought vs. No Drought
  misc_feature: MA Experiment ID: 20000438 Result: Up-regulated in Transcription
  misc_feature: MA Experiment 20000438 PARAMETER Experiment Name: At_Shoots__P Parameter: Age (day) Value: 14
  misc_feature: MA Experiment 20000438 PARAMETER Experiment Name: At_Shoots__P Parameter: Tissue Value: Shoots vs. Whole Plant
  misc_feature: MA Experiment ID: 20000794 Result: Up-regulated in Transcription
  misc_feature: MA Experiment 20000794 PARAMETER Experiment Name: At_Petals_P Parameter: Age (day) Value: 23-25 days
  misc_feature: MA Experiment 20000794 PARAMETER Experiment Name: At_Petals_P Parameter: Plant Line Value: WS
  misc_feature: MA Experiment 20000794 PARAMETER Experiment Name: At_Petals_P Parameter: Tissue Value: Petals vs. Whole plant
  misc_feature: MA Experiment ID: 20001248 Result: Down-regulated in Transcription
  misc_feature: MA Experiment 20001248 PARAMETER Experiment Name: At_Far-red-induction_P Parameter: Age (day) Value: 7
  misc_feature: MA Experiment 20001248 PARAMETER Experiment Name: At_Far-red-induction_P Parameter: Light Value: Far-red vs. White
  misc_feature: MA Experiment 20001248 PARAMETER Experiment Name: At_Far-red-induction_P Parameter: Organism Value: A. thaliana
  misc_feature: MA Experiment 20001248 PARAMETER Experiment Name: At_Far-red-induction_P Parameter: Plant Line Value: Columbia
  misc_feature: MA Experiment 20001248 PARAMETER Experiment Name: At_Far-red-induction_P Parameter: Timepoint (hr) Value: 4
  misc_feature: MA Experiment 20001248 PARAMETER Experiment Name: At_Far-red-induction_P Parameter: Tissue Value: Whole Plant
acacttagctttctgttattcaattcttcacaaagtttctaaaagcttttctcttgttattcaacaacttggcaccgagcttcgtaacgccgtgtgtgtgttctacttgattctccgagctcttgatactgttgaggatgacacaagcgtaccagtggacatcaaagttccaattctgatagctttccaccgtcatatatacgatggtgactggcatttttcatgtggtacaaaagagtataaacttctaatggaccaatttcaccatgtttctgcagcttttctgaaacttgaaaaagggtatcaagaggctattgaagatataactaaaagaatgggtgcaggaatggccaagttcatttgcaaggaggtagaaacaattgatgactatgatgaatactgccattatgctgcaggacttgttggtttaggtttgtcaaaaatcttcattgcttcggaattagaaatactgactccagattggaagcagatttcaaattctacaggtttatttctgcagaaaacaaacattatcaaagattatcttgaagacattaatgagagaccaaagtcgcgcatgttttggcctcgtgagatttggggaaaatatgttgacaaacttgaggacttcaaaaatgaggagaaagctacaaaagcagtgcagtgtttgaatgaaatggtcactaatgcattgaatcatgttgaagattgtttgaaatccttggcttcactgcgtgatcctgcaatatttcagtcttgcgccatccctcagatcgtggcgattggaacacttacattatgctataacaatgtacaagtgtttagaggcgtcgtgagaatgagacgaggtctaatagctaaagtcattgatcgcacaaagacaatggatgatgtctatggtgcgttctatgatttttcttgcatgctacaaacaaaggttgacaataacgatccaaatgctatgaaaacattaaatcgactcgaaaccatcaagaaagtttgcagagaaaatggagtacttcacaaaagaaaatcttatgttaacgatgaaacacaatccaaggctatctttgttgtaatgtttgtgcttctactggctatagtcgttgtatatctcaaagcaaaccaacgtaagtgactctgattgtgaagtcatcatgaacataatttctagcttttttgaaatgtttgatcaaatcttgaattgattgtctattcaagattgtctacgacttcaaccgtcaaaatgttctgttctttctctcttccttttcagttgttctgttttatcatttttatgaagttataaattcaaccatcatgctcataatgttggttttcc

SEQ ID NO: 24132 - protein, 378 aa, Arabidopsis thaliana
  peptide (1)..(378): Ceres Seq. ID no. 12466368
  misc_feature (9)..(298): Pfam Name: Squalene/phytoene synthase Pfam Description: Squalene/phytoene synthase
  misc_feature (1)..(375): Homolog of NCBI NO: 15236168 NR Description: farnesyl-diphosphate farnesyltransferase
  misc_feature (1)..(343): Homolog of NCBI NO: 15236169 NR Description: farnesyl-diphosphate farnesyltransferase
  misc_feature (1)..(378): Homolog of NCBI NO: 7434083 NR Description: farnesyl-diphosphate farnesyltransferase (EC
  misc_feature (1)..(378): Homolog of NCBI NO: 25287164 NR Description: probable squalene synthase [imported] -
  misc_feature (1)..(378): Homolog of NCBI NO: 11258828 NR Description: farnesyl-diphosphate farnesyltransferase (EC
HLAFCYSILHKVSKSFSLVIQQLGTELRNAVCVFYLILRALDTVEDDTSVPVDIKVPILIAFHRHIYDGDWHFSCGTKEYKLLMDQFHHVSAAFLKLEKGYQEAIEDITKRMGAGMAKFICKEVETIDDYDEYCHYAAGLVGLGLSKIFIASELEILTPDWKQISNSTGLFLQKTNIIKDYLEDINERPKSRMFWPREIWGKYVDKLEDFKNEEKATKAVQCLNEMVTNALNHVEDCLKSLASLRDPAIFQSCAIPQIVAIGTLTLCYNNVQVFRGVVRMRRGLIAKVIDRTKTMDDVYGAFYDFSCMLQTKVDNNDPNAMKTLNRLETIKKVCRENGVLHKRKSYVNDETQSKAIFVVMFVLLLAIVVVYLKANQRK

SEQ ID NO: 24133 - protein, 295 aa, Arabidopsis thaliana
  peptide (1)..(295): Ceres Seq. ID no. 12466369
  misc_feature (1)..(215): Pfam Name: Squalene/phytoene synthase Pfam Description: Squalene/phytoene synthase
  misc_feature (1)..(292): Homolog of NCBI NO: 15236168 NR Description: farnesyl-diphosphate farnesyltransferase
  misc_feature (1)..(260): Homolog of NCBI NO: 15236169 NR Description: farnesyl-diphosphate farnesyltransferase
  misc_feature (1)..(295): Homolog of NCBI NO: 7434083 NR Description: farnesyl-diphosphate farnesyltransferase (EC
  misc_feature (1)..(295): Homolog of NCBI NO: 25287164 NR Description: probable squalene synthase [imported] -
  misc_feature (1)..(295): Homolog of NCBI NO: 11258828 NR Description: farnesyl-diphosphate farnesyltransferase (EC
MDQFHHVSAAFLKLEKGYQEAIEDITKRMGAGMAKFICKEVETIDDYDEYCHYAAGLVGLGLSKIFIASELEILTPDWKQISNSTGLFLQKTNIIKDYLEDINERPKSRMFWPREIWGKYVDKLEDFKNEEKATKAVQCLNEMVTNALNHVEDCLKSLASLRDPAIFQSCAIPQIVAIGTLTLCYNNVQVFRGVVRMRRGLIAKVIDRTKTMDDVYGAFYDFSCMLQTKVDNNDPNAMKTLNRLETIKKVCRENGVLHKRKSYVNDETQSKAIFVVMFVLLLAIVVVYLKANQRK

SEQ ID NO: 24134 - protein, 267 aa, Arabidopsis thaliana
  peptide (1)..(267): Ceres Seq. ID no. 12466370
  misc_feature (1)..(187): Pfam Name: Squalene/phytoene synthase Pfam Description: Squalene/phytoene synthase
  misc_feature (1)..(264): Homolog of NCBI NO: 15236168 NR Description: farnesyl-diphosphate farnesyltransferase
  misc_feature (1)..(232): Homolog of NCBI NO: 15236169 NR Description: farnesyl-diphosphate farnesyltransferase
  misc_feature (1)..(267): Homolog of NCBI NO: 7434083 NR Description: farnesyl-diphosphate farnesyltransferase (EC
  misc_feature (1)..(267): Homolog of NCBI NO: 25287164 NR Description: probable squalene synthase [imported] -
  misc_feature (1)..(267): Homolog of NCBI NO: 11258828 NR Description: farnesyl-diphosphate farnesyltransferase (EC
MGAGMAKFICKEVETIDDYDEYCHYAAGLVGLGLSKIFIASELEILTPDWKQISNSTGLFLQKTNIIKDYLEDINERPKSRMFWPREIWGKYVDKLEDFKNEEKATKAVQCLNEMVTNALNHVEDCLKSLASLRDPAIFQSCAIPQIVAIGTLTLCYNNVQVFRGVVRMRRGLIAKVIDRTKTMDDVYGAFYDFSCMLQTKVDNNDPNAMKTLNRLETIKKVCRENGVLHKRKSYVNDETQSKAIFVVMFVLLLAIVVVYLKANQRK

SEQ ID NO: 24135 - DNA, 1341 bp, Arabidopsis thaliana
  misc_feature (1)..(1341): Ceres Seq. ID no. 13497127
  misc_feature: MA Experiment ID: 108585 Result: Up-regulated in Transcription
  misc_feature: MA Experiment 108585 PARAMETER Experiment Name: At_5mM_NaNP_cDNA_P Parameter: Timepoint (hr) Value: 6
  misc_feature: MA Experiment 108585 PARAMETER Experiment Name: At_5mM_NaNP_cDNA_P Parameter: Tissue Value: Aerial
  misc_feature: MA Experiment 108585 PARAMETER Experiment Name: At_5mM_NaNP_cDNA_P Parameter: Treatment Value: null
  misc_feature: MA Experiment ID: 20000069 Result: Down-regulated in Transcription
  misc_feature: MA Experiment 20000069 PARAMETER Experiment Name: At_100uM_ABA_Mutants_cDNA_P Parameter: Plant Line Value: CS23
  misc_feature: MA Experiment 20000069 PARAMETER Experiment Name: At_100uM_ABA_Mutants_cDNA_P Parameter: Timepoint (hr) Value: 6
  misc_feature: MA Experiment 20000069 PARAMETER Experiment Name: At_100uM_ABA_Mutants_cDNA_P Parameter: Tissue Value: Aerial
  misc_feature: MA Experiment 20000069 PARAMETER Experiment Name: At_100uM_ABA_Mutants_cDNA_P Parameter: Treatment Value: 100uM ABA vs. No Treatment
  misc_feature: MA Experiment ID: 20000070 Result: Down-regulated in Transcription
  misc_feature: MA Experiment 20000070 PARAMETER Experiment Name: At_100uM_ABA_Mutants_cDNA_P Parameter: Plant Line Value: CS24
  misc_feature: MA Experiment 20000070 PARAMETER Experiment Name: At_100uM_ABA_Mutants_cDNA_P Parameter: Timepoint (hr) Value: 6
  misc_feature: MA Experiment 20000070 PARAMETER Experiment Name: At_100uM_ABA_Mutants_cDNA_P Parameter: Tissue Value: Aerial
  misc_feature: MA Experiment 20000070 PARAMETER Experiment Name: At_100uM_ABA_Mutants_cDNA_P Parameter: Treatment Value: 100uM ABA vs. No Treatment
  misc_feature: MA Experiment ID: 20000071 Result: Down-regulated in Transcription
  misc_feature: MA Experiment 20000071 PARAMETER Experiment Name: At_100uM_ABA_Mutants_cDNA_P Parameter: Plant Line Value: CS8104
  misc_feature: MA Experiment 20000071 PARAMETER Experiment Name: At_100uM_ABA_Mutants_cDNA_P Parameter: Timepoint (hr) Value: 6
  misc_feature: MA Experiment 20000071 PARAMETER Experiment Name: At_100uM_ABA_Mutants_cDNA_P Parameter: Tissue Value: Aerial
  misc_feature: MA Experiment 20000071 PARAMETER Experiment Name: At_100uM_ABA_Mutants_cDNA_P Parameter: Treatment Value: 100uM ABA vs. No Treatment
  misc_feature: MA Experiment ID: 20000086 Result: Down-regulated in Transcription
  misc_feature: MA Experiment 20000086 PARAMETER Experiment Name: At_100uM_ABA_Mutants_cDNA_P Parameter: Plant Line Value: CS22
  misc_feature: MA Experiment 20000086 PARAMETER Experiment Name: At_100uM_ABA_Mutants_cDNA_P Parameter: Timepoint (hr) Value: 6
  misc_feature: MA Experiment 20000086 PARAMETER Experiment Name: At_100uM_ABA_Mutants_cDNA_P Parameter: Tissue Value: Aerial
  misc_feature: MA Experiment 20000086 PARAMETER Experiment Name: At_100uM_ABA_Mutants_cDNA_P Parameter: Treatment Value: 100uM ABA vs. No Treatment
  misc_feature: MA Experiment ID: 20000087 Result: Down-regulated in Transcription
  misc_feature: MA Experiment 20000087 PARAMETER Experiment Name: At_100uM_ABA_Mutants_cDNA_P Parameter: Plant Line Value: WS
  misc_feature: MA Experiment 20000087 PARAMETER Experiment Name: At_100uM_ABA_Mutants_cDNA_P Parameter: Timepoint (hr) Value: 6
  misc_feature: MA Experiment 20000087 PARAMETER Experiment Name: At_100uM_ABA_Mutants_cDNA_P Parameter: Tissue Value: Aerial
  misc_feature: MA Experiment 20000087 PARAMETER Experiment Name: At_100uM_ABA_Mutants_cDNA_P Parameter: Treatment Value: 100uM ABA vs. No Treatment
  misc_feature: MA Experiment ID: 20000089 Result: Down-regulated in Transcription
  misc_feature: MA Experiment ID: 20000090 Result: Down-regulated in Transcription
  misc_feature: MA Experiment ID: 20000111 Result: Up-regulated in Transcription
  misc_feature: MA Experiment 20000111 PARAMETER Experiment Name: At_42deg_Heat_cDNA_P Parameter: Temperature (deg C) Value: 42 vs. 22
  misc_feature: MA Experiment 20000111 PARAMETER Experiment Name: At_42deg_Heat_cDNA_P Parameter: Timepoint (hr) Value: 6
  misc_feature: MA Experiment 20000111 PARAMETER Experiment Name: At_42deg_Heat_cDNA_P Parameter: Tissue Value: Aerial
  misc_feature: MA Experiment ID: 20000113 Result: Up-regulated in Transcription
  misc_feature: MA Experiment 20000113 PARAMETER Experiment Name: At_42deg_Heat_cDNA_P Parameter: Temperature (deg C) Value: 42 vs. 22
  misc_feature: MA Experiment 20000113 PARAMETER Experiment Name: At_42deg_Heat_cDNA_P Parameter: Timepoint (hr) Value: 8
  misc_feature: MA Experiment 20000113 PARAMETER Experiment Name: At_42deg_Heat_cDNA_P Parameter: Tissue Value: Aerial
  misc_feature: MA Experiment ID: 20000117 Result: Down-regulated in Transcription
  misc_feature: MA Experiment 20000117 PARAMETER Experiment Name: At_100uM_ABA_Mutants_cDNA_P Parameter: Plant Line Value: Columbia
  misc_feature: MA Experiment 20000117 PARAMETER Experiment Name: At_100uM_ABA_Mutants_cDNA_P Parameter: Timepoint (hr) Value: 6
  misc_feature: MA Experiment 20000117 PARAMETER Experiment Name: At_100uM_ABA_Mutants_cDNA_P Parameter: Tissue Value: Aerial
  misc_feature: MA Experiment 20000117 PARAMETER Experiment Name: At_100uM_ABA_Mutants_cDNA_P Parameter: Treatment Value: 100uM ABA vs. No Treatment
  misc_feature: MA Experiment ID: 20000173 Result: Up-regulated in Transcription
  misc_feature: MA Experiment 20000173 PARAMETER Experiment Name: At_42deg_Heat_P Parameter: Age (day) Value: 14
  misc_feature: MA Experiment 20000173 PARAMETER Experiment Name: At_42deg_Heat_P Parameter: Organism Value: A. thaliana
  misc_feature: MA Experiment 20000173 PARAMETER Experiment Name: At_42deg_Heat_P Parameter: Plant Line Value: WS
  misc_feature: MA Experiment 20000173 PARAMETER Experiment Name: At_42deg_Heat_P Parameter: Temperature (deg C) Value: 42 vs. 22
  misc_feature: MA Experiment 20000173 PARAMETER Experiment Name: At_42deg_Heat_P Parameter: Timepoint (hr) Value: 6
  misc_feature: MA Experiment 20000173 PARAMETER Experiment Name: At_42deg_Heat_P Parameter: Tissue Value: Aerial
  misc_feature: MA Experiment ID: 20001248 Result: Down-regulated in Transcription
  misc_feature: MA Experiment 20001248 PARAMETER Experiment Name: At_Far-red-induction_P Parameter: Age (day) Value: 7
  misc_feature: MA Experiment 20001248 PARAMETER Experiment Name: At_Far-red-induction_P Parameter: Light Value: Far-red vs. White
  misc_feature: MA Experiment 20001248 PARAMETER Experiment Name: At_Far-red-induction_P Parameter: Organism Value: A. thaliana
  misc_feature: MA Experiment 20001248 PARAMETER Experiment Name: At_Far-red-induction_P Parameter: Plant Line Value: Columbia
  misc_feature: MA Experiment 20001248 PARAMETER Experiment Name: At_Far-red-induction_P Parameter: Timepoint (hr) Value: 4
  misc_feature: MA Experiment 20001248 PARAMETER Experiment Name: At_Far-red-induction_P Parameter: Tissue Value: Whole Plant
  misc_feature: MA Experiment ID: 20001556 Result: Up-regulated in Transcription
  misc_feature: MA Experiment 20001556 PARAMETER Experiment Name: At_Drought_Soil_Dry_P Parameter: Age (day) Value: 26
  misc_feature: MA Experiment 20001556 PARAMETER Experiment Name: At_Drought_Soil_Dry_P Parameter: Organism Value: A. thaliana
  misc_feature: MA Experiment 20001556 PARAMETER Experiment Name: At_Drought_Soil_Dry_P Parameter: Plant Line Value: WS
  misc_feature: MA Experiment 20001556 PARAMETER Experiment Name: At_Drought_Soil_Dry_P Parameter: Post Timepoint (hr) Value: None
  misc_feature: MA Experiment 20001556 PARAMETER Experiment Name: At_Drought_Soil_Dry_P Parameter: Post-Treatment Value: None
  misc_feature: MA Experiment 20001556 PARAMETER Experiment Name: At_Drought_Soil_Dry_P Parameter: Timepoint (day) Value: 12
  misc_feature: MA Experiment 20001556 PARAMETER Experiment Name: At_Drought_Soil_Dry_P Parameter: Treatment Value: Drought vs. No Drought
  misc_feature: MA Experiment ID: 20001904 Result: Up-regulated in Transcription
  misc_feature: MA Experiment 20001904 PARAMETER Experiment Name: At_Drought_Reproduction_P Parameter: Age (day) Value: 37
  misc_feature: MA Experiment 20001904 PARAMETER Experiment Name: At_Drought_Reproduction_P Parameter: Organism Value: A. thaliana
  misc_feature: MA Experiment 20001904 PARAMETER Experiment Name: At_Drought_Reproduction_P Parameter: Plant Line Value: WS
  misc_feature: MA Experiment 20001904 PARAMETER Experiment Name: At_Drought_Reproduction_P Parameter: Timepoint (day) Value: 7
  misc_feature: MA Experiment 20001904 PARAMETER Experiment Name: At_Drought_Reproduction_P Parameter: Tissue Value: Rosettes
  misc_feature: MA Experiment 20001904 PARAMETER Experiment Name: At_Drought_Reproduction_P Parameter: Treatment Value: Drought vs. No Drought
gttagcggggtcggttacgaagaaaggaagctcttttacattctcgtggcaacgatctcatctacgtgtcacgaaaactcaaatctcttactccggcgaacgatgtaccgaacggcggcgaagcgtcttctcgccggtggtggaatcactaccacccgtctcctccgattaccgaagctcaggtctacaatcatcccttcctcttacacttccggtctctgcacttcgtcgattggtggtaatactgaatcaccaatgggtaagcagtctgtgaaccctaatcaatcgggtccaacggcgtcgtcttctacgggtacaggggaaggacaacgccgacatgagagcagaaagccgagagctgagttccaagaagagcaggctcgtgttctctctgcgtctctccgtcacgtgccgaggttaggttggacggaagaagcgatgatggctggttcaagggatgttggtgtgtctccttcgattgttgggtctttctccaggaaagaagctgctcttgttgagttcttcatggatgaatgccttcaattgcttatggatagaatagactctggattggatttgcaaaatctgattccaagtgaacgtatctccaagctcattagaattcgtctagaatgcaagtcccttacatgtcaaaatggccccaagctcttagcattcaggcgcatcctctgaatgtcccaacgagttttaagcaacgggcaatgttagttgatgagatatggcatgctgttggagatggagcctcggatttagattggtatgtcaagcgtactattcttggaggcgtttactcaactaccgagatttacatgctcaccgatgactccttagaacatcgcgatacatgggcattcttggatgacagagtcaaagatgcttttgatcttaagaagagcatacaagaggccaagtattttgcagaagacataggagctggagttgggaagtcggttcaaggactgatgaatggagttatgcagacaatgtccagaagaagtggtggctctgcgttttgaaaagatcacacctttacacatgattctgcttcacactccttacggattctccaatattttgagttgggatttactataataatgagattagacttatatgagttgaagtgaaggcatatgaactaatatattatcttctacgtttgaataaaccattgagtttgaaatctttaatttgtaaataaggatgaaacctgttctgtgtttggttgttctgtgcgtaaacagagttggaaacttgtaattttggtctacttcaatttggtagggtgtttattgttcgaaaacaaacatatgggcactt

SEQ ID NO: 24136 - protein, 230 aa, Arabidopsis thaliana
  peptide (1)..(230): Ceres Seq. ID no. 13497128
  misc_feature (33)..(192): Homolog of NCBI NO: 18447632 NR Description: SD02734p [Drosophila melanogaster]
  misc_feature (33)..(225): Homolog of NCBI NO: 24586344 NR Description: CG30493-PB [Drosophila melanogaster]
  misc_feature (46)..(179): Homolog of NCBI NO: 34851240 NR Description: similar to Polymerase (RNA) II (DNA directed)
  misc_feature (87)..(179): Homolog of NCBI NO: 6841302 NR Description: HSPC326 [Homo sapiens]
  misc_feature (45)..(179): Homolog of NCBI NO: 40789233 NR Description: hypothetical protein DKFZp434K046 [Homo sapiens]
  misc_feature (46)..(201): Homolog of NCBI NO: 33859690 NR Description: RIKEN cDNA 2310005O14 [Mus musculus]
  misc_feature (35)..(230): Homolog of NCBI NO: 14532534 NR Description: T29M8.1/T29M8.1 [Arabidopsis thaliana]
  misc_feature (35)..(227): Homolog of NCBI NO: 8778288 NR Description: F14D16.30 [Arabidopsis thaliana]
  misc_feature (35)..(227): Homolog of NCBI NO: 21593282 NR Description: unknown [Arabidopsis thaliana]
  misc_feature (35)..(227): Homolog of NCBI NO: 18394701 NR Description: expressed protein [Arabidopsis thaliana]
VSGVGYEERKLFYILVATISSTCHENSNLLLRRTMYRTAAKRLLAGGGITTTRLLRLPKLRSTIIPSSYTSGLCTSSIGGNTESPMGKQSVNPNQSGPTASSSTGTGEGQRRHESRKPRAEFQEEQARVLSASLRHVPRLGWTEEAMMAGSRDVGVSPSIVGSFSRKEAALVEFFMDECLQLLMDRIDSGLDLQNLIPSERISKLIRIRLECKSLTCQNGPKLLAFRRIL

SEQ ID NO: 24137 - protein, 196 aa, Arabidopsis thaliana
  peptide (1)..(196): Ceres Seq. ID no. 13497129
  misc_feature (1)..(158): Homolog of NCBI NO: 18447632 NR Description: SD02734p [Drosophila melanogaster]
  misc_feature (1)..(191): Homolog of NCBI NO: 24586344 NR Description: CG30493-PB [Drosophila melanogaster]
  misc_feature (12)..(145): Homolog of NCBI NO: 34851240 NR Description: similar to Polymerase (RNA) II (DNA directed)
  misc_feature (53)..(145): Homolog of NCBI NO: 6841302 NR Description: HSPC326 [Homo sapiens]
  misc_feature (11)..(145): Homolog of NCBI NO: 40789233 NR Description: hypothetical protein DKFZp434K046 [Homo sapiens]
  misc_feature (12)..(167): Homolog of NCBI NO: 33859690 NR Description: RIKEN cDNA 2310005O14 [Mus musculus]
  misc_feature (1)..(196): Homolog of NCBI NO: 14532534 NR Description: T29M8.1/T29M8.1 [Arabidopsis thaliana]
  misc_feature (1)..(193): Homolog of NCBI NO: 8778288 NR Description: F14D16.30 [Arabidopsis thaliana]
  misc_feature (1)..(193): Homolog of NCBI NO: 21593282 NR Description: unknown [Arabidopsis thaliana]
  misc_feature (1)..(193): Homolog of NCBI NO: 18394701 NR Description: expressed protein [Arabidopsis thaliana]
MYRTAAKRLLAGGGITTTRLLRLPKLRSTIIPSSYTSGLCTSSIGGNTESPMGKQSVNPNQSGPTASSSTGTGEGQRRHESRKPRAEFQEEQARVLSASLRHVPRLGWTEEAMMAGSRDVGVSPSIVGSFSRKEAALVEFFMDECLQLLMDRIDSGLDLQNLIPSERISKLIRIRLECKSLTCQNGPKLLAFRRIL

SEQ ID NO: 24138 - protein, 145 aa, Arabidopsis thaliana
  peptide (1)..(145): Ceres Seq. ID no. 13497130
  misc_feature (1)..(116): Homolog of NCBI NO: 33859690 NR Description: RIKEN cDNA 2310005O14 [Mus musculus]
  misc_feature (1)..(145): Homolog of NCBI NO: 14532534 NR Description: T29M8.1/T29M8.1 [Arabidopsis thaliana]
  misc_feature (1)..(142): Homolog of NCBI NO: 8778288 NR Description: F14D16.30 [Arabidopsis thaliana]
  misc_feature (1)..(142): Homolog of NCBI NO: 21593282 NR Description: unknown [Arabidopsis thaliana]
  misc_feature (1)..(142): Homolog of NCBI NO: 18394701 NR Description: expressed protein [Arabidopsis thaliana]
  misc_feature (1)..(107): Homolog of NCBI NO: 18447632 NR Description: SD02734p [Drosophila melanogaster]
  misc_feature (1)..(140): Homolog of NCBI NO: 24586344 NR Description: CG30493-PB [Drosophila melanogaster]
  misc_feature (1)..(94): Homolog of NCBI NO: 34851240 NR Description: similar to Polymerase (RNA) II (DNA directed)
  misc_feature (2)..(94): Homolog of NCBI NO: 6841302 NR Description: HSPC326 [Homo sapiens]
  misc_feature (1)..(94): Homolog of NCBI NO: 40789233 NR Description: hypothetical protein DKFZp434K046 [Homo sapiens]
MGKQSVNPNQSGPTASSSTGTGEGQRRHESRKPRAEFQEEQARVLSASLRHVPRLGWTEEAMMAGSRDVGVSPSIVGSFSRKEAALVEFFMDECLQLLMDRIDSGLDLQNLIPSERISKLIRIRLECKSLTCQNGPKLLAFRRIL

SEQ ID NO: 24139 - DNA, 1522 bp, Arabidopsis thaliana
  misc_feature (1)..(1522): Ceres Seq. ID no. 12371439
  misc_feature: MA Experiment ID: 108433 Result: Down-regulated in Transcription
  misc_feature: MA Experiment 108433 PARAMETER Experiment Name: At_rhl_Mutant2_cDNA_P Parameter: Age (day) Value: 7
  misc_feature: MA Experiment 108433 PARAMETER Experiment Name: At_rhl_Mutant2_cDNA_P Parameter: Organism Value: A. thaliana
  misc_feature: MA Experiment 108433 PARAMETER Experiment Name: At_rhl_Mutant2_cDNA_P Parameter: Plant Line Value: rhl Mutant vs. wt landsburg
  misc_feature: MA Experiment 108433 PARAMETER Experiment Name: At_rhl_Mutant2_cDNA_P Parameter: Tissue Value: Roots
  misc_feature: MA Experiment ID: 108461 Result: Up-regulated in Transcription
  misc_feature: MA Experiment 108461 PARAMETER Experiment Name: At_Germinating_Seeds_cDNA_P Parameter: Age (day) Value: 1 vs. 0
  misc_feature: MA Experiment 108461 PARAMETER Experiment Name: At_Germinating_Seeds_cDNA_P Parameter: Tissue Value: Germinating Seeds
  misc_feature: MA Experiment ID: 108462 Result: Up-regulated in Transcription
  misc_feature: MA Experiment 108462 PARAMETER Experiment Name: At_Germinating_Seeds_cDNA_P Parameter: Age (day) Value: 2 vs. 0
  misc_feature: MA Experiment 108462 PARAMETER Experiment Name: At_Germinating_Seeds_cDNA_P Parameter: Tissue Value: Germinating Seeds
  misc_feature: MA Experiment ID: 108463 Result: Up-regulated in Transcription
  misc_feature: MA Experiment 108463 PARAMETER Experiment Name: At_Germinating_Seeds_cDNA_P Parameter: Age (day) Value: 3 vs. 0
  misc_feature: MA Experiment 108463 PARAMETER Experiment Name: At_Germinating_Seeds_cDNA_P Parameter: Tissue Value: Germinating Seeds
  misc_feature: MA Experiment ID: 108489 Result: Down-regulated in Transcription
  misc_feature: MA Experiment ID: 108569 Result: Up-regulated in Transcription
  misc_feature: MA Experiment 108569 PARAMETER Experiment Name: At_0.001%_MeJA__cDNA_P Parameter: Timepoint (hr) Value: 6
  misc_feature: MA Experiment 108569 PARAMETER Experiment Name: At_0.001%_MeJA__cDNA_P Parameter: Tissue Value: Aerial
  misc_feature: MA Experiment 108569 PARAMETER Experiment Name: At_0.001%_MeJA__cDNA_P Parameter: Treatment Value: 0.001% MeJA vs. No Treatment
  misc_feature: MA Experiment ID: 108585 Result: Up-regulated in Transcription
  misc_feature: MA Experiment 108585 PARAMETER Experiment Name: At_5mM_NaNP_cDNA_P Parameter: Timepoint (hr) Value: 6
  misc_feature: MA Experiment 108585 PARAMETER Experiment Name: At_5mM_NaNP_cDNA_P Parameter: Tissue Value: Aerial
  misc_feature: MA Experiment 108585 PARAMETER Experiment Name: At_5mM_NaNP_cDNA_P Parameter: Treatment Value: null
  misc_feature: MA Experiment ID: 20000179 Result: Up-regulated in Transcription
  misc_feature: MA Experiment 20000179 PARAMETER Experiment Name: At_Germinating_Seeds_P Parameter: Age (hr) Value: 6 vs. 0
  misc_feature: MA Experiment 20000179 PARAMETER Experiment Name: At_Germinating_Seeds_P Parameter: Tissue Value: Germinating Seeds
  misc_feature: MA Experiment ID: 20000180 Result: Up-regulated in Transcription
  misc_feature: MA Experiment 20000180 PARAMETER Experiment Name: At_Germinating_Seeds_P Parameter: Age (hr) Value: 24 vs. 0
  misc_feature: MA Experiment 20000180 PARAMETER Experiment Name: At_Germinating_Seeds_P Parameter: Tissue Value: Germinating Seeds
  misc_feature: MA Experiment ID: 20000184 Result: Up-regulated in Transcription
  misc_feature: MA Experiment 20000184 PARAMETER Experiment Name: At_Shoots__P Parameter: Age (day) Value: 7
  misc_feature: MA Experiment 20000184 PARAMETER Experiment Name: At_Shoots__P Parameter: Tissue Value: Shoots vs. Whole Plant
  misc_feature: MA Experiment ID: 20000437 Result: Down-regulated in Transcription
  misc_feature: MA Experiment 20000437 PARAMETER Experiment Name: At_Drought_P Parameter: Age (day) Value: 8
  misc_feature: MA Experiment 20000437 PARAMETER Experiment Name: At_Drought_P Parameter: Organism Value: A. thaliana
  misc_feature: MA Experiment 20000437 PARAMETER Experiment Name: At_Drought_P Parameter: Plant Line Value: WS
  misc_feature: MA Experiment 20000437 PARAMETER Experiment Name: At_Drought_P Parameter: Timepoint (hr) Value: 24
  misc_feature: MA Experiment 20000437 PARAMETER Experiment Name: At_Drought_P Parameter: Tissue Value: Whole Plant
  misc_feature: MA Experiment 20000437 PARAMETER Experiment Name: At_Drought_P Parameter: Treatment Value: Drought vs. No Drought
  misc_feature: MA Experiment ID: 20000438 Result: Up-regulated in Transcription
  misc_feature: MA Experiment 20000438 PARAMETER Experiment Name: At_Shoots__P Parameter: Age (day) Value: 14
  misc_feature: MA Experiment 20000438 PARAMETER Experiment Name: At_Shoots__P Parameter: Tissue Value: Shoots vs. Whole Plant
  misc_feature: MA Experiment ID: 20001451 Result: Down-regulated in Transcription
  misc_feature: MA Experiment 20001451 PARAMETER Experiment Name: At_Far-red-induction_P Parameter: Age (day) Value: 7
  misc_feature: MA Experiment 20001451 PARAMETER Experiment Name: At_Far-red-induction_P Parameter: Light Value: Far-red vs. White
  misc_feature: MA Experiment 20001451 PARAMETER Experiment Name: At_Far-red-induction_P Parameter: Organism Value: A. thaliana
  misc_feature: MA Experiment 20001451 PARAMETER Experiment Name: At_Far-red-induction_P Parameter: Plant Line Value: Columbia
  misc_feature: MA Experiment 20001451 PARAMETER Experiment Name: At_Far-red-induction_P Parameter: Timepoint (hr) Value: 24
  misc_feature: MA Experiment 20001451 PARAMETER Experiment Name: At_Far-red-induction_P Parameter: Tissue Value: Whole Plant
  misc_feature: MA Experiment ID: 20001911 Result: Down-regulated in Transcription
  misc_feature: MA Experiment 20001911 PARAMETER Experiment Name: At_Drought_Reproduction_P Parameter: Age (day) Value: 40
  misc_feature: MA Experiment 20001911 PARAMETER Experiment Name: At_Drought_Reproduction_P Parameter: Organism Value: A. thaliana
  misc_feature: MA Experiment 20001911 PARAMETER Experiment Name: At_Drought_Reproduction_P Parameter: Plant Line Value: WS
  misc_feature: MA Experiment 20001911 PARAMETER Experiment Name: At_Drought_Reproduction_P Parameter: Timepoint (day) Value: 10
  misc_feature: MA Experiment 20001911 PARAMETER Experiment Name: At_Drought_Reproduction_P Parameter: Tissue Value: Flowers
  misc_feature: MA Experiment 20001911 PARAMETER Experiment Name: At_Drought_Reproduction_P Parameter: Treatment Value: Drought vs. No Drought
acaaaacatttccataaccaaaaaacctcaaaataaaaaaatgagaactctcttaccttcccatactccggcaacggtaacaacggcggcgagaagaagacacgtcatacattgcgccggtaagagatctgactctttctccattaattccagtagctccgattggcaaagctcctgcgccattctctcaagcaaagttaactcacaagaacaatctgaatccttatcttccaattccaatggatcatcatcctaccacgtttccgccgtcaacggtcacaacaacggcgccggagtctcagatttgaatctagttccattcaacaacaaccaatcgattcaatcgaagaagcctttaagtatttcagatctatctccagctccgatgcatggatctaacctccgtgtagcttatcaaggtgttcccggagcttactccgaagccgccgctggtaaagcttatcctaactgtcaagcgattccttgcgatcaattcgaagttgcgtttcaagcggttgagctttggatcgccgatcgcgctgttttacccgtcgaaaactcactcggcggttcgattcatcgtaattacgatcttctcctccgtcaccgtcttcacatcgtcggcgaagttcagcttccggttcatcattgtctcatggctcttcccggtgtacggaaagagtttctcactcgtgtgatctctcatcctcaaggactagctcaatgcgaacacacgttgactaaactcggtctcaacgtagctcgtgaagctgttgatgataccgccggtgcggcggagtttatcgctgcgaataatatccgtgacaccgccgcgattgcgagtgcacgcgcggcggagatctacggattggagattttggaagatgggatacaagatgacgcgagtaacgtcacgcgctttgtgatgttggcgcgtgaaccgattataccgagaactgatcggccgtttaagacgagtatagtgtttgctcacgagaaaggcacgtgcgttttgtttaaggttctctctgcttttgcgtttaggaacattagtttgactaagattgagtctaggccgaaccataatgttcctattaggctagtcgatgaggctaatgtgggcacggctaagcattttgagtatatgttttatatcgacttcgaggcttccatggccgagtcacgtgctcagaatgcgctttctgaggttcaagagtttacgtcgtttttacgggttttggggagttatccgatggatatgacttcttggtcaccatcgtcttcgtcctcttcgtcatcaacattttcattgtgacaacactaagatcataaccaacgtgtgaagtcaattgtgtatgtaaattggagaagaaagttgtaaacataattttggtgaaaataaattacttatttctccaaagatcaatcttttgtattttgctgtttacattattatactttggagtttcgtttgatcgtagttttattatgaaattgcaagttttgagttgatttattctcc

SEQ ID NO: 24140 - protein, 437 aa, Arabidopsis thaliana
  peptide (1)..(437): Ceres Seq. ID no. 12371440
  misc_feature (136)..(315): Pfam Name: Prephenate dehydratase Pfam Description: Prephenate dehydratase
  misc_feature (117)..(420): Homolog of NCBI NO: 15221096 NR Description: putative chloroplast prephenate dehydratase
  misc_feature (83)..(421): Homolog of NCBI NO: 21537054 NR Description: putative P-protein: chorismate mutase, prephenate
  misc_feature (83)..(421): Homolog of NCBI NO: 15231489 NR Description: putative P-protein: chorismate mutase, prephenate
  misc_feature (113)..(421): Homolog of NCBI NO: 34394031 NR Description: putative prephenate dehydratase
  misc_feature (32)..(424): Homolog of NCBI NO: 15242928 NR Description: chorismate mutase/prephenate dehydratase-like
  misc_feature (13)..(431): Homolog of NCBI NO: 15230489 NR Description: putative chloroplast prephenate dehydratase
  misc_feature (53)..(433): Homolog of NCBI NO: 38347597 NR Description: OSJNBa0042I15.10 [Oryza sativa (japonica
  misc_feature (50)..(431): Homolog of NCBI NO: 18390869 NR Description: expressed protein
  misc_feature (14)..(437): Homolog of NCBI NO: 15226259 NR Description: putative chorismate mutase/prephenate dehydratase
  misc_feature (14)..(437): Homolog of NCBI NO: 21593283 NR Description: putative chorismate mutase/prephenate dehydratase
QNISITKKPQNKKMRTLLPSHTPATVTTAARRRHVIHCAGKRSDSFSINSSSSDWQSSCAILSSKVNSQEQSESLSSNSNGSSSYHVSAVNGHNNGAGVSDLNLVPFNNNQSIQSKKPLSISDLSPAPMHGSNLRVAYQGVPGAYSEAAAGKAYPNCQAIPCDQFEVAFQAVELWIADRAVLPVENSLGGSIHRNYDLLLRHRLHIVGEVQLPVHHCLMALPGVRKEFLTRVISHPQGLAQCEHTLTKLGLNVAREAVDDTAGAAEFIAANNIRDTAAIASARAAEIYGLEILEDGIQDDASNVTRFVMLAREPIIPRTDRPFKTSIVFAHEKGTCVLFKVLSAFAFRNISLTKIESRPNHNVPIRLVDEANVGTAKHFEYMFYIDFEASMAESRAQNALSEVQEFTSFLRVLGSYPMDMTSWSPSSSSSSSSTFSL

SEQ ID NO: 24141 - protein, 424 aa, Arabidopsis thaliana
  peptide (1)..(424): Ceres Seq. ID no. 12371441
  misc_feature (123)..(302): Pfam Name: Prephenate dehydratase Pfam Description: Prephenate dehydratase
  misc_feature (104)..(407): Homolog of NCBI NO: 15221096 NR Description: putative chloroplast prephenate dehydratase
  misc_feature (70)..(408): Homolog of NCBI NO: 21537054 NR Description: putative P-protein: chorismate mutase, prephenate
  misc_feature (70)..(408): Homolog of NCBI NO: 15231489 NR Description: putative P-protein: chorismate mutase, prephenate
  misc_feature (100)..(408): Homolog of NCBI NO: 34394031 NR Description: putative prephenate dehydratase
  misc_feature (19)..(411): Homolog of NCBI NO: 15242928 NR Description: chorismate mutase/prephenate dehydratase-like
  misc_feature (1)..(418): Homolog of NCBI NO: 15230489 NR Description: putative chloroplast prephenate dehydratase
  misc_feature (40)..(420): Homolog of NCBI NO: 38347597 NR Description: OSJNBa0042I15.10 [Oryza sativa (japonica
  misc_feature (37)..(418): Homolog of NCBI NO: 18390869 NR Description: expressed protein
  misc_feature (1)..(424): Homolog of NCBI NO: 15226259 NR Description: putative chorismate mutase/prephenate dehydratase
  misc_feature (1)..(424): Homolog of NCBI NO: 21593283 NR Description: putative chorismate mutase/prephenate dehydratase
MRTLLPSHTPATVTTAARRRHVIHCAGKRSDSFSINSSSSDWQSSCAILSSKVNSQEQSESLSSNSNGSSSYHVSAVNGHNNGAGVSDLNLVPFNNNQSIQSKKPLSISDLSPAPMHGSNLRVAYQGVPGAYSEAAAGKAYPNCQAIPCDQFEVAFQAVELWIADRAVLPVENSLGGSIHRNYDLLLRHRLHIVGEVQLPVHHCLMALPGVRKEFLTRVISHPQGLAQCEHTLTKLGLNVAREAVDDTAGAAEFIAANNIRDTAAIASARAAEIYGLEILEDGIQDDASNVTRFVMLAREPIIPRTDRPFKTSIVFAHEKGTCVLFKVLSAFAFRNISLTKIESRPNHNVPIRLVDEANVGTAKHFEYMFYIDFEASMAESRAQNALSEVQEFTSFLRVLGSYPMDMTSWSPSSSSSSSSTFSL

SEQ ID NO: 24142 - protein, 309 aa, Arabidopsis thaliana
  peptide (1)..(309): Ceres Seq. ID no. 12371442
  misc_feature (8)..(187): Pfam Name: Prephenate dehydratase Pfam Description: Prephenate dehydratase
  misc_feature (1)..(292): Homolog of NCBI NO: 15221096 NR Description: putative chloroplast prephenate dehydratase
  misc_feature (1)..(293): Homolog of NCBI NO: 21537054 NR Description: putative P-protein: chorismate mutase, prephenate
  misc_feature (1)..(293): Homolog of NCBI NO: 15231489 NR Description: putative P-protein: chorismate mutase, prephenate
  misc_feature (1)..(293): Homolog of NCBI NO: 34394031 NR Description: putative prephenate dehydratase
  misc_feature (1)..(296): Homolog of NCBI NO: 15242928 NR Description: chorismate mutase/prephenate dehydratase-like
  misc_feature (1)..(303): Homolog of NCBI NO: 15230489 NR Description: putative chloroplast prephenate dehydratase
  misc_feature (1)..(305): Homolog of NCBI NO: 38347597 NR Description: OSJNBa0042I15.10 [Oryza sativa (japonica
  misc_feature (1)..(303): Homolog of NCBI NO: 18390869 NR Description: expressed protein
  misc_feature (1)..(309): Homolog of NCBI NO: 15226259 NR Description: putative chorismate mutase/prephenate dehydratase
  misc_feature (1)..(309): Homolog of NCBI NO: 21593283 NR Description: putative chorismate mutase/prephenate dehydratase
MHGSNLRVAYQGVPGAYSEAAAGKAYPNCQAIPCDQFEVAFQAVELWIADRAVLPVENSLGGSIHRNYDLLLRHRLHIVGEVQLPVHHCLMALPGVRKEFLTRVISHPQGLAQCEHTLTKLGLNVAREAVDDTAGAAEFIAANNIRDTAAIASARAAEIYGLEILEDGIQDDASNVTRFVMLAREPIIPRTDRPFKTSIVFAHEKGTCVLFKVLSAFAFRNISLTKIESRPNHNVPIRLVDEANVGTAKHFEYMFYIDFEASMAESRAQNALSEVQEFTSFLRVLGSYPMDMTSWSPSSSSSSSSTFSL

SEQ ID NO: 24143 - DNA, 1264 bp, Arabidopsis thaliana
  misc_feature (1)..(1264): Ceres Seq. ID no. 12357785
  misc_feature: MA Experiment ID: 108434 Result: Down-regulated in Transcription
  misc_feature: MA Experiment 108434 PARAMETER Experiment Name: At_Root_Tips_cDNA_P Parameter: Tissue Value: Root Tips
  misc_feature: MA Experiment ID: 108462 Result: Down-regulated in Transcription
  misc_feature: MA Experiment 108462 PARAMETER Experiment Name: At_Germinating_Seeds_cDNA_P Parameter: Age (day) Value: 2 vs. 0
  misc_feature: MA Experiment 108462 PARAMETER Experiment Name: At_Germinating_Seeds_cDNA_P Parameter: Tissue Value: Germinating Seeds
  misc_feature: MA Experiment ID: 108463 Result: Down-regulated in Transcription
  misc_feature: MA Experiment 108463 PARAMETER Experiment Name: At_Germinating_Seeds_cDNA_P Parameter: Age (day) Value: 3 vs. 0
  misc_feature: MA Experiment 108463 PARAMETER Experiment Name: At_Germinating_Seeds_cDNA_P Parameter: Tissue Value: Germinating Seeds
  misc_feature: MA Experiment ID: 108464 Result: Down-regulated in Transcription
  misc_feature: MA Experiment 108464 PARAMETER Experiment Name: At_Germinating_Seeds_cDNA_P Parameter: Age (day) Value: 4 vs. 0
  misc_feature: MA Experiment 108464 PARAMETER Experiment Name: At_Germinating_Seeds_cDNA_P Parameter: Tissue Value: Germinating Seeds
  misc_feature: MA Experiment ID: 108573 Result: Up-regulated in Transcription
  misc_feature: MA Experiment 108573 PARAMETER Experiment Name: At_Drought_cDNA_P Parameter: Timepoint (hr) Value: 6
  misc_feature: MA Experiment 108573 PARAMETER Experiment Name: At_Drought_cDNA_P Parameter: Tissue Value: Aerial
  misc_feature: MA Experiment 108573 PARAMETER Experiment Name: At_Drought_cDNA_P Parameter: Treatment Value: Drought vs. No Drought
  misc_feature: MA Experiment ID: 20000144 Result: Down-regulated in Transcription
  misc_feature: MA Experiment 20000144 PARAMETER Experiment Name: At_42deg_Heat_cDNA_P Parameter: Temperature (deg C) Value: 42 vs. 22
  misc_feature: MA Experiment 20000144 PARAMETER Experiment Name: At_42deg_Heat_cDNA_P Parameter: Timepoint (hr) Value: 1
  misc_feature: MA Experiment 20000144 PARAMETER Experiment Name: At_42deg_Heat_cDNA_P Parameter: Tissue Value: Aerial
  misc_feature: MA Experiment ID: 20000180 Result: Down-regulated in Transcription
  misc_feature: MA Experiment 20000180 PARAMETER Experiment Name: At_Germinating_Seeds_P Parameter: Age (hr) Value: 24 vs. 0
  misc_feature: MA Experiment 20000180 PARAMETER Experiment Name: At_Germinating_Seeds_P Parameter: Tissue Value: Germinating Seeds
  misc_feature: MA Experiment ID: 20000437 Result: Up-regulated in Transcription
  misc_feature: MA Experiment 20000437 PARAMETER Experiment Name: At_Drought_P Parameter: Age (day) Value: 8
  misc_feature: MA Experiment 20000437 PARAMETER Experiment Name: At_Drought_P Parameter: Organism Value: A. thaliana
  misc_feature: MA Experiment 20000437 PARAMETER Experiment Name: At_Drought_P Parameter: Plant Line Value: WS
  misc_feature: MA Experiment 20000437 PARAMETER Experiment Name: At_Drought_P Parameter: Timepoint (hr) Value: 24
  misc_feature: MA Experiment 20000437 PARAMETER Experiment Name: At_Drought_P Parameter: Tissue Value: Whole Plant
  misc_feature: MA Experiment 20000437 PARAMETER Experiment Name: At_Drought_P Parameter: Treatment Value: Drought vs. No Drought
  misc_feature: MA Experiment ID: 20001905 Result: Up-regulated in Transcription
  misc_feature: MA Experiment 20001905 PARAMETER Experiment Name: At_Drought_Reproduction_P Parameter: Age (day) Value: 40
  misc_feature: MA Experiment 20001905 PARAMETER Experiment Name: At_Drought_Reproduction_P Parameter: Organism Value: A. thaliana
  misc_feature: MA Experiment 20001905 PARAMETER Experiment Name: At_Drought_Reproduction_P Parameter: Plant Line Value: WS
  misc_feature: MA Experiment 20001905 PARAMETER Experiment Name: At_Drought_Reproduction_P Parameter: Timepoint (day) Value: 10
  misc_feature: MA Experiment 20001905 PARAMETER Experiment Name: At_Drought_Reproduction_P Parameter: Tissue Value: Rosettes
  misc_feature: MA Experiment 20001905 PARAMETER Experiment Name: At_Drought_Reproduction_P Parameter: Treatment Value: Drought vs. No Drought
aataataaaattcaattccataaatatttttttttttttgttctttcctctgactggaaaaagcttcctcagatcgtttcatcgtccaagcggaagaagcgtctccttcaatcaccgtggacacctccgagactgtctccgattgaatgggaattgaagacatgcattcaaaatctgacagtggtgggaacaaggttgattcagaggttcatggtacagtatcgtcgtcgataaatagtttaaacccttggcatcgtgctgctgctgcttgcaatgcaaattctagtgtggaagctggagataaatcttctaagtcaatagcattagcattggaatcaaacggttccaaatcaccatccaatagagataatactgttaacaaggaatcacaagtcacaacgtctccacaatcagctggagattatagtgataaaaaccaagaatctctgcatcatggcatcacacaacctcctcctcaccctcaacttgttggccacacagttggatgggcatcctcaaatccataccaggatccatattatgcaggagtgatgggagcctatggacatcatcccctggggtttgttccatatggtgggatgcctcattcaagaatgccactgccgcctgagatggcacaagaaccagttttcgtgaatgctaaacagtaccaggcgattctgaggcgaaggcaggcacgcgccaaggcagagctagagaagaagctaataaaatccagaaagccttatctacatgaatctcggcatcaacatgctatgaggaggccaaggggtactggaggacggtttgcaaagaaaaccaacaccgaagcttcaaagcgtaaagctgaagaaaagagcaatggtcatgttactcagtccccgtcatcatctaattctgatcaaggtgaagcttggaatggtgactatagaacacctcagggagatgagatgcagagctcagcttataagagaagggaagaaggagagtgttcagggcagcaatggaacagcctttcctcaaaccatccttctcaagctcgtctagccattaaatgacctcacaaggcggcaattcattcttggctttctctttgttggcttattcggtagcagccatgaaagagtattttctctcgtttttttttcttctgattttgtacaaatactttttgtagctttttgtgactttttccctttcagtttggaatacttcagatgttgccacttttctttttcaattctatcttaactaaacatttctc

SEQ ID NO: 24144 - protein, 303 aa, Arabidopsis thaliana [sequence omitted]

SEQ ID NO: 24145 - protein, 298 aa, Arabidopsis thaliana
  peptide (1)..(298): Ceres Seq. ID no. 12357787
  misc_feature (160)..(216): Pfam Name: CCAAT-binding transcription factor (CBF-B/NF-YA) Pfam Description: CCAAT-binding transcription factor
  misc_feature (58)..(233): Homolog of NCBI NO: 34395137 NR Description: putative transcription factor
  misc_feature (37)..(262): Homolog of NCBI NO: 38640734 NR Description: transcription factor WAPB [Triticum aestivum]
  misc_feature (4)..(236): Homolog of NCBI NO: 27552556 NR Description: putative CCAAT-binding transcription factor
  misc_feature (29)..(253): Homolog of NCBI NO: 30684143 NR Description: CCAAT box binding factor/ transcription factor
  misc_feature (29)..(253): Homolog of NCBI NO: 18416875 NR Description: CCAAT box binding factor/ transcription factor
  misc_feature (1)..(298): Homolog of NCBI NO: 7488444 NR Description: CCAAT-binding factor B chain homolog (clone
  misc_feature (1)..(298): Homolog of NCBI NO: 1173618 NR Description: CCAAT-binding factor B subunit homolog
  misc_feature (1)..(298): Homolog of NCBI NO: 1586551 NR Description: CCAAT-binding factor:SUBUNIT=B
  misc_feature (1)..(298): Homolog of NCBI NO: 9293997 NR Description: CCAAT-binding transcription factor B subunit
  misc_feature (1)..(298): Homolog of NCBI NO: 18402799 NR Description: CCAAT-binding factor B chain, putative
MHSKSDSGGNKVDSEVHGTVSSSINSLNPWHRAAAACNANSSVEAGDKSSKSIALALESNGSKSPSNRDNTVNKESQVTTSPQSAGDYSDKNQESLHHGITQPPPHPQLVGHTVGWASSNPYQDPYYAGVMGAYGHHPLGFVPYGGMPHSRMPLPPEMAQEPVFVNAKQYQAILRRRQARAKAELEKKLIKSRKPYLHESRHQHAMRRPRGTGGRFAKKTNTEASKRKAEEKSNGHVTQSPSSSNSDQGEAWNGDYRTPQGDEMQSSAYKRREEGECSGQQWNSLSSNHPSQARLAIK

SEQ ID NO: 24146 - protein, 168 aa, Arabidopsis thaliana
  peptide (1)..(168): Ceres Seq. ID no. 12357788
  misc_feature (30)..(86): Pfam Name: CCAAT-binding transcription factor (CBF-B/NF-YA) Pfam Description: CCAAT-binding transcription factor
  misc_feature (1)..(103): Homolog of NCBI NO: 34395137 NR Description: putative transcription factor
  misc_feature (1)..(132): Homolog of NCBI NO: 38640734 NR Description: transcription factor WAPB [Triticum aestivum]
  misc_feature (1)..(106): Homolog of NCBI NO: 27552556 NR Description: putative CCAAT-binding transcription factor
  misc_feature (1)..(123): Homolog of NCBI NO: 30684143 NR Description: CCAAT box binding factor/ transcription factor
  misc_feature (1)..(123): Homolog of NCBI NO: 18416875 NR Description: CCAAT box binding factor/ transcription factor
  misc_feature (1)..(168): Homolog of NCBI NO: 7488444 NR Description: CCAAT-binding factor B chain homolog (clone
  misc_feature (1)..(168): Homolog of NCBI NO: 1173618 NR Description: CCAAT-binding factor B subunit homolog
  misc_feature (1)..(168): Homolog of NCBI NO: 1586551 NR Description: CCAAT-binding factor:SUBUNIT=B
  misc_feature (1)..(168): Homolog of NCBI NO: 9293997 NR Description: CCAAT-binding transcription factor B subunit
  misc_feature (1)..(168): Homolog of NCBI NO: 18402799 NR Description: CCAAT-binding factor B chain, putative
MGAYGHHPLGFVPYGGMPHSRMPLPPEMAQEPVFVNAKQYQAILRRRQARAKAELEKKLIKSRKPYLHESRHQHAMRRPRGTGGRFAKKTNTEASKRKAEEKSNGHVTQSPSSSNSDQGEAWNGDYRTPQGDEMQSSAYKRREEGECSGQQWNSLSSNHPSQARLAIK

SEQ ID NO: 24147 - DNA, 585 bp, Arabidopsis thaliana
  misc_feature (1)..(585): Ceres Seq. ID no. 12322344
  misc_feature: MA Experiment ID: 108434 Result: Down-regulated in Transcription
  misc_feature: MA Experiment 108434 PARAMETER Experiment Name: At_Root_Tips_cDNA_P Parameter: Tissue Value: Root Tips
  misc_feature: MA Experiment ID: 108573 Result: Up-regulated in Transcription
  misc_feature: MA Experiment 108573 PARAMETER Experiment Name: At_Drought_cDNA_P Parameter: Timepoint (hr) Value: 6
  misc_feature: MA Experiment 108573 PARAMETER Experiment Name: At_Drought_cDNA_P Parameter: Tissue Value: Aerial
  misc_feature: MA Experiment 108573 PARAMETER Experiment Name: At_Drought_cDNA_P Parameter: Treatment Value: Drought vs. No Drought
  misc_feature: MA Experiment ID: 108577 Result: Up-regulated in Transcription
  misc_feature: MA Experiment 108577 PARAMETER Experiment Name: At_42deg_Heat_cDNA_P Parameter: Temperature (deg C) Value: 42 vs. 22
  misc_feature: MA Experiment 108577 PARAMETER Experiment Name: At_42deg_Heat_cDNA_P Parameter: Timepoint (hr) Value: 6
  misc_feature: MA Experiment 108577 PARAMETER Experiment Name: At_42deg_Heat_cDNA_P Parameter: Tissue Value: Aerial
  misc_feature: MA Experiment ID: 108579 Result: Up-regulated in Transcription
  misc_feature: MA Experiment 108579 PARAMETER Experiment Name: At_4deg_Cold_cDNA_P Parameter: Temperature (deg C) Value: 4 vs. 22
  misc_feature: MA Experiment 108579 PARAMETER Experiment Name: At_4deg_Cold_cDNA_P Parameter: Timepoint (hr) Value: 6
  misc_feature: MA Experiment 108579 PARAMETER Experiment Name: At_4deg_Cold_cDNA_P Parameter: Tissue Value: Aerial
  misc_feature: MA Experiment ID: 20000111 Result: Up-regulated in Transcription
  misc_feature: MA Experiment 20000111 PARAMETER Experiment Name: At_42deg_Heat_cDNA_P Parameter: Temperature (deg C) Value: 42 vs. 22
  misc_feature: MA Experiment 20000111 PARAMETER Experiment Name: At_42deg_Heat_cDNA_P Parameter: Timepoint (hr) Value: 6
  misc_feature: MA Experiment 20000111 PARAMETER Experiment Name: At_42deg_Heat_cDNA_P Parameter: Tissue Value: Aerial
  misc_feature: MA Experiment ID: 20000112 Result: Up-regulated in Transcription
  misc_feature: MA Experiment 20000112 PARAMETER Experiment Name: At_42deg_Heat_cDNA_P Parameter: Temperature (deg C) Value: 42 vs. 22
  misc_feature: MA Experiment 20000112 PARAMETER Experiment Name: At_42deg_Heat_cDNA_P Parameter: Timepoint (hr) Value: 2
  misc_feature: MA Experiment 20000112 PARAMETER Experiment Name: At_42deg_Heat_cDNA_P Parameter: Tissue Value: Aerial
  misc_feature: MA Experiment ID: 20000113 Result: Up-regulated in Transcription
  misc_feature: MA Experiment 20000113 PARAMETER Experiment Name: At_42deg_Heat_cDNA_P Parameter: Temperature (deg C) Value: 42 vs. 22
  misc_feature: MA Experiment 20000113 PARAMETER Experiment Name: At_42deg_Heat_cDNA_P Parameter: Timepoint (hr) Value: 8
  misc_feature: MA Experiment 20000113 PARAMETER Experiment Name: At_42deg_Heat_cDNA_P Parameter: Tissue Value: Aerial
  misc_feature: MA Experiment ID: 20000144 Result: Up-regulated in Transcription
  misc_feature: MA Experiment 20000144 PARAMETER Experiment Name: At_42deg_Heat_cDNA_P Parameter: Temperature (deg C) Value: 42 vs. 22
  misc_feature: MA Experiment 20000144 PARAMETER Experiment Name: At_42deg_Heat_cDNA_P Parameter: Timepoint (hr) Value: 1
  misc_feature: MA Experiment 20000144 PARAMETER Experiment Name: At_42deg_Heat_cDNA_P Parameter: Tissue Value: Aerial
  misc_feature: MA Experiment ID: 20000171 Result: Up-regulated in Transcription
  misc_feature: MA Experiment 20000171 PARAMETER Experiment Name: At_42deg_Heat_P Parameter: Age (day) Value: 14
  misc_feature: MA Experiment 20000171 PARAMETER Experiment Name: At_42deg_Heat_P Parameter: Organism Value: A. thaliana
  misc_feature: MA Experiment 20000171 PARAMETER Experiment Name: At_42deg_Heat_P Parameter: Plant Line Value: WS
  misc_feature: MA Experiment 20000171 PARAMETER Experiment Name: At_42deg_Heat_P Parameter: Temperature (deg C) Value: 42 vs. 22
  misc_feature: MA Experiment 20000171 PARAMETER Experiment Name: At_42deg_Heat_P Parameter: Timepoint (hr) Value: 1
  misc_feature: MA Experiment 20000171 PARAMETER Experiment Name: At_42deg_Heat_P Parameter: Tissue Value: Aerial
  misc_feature: MA Experiment ID: 20000173 Result: Up-regulated in Transcription
  misc_feature: MA Experiment 20000173 PARAMETER Experiment Name: At_42deg_Heat_P Parameter: Age (day) Value: 14
  misc_feature: MA Experiment 20000173 PARAMETER Experiment Name: At_42deg_Heat_P Parameter: Organism Value: A. thaliana
  misc_feature: MA Experiment 20000173 PARAMETER Experiment Name: At_42deg_Heat_P Parameter: Plant Line Value: WS
  misc_feature: MA Experiment 20000173 PARAMETER Experiment Name: At_42deg_Heat_P Parameter: Temperature (deg C) Value: 42 vs. 22
  misc_feature: MA Experiment 20000173 PARAMETER Experiment Name: At_42deg_Heat_P Parameter: Timepoint (hr) Value: 6
  misc_feature: MA Experiment 20000173 PARAMETER Experiment Name: At_42deg_Heat_P Parameter: Tissue Value: Aerial
  misc_feature: MA Experiment ID: 20000224 Result: Down-regulated in Transcription
  misc_feature: MA Experiment ID: 20000437 Result: Up-regulated in Transcription
  misc_feature: MA Experiment 20000437 PARAMETER Experiment Name: At_Drought_P Parameter: Age (day) Value: 8
  misc_feature: MA Experiment 20000437 PARAMETER Experiment Name: At_Drought_P Parameter: Organism Value: A. thaliana
  misc_feature: MA Experiment 20000437 PARAMETER Experiment Name: At_Drought_P Parameter: Plant Line Value: WS
  misc_feature: MA Experiment 20000437 PARAMETER Experiment Name: At_Drought_P Parameter: Timepoint (hr) Value: 24
  misc_feature: MA Experiment 20000437 PARAMETER Experiment Name: At_Drought_P Parameter: Tissue Value: Whole Plant
  misc_feature: MA Experiment 20000437 PARAMETER Experiment Name: At_Drought_P Parameter: Treatment Value: Drought vs. No Drought
  misc_feature: MA Experiment ID: 20001557 Result: Down-regulated in Transcription
  misc_feature: MA Experiment 20001557 PARAMETER Experiment Name: At_Drought_Soil_Dry_P Parameter: Age (day) Value: 27
  misc_feature: MA Experiment 20001557 PARAMETER Experiment Name: At_Drought_Soil_Dry_P Parameter: Organism Value: A. thaliana
  misc_feature: MA Experiment 20001557 PARAMETER Experiment Name: At_Drought_Soil_Dry_P Parameter: Plant Line Value: WS
  misc_feature: MA Experiment 20001557 PARAMETER Experiment Name: At_Drought_Soil_Dry_P Parameter: Post Timepoint (hr) Value: 3
  misc_feature: MA Experiment 20001557 PARAMETER Experiment Name: At_Drought_Soil_Dry_P Parameter: Post-Treatment Value: Re-Water vs. No Drought
  misc_feature: MA Experiment 20001557 PARAMETER Experiment Name: At_Drought_Soil_Dry_P Parameter: Timepoint (day) Value: 13
  misc_feature: MA Experiment 20001557 PARAMETER Experiment Name: At_Drought_Soil_Dry_P Parameter: Treatment Value: Drought vs. No Drought
  misc_feature: MA Experiment ID: 20001905 Result: Up-regulated in Transcription
  misc_feature: MA Experiment 20001905 PARAMETER Experiment Name: At_Drought_Reproduction_P Parameter: Age (day) Value: 40
  misc_feature: MA Experiment 20001905 PARAMETER Experiment Name: At_Drought_Reproduction_P Parameter: Organism Value: A. thaliana
  misc_feature: MA Experiment 20001905 PARAMETER Experiment Name: At_Drought_Reproduction_P Parameter: Plant Line Value: WS
  misc_feature: MA Experiment 20001905 PARAMETER Experiment Name: At_Drought_Reproduction_P Parameter: Timepoint (day) Value: 10
  misc_feature: MA Experiment 20001905 PARAMETER Experiment Name: At_Drought_Reproduction_P Parameter: Tissue Value: Rosettes
  misc_feature: MA Experiment 20001905 PARAMETER Experiment Name: At_Drought_Reproduction_P Parameter: Treatment Value: Drought vs. No Drought
  misc_feature: MA Experiment ID: 20001911 Result: Up-regulated in Transcription
  misc_feature: MA Experiment 20001911 PARAMETER Experiment Name: At_Drought_Reproduction_P Parameter: Age (day) Value: 40
  misc_feature: MA Experiment 20001911 PARAMETER Experiment Name: At_Drought_Reproduction_P Parameter: Organism Value: A. thaliana
  misc_feature: MA Experiment 20001911 PARAMETER Experiment Name: At_Drought_Reproduction_P Parameter: Plant Line Value: WS
  misc_feature: MA Experiment 20001911 PARAMETER Experiment Name: At_Drought_Reproduction_P Parameter: Timepoint (day) Value: 10
  misc_feature: MA Experiment 20001911 PARAMETER Experiment Name: At_Drought_Reproduction_P Parameter: Tissue Value: Flowers
  misc_feature: MA Experiment 20001911 PARAMETER Experiment Name: At_Drought_Reproduction_P Parameter: Treatment Value: Drought vs. No Drought
gttattgaaaaaaaattcccagattctataaaaaagagaaatgcaaacatttgctcctggaacaagagtctaccacctcatcatcatcgtcttcttcttcttcttcttcttctgcttatcatcgttcttcgcttcaatcgtcatggctgatgaatataccggagaagcaacgggatcgtcggaagcaaaggttcacatcatctacaccgagaaacctaccgatgaagaacctaaaacctatcatctccgtaccctttcctctgctctcggcagtgaggaagctgcaaaagatgctttgatttacagttacaaggaagctgcttctggtttttcagctaagctcactcctgagcaagtcgctgagatatcaaaacaaccaggtgtgattcaagttgtgccaagccagacttatcagctgcacaaacctggtggtggtggtggtttcaagttgacctaacttgactttgtgtattctctacttctcaactaaacctgttgctttacagaaactagtctgttgttgtattgttgtgactttgaaccaagtatctaactaaaataatgttatgaagttgctttgattcc

SEQ ID NO: 24148 - protein, 138 aa, Arabidopsis thaliana
  peptide (1)..(138): Ceres Seq. ID no. 12322345
  misc_feature (50)..(127): Pfam Name: Subtilisin N-terminal Region Pfam Description: Subtilisin N-terminal Region
  misc_feature (43)..(126): Homolog of NCBI NO: 25289836 NR Description: hypothetical protein F9L11.12 - Arabidopsis
  misc_feature (18)..(126): Homolog of NCBI NO: 4115919 NR Description: similar to the subtilase family of serine
  misc_feature (26)..(126): Homolog of NCBI NO: 18413349 NR Description: subtilisin-like serine protease; protein id:
  misc_feature (20)..(126): Homolog of NCBI NO: 18416719 NR Description: subtilisin-like serine protease; protein id:
  misc_feature (31)..(126): Homolog of NCBI NO: 28376696 NR Description: putative Pi starvation induced protein
  misc_feature (27)..(124): Homolog of NCBI NO: 34394844 NR Description: unknown protein [Oryza sativa (japonica
  misc_feature (46)..(127): Homolog of NCBI NO: 7489176 NR Description: pit2 protein (clone pAL141), Pi starvation
  misc_feature (23)..(127): Homolog of NCBI NO: 3204125 NR Description: putative Pi starvation-induced protein [Cicer
  misc_feature (1)..(138): Homolog of NCBI NO: 18409953 NR Description: expressed protein
  misc_feature (1)..(138): Homolog of NCBI NO: 21593285 NR Description: unknown [Arabidopsis thaliana]
MQTFAPGTRVYHLIIIVFFFFFFFCLSSFFASIVMADEYTGEATGSSEAKVHIIYTEKPTDEEPKTYHLRTLSSALGSEEAAKDALIYSYKEAASGFSAKLTPEQVAEISKQPGVIQVVPSQTYQLHKPGGGGGFKLT

SEQ ID NO: 24149 - protein, 104 aa, Arabidopsis thaliana
  peptide (1)..(104): Ceres Seq. ID no. 12322346
  misc_feature (16)..(93): Pfam Name: Subtilisin N-terminal Region Pfam Description: Subtilisin N-terminal Region
  misc_feature (1)..(93): Homolog of NCBI NO: 3204125 NR Description: putative Pi starvation-induced protein [Cicer
  misc_feature (1)..(104): Homolog of NCBI NO: 18409953 NR Description: expressed protein
  misc_feature (1)..(92): Homolog of NCBI NO: 4115919 NR Description: similar to the subtilase family of serine
  misc_feature (1)..(92): Homolog of NCBI NO: 18416719 NR Description: subtilisin-like serine protease; protein id:
  misc_feature (1)..(90): Homolog of NCBI NO: 34394844 NR Description: unknown protein [Oryza sativa (japonica
  misc_feature (12)..(93): Homolog of NCBI NO: 7489176 NR Description: pit2 protein (clone pAL141), Pi starvation
  misc_feature (1)..(92): Homolog of NCBI NO: 28376696 NR Description: putative Pi starvation induced protein
  misc_feature (1)..(92): Homolog of NCBI NO: 18413349 NR Description: subtilisin-like serine protease; protein id:
  misc_feature (9)..(92): Homolog of NCBI NO: 25289836 NR Description: hypothetical protein F9L11.12 - Arabidopsis
  misc_feature (1)..(104): Homolog of NCBI NO: 21593285 NR Description: unknown [Arabidopsis thaliana]
MADEYTGEATGSSEAKVHIIYTEKPTDEEPKTYHLRTLSSALGSEEAAKDALIYSYKEAASGFSAKLTPEQVAEISKQPGVIQVVPSQTYQLHKPGGGGGFKLT

SEQ ID NO: 24150 - DNA, 1724 bp, Arabidopsis thaliana
  misc_feature (1)..(1724): Ceres Seq. ID no. 13486737
  misc_feature: MA Experiment ID: 108434 Result: Down-regulated in Transcription
  misc_feature: MA Experiment 108434 PARAMETER Experiment Name: At_Root_Tips_cDNA_P Parameter: Tissue Value: Root Tips
  misc_feature: MA Experiment ID: 108469 Result: Up-regulated in Transcription
  misc_feature: MA Experiment ID: 108488 Result: Down-regulated in Transcription
  misc_feature: MA Experiment ID: 108561 Result: Up-regulated in Transcription
  misc_feature: MA Experiment 108561 PARAMETER Experiment Name: At_100uM_ABA_cDNA_P Parameter: Timepoint (hr) Value: 6
  misc_feature: MA Experiment 108561 PARAMETER Experiment Name: At_100uM_ABA_cDNA_P Parameter: Tissue Value: Aerial
  misc_feature: MA Experiment 108561 PARAMETER Experiment Name: At_100uM_ABA_cDNA_P Parameter: Treatment Value: 100uM ABA vs. No Treatment
  misc_feature: MA Experiment ID: 108573 Result: Up-regulated in Transcription
  misc_feature: MA Experiment 108573 PARAMETER Experiment Name: At_Drought_cDNA_P Parameter: Timepoint (hr) Value: 6
  misc_feature: MA Experiment 108573 PARAMETER Experiment Name: At_Drought_cDNA_P Parameter: Tissue Value: Aerial
  misc_feature: MA Experiment 108573 PARAMETER Experiment Name: At_Drought_cDNA_P Parameter: Treatment Value: Drought vs. No Drought
  misc_feature: MA Experiment ID: 108579 Result: Down-regulated in Transcription
  misc_feature: MA Experiment 108579 PARAMETER Experiment Name: At_4deg_Cold_cDNA_P Parameter: Temperature (deg C) Value: 4 vs. 22
  misc_feature: MA Experiment 108579 PARAMETER Experiment Name: At_4deg_Cold_cDNA_P Parameter: Timepoint (hr) Value: 6
  misc_feature: MA Experiment 108579 PARAMETER Experiment Name: At_4deg_Cold_cDNA_P Parameter: Tissue Value: Aerial
  misc_feature: MA Experiment ID: 108668 Result: Up-regulated in Transcription
  misc_feature: MA Experiment 108668 PARAMETER Experiment Name: At_2mM_SA_cDNA_P Parameter: Plant Line Value: WS
  misc_feature: MA Experiment 108668 PARAMETER Experiment Name: At_2mM_SA_cDNA_P Parameter: Timepoint (hr) Value: 6
  misc_feature: MA Experiment 108668 PARAMETER Experiment Name: At_2mM_SA_cDNA_P Parameter: Treatment Value: 2mM SA vs. No Treatment
  misc_feature: MA Experiment ID: 20000069 Result: Up-regulated in Transcription
  misc_feature: MA Experiment 20000069 PARAMETER Experiment Name: At_100uM_ABA_Mutants_cDNA_P Parameter: Plant Line Value: CS23
  misc_feature: MA Experiment 20000069 PARAMETER Experiment Name: At_100uM_ABA_Mutants_cDNA_P Parameter: Timepoint (hr) Value: 6
  misc_feature: MA Experiment 20000069 PARAMETER Experiment Name: At_100uM_ABA_Mutants_cDNA_P Parameter: Tissue Value: Aerial
  misc_feature: MA Experiment 20000069 PARAMETER Experiment Name: At_100uM_ABA_Mutants_cDNA_P Parameter: Treatment Value: 100uM ABA vs. No Treatment
  misc_feature: MA Experiment ID: 20000070 Result: Up-regulated in Transcription
  misc_feature: MA Experiment 20000070 PARAMETER Experiment Name: At_100uM_ABA_Mutants_cDNA_P Parameter: Plant Line Value: CS24
  misc_feature: MA Experiment 20000070 PARAMETER Experiment Name: At_100uM_ABA_Mutants_cDNA_P Parameter: Timepoint (hr) Value: 6
  misc_feature: MA Experiment 20000070 PARAMETER Experiment Name: At_100uM_ABA_Mutants_cDNA_P Parameter: Tissue Value: Aerial
  misc_feature: MA Experiment 20000070 PARAMETER Experiment Name: At_100uM_ABA_Mutants_cDNA_P Parameter: Treatment Value: 100uM ABA vs. No Treatment
  misc_feature: MA Experiment ID: 20000071 Result: Up-regulated in Transcription
  misc_feature: MA Experiment 20000071 PARAMETER Experiment Name: At_100uM_ABA_Mutants_cDNA_P Parameter: Plant Line Value: CS8104
  misc_feature: MA Experiment 20000071 PARAMETER Experiment Name: At_100uM_ABA_Mutants_cDNA_P Parameter: Timepoint (hr) Value: 6
  misc_feature: MA Experiment 20000071 PARAMETER Experiment Name: At_100uM_ABA_Mutants_cDNA_P Parameter: Tissue Value: Aerial
  misc_feature: MA Experiment 20000071 PARAMETER Experiment Name: At_100uM_ABA_Mutants_cDNA_P Parameter: Treatment Value: 100uM ABA vs. No Treatment
  misc_feature: MA Experiment ID: 20000072 Result: Up-regulated in Transcription
  misc_feature: MA Experiment 20000072 PARAMETER Experiment Name: At_100uM_ABA_Mutants_cDNA_P Parameter: Plant Line Value: CS8105
  misc_feature: MA Experiment 20000072 PARAMETER Experiment Name: At_100uM_ABA_Mutants_cDNA_P Parameter: Timepoint (hr) Value: 6
  misc_feature: MA Experiment 20000072 PARAMETER Experiment Name: At_100uM_ABA_Mutants_cDNA_P Parameter: Tissue Value: Aerial
  misc_feature: MA Experiment 20000072 PARAMETER Experiment Name: At_100uM_ABA_Mutants_cDNA_P Parameter: Treatment Value: 100uM ABA vs. No Treatment
  misc_feature: MA Experiment ID: 20000086 Result: Up-regulated in Transcription
  misc_feature: MA Experiment 20000086 PARAMETER Experiment Name: At_100uM_ABA_Mutants_cDNA_P Parameter: Plant Line Value: CS22
  misc_feature: MA Experiment 20000086 PARAMETER Experiment Name: At_100uM_ABA_Mutants_cDNA_P Parameter: Timepoint (hr) Value: 6
  misc_feature: MA Experiment 20000086 PARAMETER Experiment Name: At_100uM_ABA_Mutants_cDNA_P Parameter: Tissue Value: Aerial
  misc_feature: MA Experiment 20000086 PARAMETER Experiment Name: At_100uM_ABA_Mutants_cDNA_P Parameter: Treatment Value: 100uM ABA vs. No Treatment
  misc_feature: MA Experiment ID: 20000087 Result: Up-regulated in Transcription
  misc_feature: MA Experiment 20000087 PARAMETER Experiment Name: At_100uM_ABA_Mutants_cDNA_P Parameter: Plant Line Value: WS
  misc_feature: MA Experiment 20000087 PARAMETER Experiment Name: At_100uM_ABA_Mutants_cDNA_P Parameter: Timepoint (hr) Value: 6
  misc_feature: MA Experiment 20000087 PARAMETER Experiment Name: At_100uM_ABA_Mutants_cDNA_P Parameter: Tissue Value: Aerial
  misc_feature: MA Experiment 20000087 PARAMETER Experiment Name: At_100uM_ABA_Mutants_cDNA_P Parameter: Treatment Value: 100uM ABA vs. No Treatment
  misc_feature: MA Experiment ID: 20000088 Result: Up-regulated in Transcription
  misc_feature: MA Experiment 20000088 PARAMETER Experiment Name: At_100uM_ABA_Mutants_cDNA_P Parameter: Plant Line Value: Landsberg
  misc_feature: MA Experiment 20000088 PARAMETER Experiment Name: At_100uM_ABA_Mutants_cDNA_P Parameter: Timepoint (hr) Value: 6
  misc_feature: MA Experiment 20000088 PARAMETER Experiment Name: At_100uM_ABA_Mutants_cDNA_P Parameter: Tissue Value: Aerial
  misc_feature: MA Experiment 20000088 PARAMETER Experiment Name: At_100uM_ABA_Mutants_cDNA_P Parameter: Treatment Value: 100uM ABA vs. No Treatment
  misc_feature: MA Experiment ID: 20000090 Result: Up-regulated in Transcription
  misc_feature: MA Experiment ID: 20000111 Result: Down-regulated in Transcription
  misc_feature: MA Experiment 20000111 PARAMETER Experiment Name: At_42deg_Heat_cDNA_P Parameter: Temperature (deg C) Value: 42 vs. 22
  misc_feature: MA Experiment 20000111 PARAMETER Experiment Name: At_42deg_Heat_cDNA_P Parameter: Timepoint (hr) Value: 6
  misc_feature: MA Experiment 20000111 PARAMETER Experiment Name: At_42deg_Heat_cDNA_P Parameter: Tissue Value: Aerial
  misc_feature: MA Experiment ID: 20000113 Result: Down-regulated in Transcription
  misc_feature: MA Experiment 20000113 PARAMETER Experiment Name: At_42deg_Heat_cDNA_P Parameter: Temperature (deg C) Value: 42 vs. 22
  misc_feature: MA Experiment 20000113 PARAMETER Experiment Name: At_42deg_Heat_cDNA_P Parameter: Timepoint (hr) Value: 8
  misc_feature: MA Experiment 20000113 PARAMETER Experiment Name: At_42deg_Heat_cDNA_P Parameter: Tissue Value: Aerial
  misc_feature: MA Experiment ID: 20000117 Result: Up-regulated in Transcription
  misc_feature: MA Experiment 20000117 PARAMETER Experiment Name: At_100uM_ABA_Mutants_cDNA_P Parameter: Plant Line Value: Columbia
  misc_feature: MA Experiment 20000117 PARAMETER Experiment Name: At_100uM_ABA_Mutants_cDNA_P Parameter: Timepoint (hr) Value: 6
  misc_feature: MA Experiment 20000117 PARAMETER Experiment Name: At_100uM_ABA_Mutants_cDNA_P Parameter: Tissue Value: Aerial
  misc_feature: MA Experiment 20000117 PARAMETER Experiment Name: At_100uM_ABA_Mutants_cDNA_P Parameter: Treatment Value: 100uM ABA vs. No Treatment
  misc_feature: MA Experiment ID: 20000169 Result: Up-regulated in Transcription
  misc_feature: MA Experiment 20000169 PARAMETER Experiment Name: At_100uM_ABA_P Parameter: Age (day) Value: 14
  misc_feature: MA Experiment 20000169 PARAMETER Experiment Name: At_100uM_ABA_P Parameter: Organism Value: A. thaliana
  misc_feature: MA Experiment 20000169 PARAMETER Experiment Name: At_100uM_ABA_P Parameter: Plant Line Value: WS
  misc_feature: MA Experiment 20000169 PARAMETER Experiment Name: At_100uM_ABA_P Parameter: Timepoint (hr) Value: 6
  misc_feature: MA Experiment 20000169 PARAMETER Experiment Name: At_100uM_ABA_P Parameter: Tissue Value: Aerial
  misc_feature: MA Experiment 20000169 PARAMETER Experiment Name: At_100uM_ABA_P Parameter: Treatment Value: 100uM ABA vs. No Treatment
  misc_feature: MA Experiment ID: 20000173 Result: Down-regulated in Transcription
  misc_feature: MA Experiment 20000173 PARAMETER Experiment Name: At_42deg_Heat_P Parameter: Age (day) Value: 14
  misc_feature: MA Experiment 20000173 PARAMETER Experiment Name: At_42deg_Heat_P Parameter: Organism Value: A. thaliana
  misc_feature: MA Experiment 20000173 PARAMETER Experiment Name: At_42deg_Heat_P Parameter: Plant Line Value: WS
  misc_feature: MA Experiment 20000173 PARAMETER Experiment Name: At_42deg_Heat_P Parameter: Temperature (deg C) Value: 42 vs. 22
  misc_feature: MA Experiment 20000173 PARAMETER Experiment Name: At_42deg_Heat_P Parameter: Timepoint (hr) Value: 6
  misc_feature: MA Experiment 20000173 PARAMETER Experiment Name: At_42deg_Heat_P Parameter: Tissue Value: Aerial
  misc_feature: MA Experiment ID: 20000179 Result: Up-regulated in Transcription
  misc_feature: MA Experiment 20000179 PARAMETER Experiment Name: At_Germinating_Seeds_P Parameter: Age (hr) Value: 6 vs. 0
  misc_feature: MA Experiment 20000179 PARAMETER Experiment Name: At_Germinating_Seeds_P Parameter: Tissue Value: Germinating Seeds
  misc_feature: MA Experiment ID: 20000180 Result: Up-regulated in Transcription
  misc_feature: MA Experiment 20000180 PARAMETER Experiment Name: At_Germinating_Seeds_P Parameter: Age (hr) Value: 24 vs. 0
  misc_feature: MA Experiment 20000180 PARAMETER Experiment Name: At_Germinating_Seeds_P Parameter: Tissue Value: Germinating Seeds
  misc_feature: MA Experiment ID: 20000182 Result: Up-regulated in Transcription
  misc_feature: MA Experiment 20000182 PARAMETER Experiment Name: At_2mM_SA_P Parameter: Age (day) Value: 14
  misc_feature: MA Experiment 20000182 PARAMETER Experiment Name: At_2mM_SA_P Parameter: Organism Value: A. thaliana
  misc_feature: MA Experiment 20000182 PARAMETER Experiment Name: At_2mM_SA_P Parameter: Plant Line Value: WS
  misc_feature: MA Experiment 20000182 PARAMETER Experiment Name: At_2mM_SA_P Parameter: Timepoint (hr) Value: 6
  misc_feature: MA Experiment 20000182 PARAMETER Experiment Name: At_2mM_SA_P Parameter: Tissue Value: Aerial
  misc_feature: MA Experiment 20000182 PARAMETER Experiment Name: At_2mM_SA_P Parameter: Treatment Value: 2mM SA vs. No Treatment
  misc_feature: MA Experiment ID: 20000184 Result: Down-regulated in Transcription
  misc_feature: MA Experiment 20000184 PARAMETER Experiment Name: At_Shoots__P Parameter: Age (day) Value: 7
  misc_feature: MA Experiment 20000184 PARAMETER Experiment Name: At_Shoots__P Parameter: Tissue Value: Shoots vs. Whole Plant
  misc_feature: MA Experiment ID: 20000185 Result: Up-regulated in Transcription
  misc_feature: MA Experiment 20000185 PARAMETER Experiment Name: At_Roots__P Parameter: Age (day) Value: 7 vs. 21
  misc_feature: MA Experiment 20000185 PARAMETER Experiment Name: At_Roots__P Parameter: Organism Value: A. thaliana
  misc_feature: MA Experiment 20000185 PARAMETER Experiment Name: At_Roots__P Parameter: Tissue Value: Roots vs. Whole Plant
  misc_feature: MA Experiment ID: 20000264 Result: Up-regulated in Transcription
  misc_feature: MA Experiment 20000264 PARAMETER Experiment Name: At_Open_Flower_P Parameter: Age (day) Value: 21
  misc_feature: MA Experiment 20000264 PARAMETER Experiment Name: At_Open_Flower_P Parameter: Plant Line Value: WS
  misc_feature: MA Experiment 20000264 PARAMETER Experiment Name: At_Open_Flower_P Parameter: Tissue Value: Open Flower vs. Whole Plant
  misc_feature: MA Experiment ID: 20000438 Result: Down-regulated in Transcription
  misc_feature: MA Experiment 20000438 PARAMETER Experiment Name: At_Shoots__P Parameter: Age (day) Value: 14
  misc_feature: MA Experiment 20000438 PARAMETER Experiment Name: At_Shoots__P Parameter: Tissue Value: Shoots vs. Whole Plant
  misc_feature: MA Experiment ID: 20000495 Result: Up-regulated in Transcription
  misc_feature: MA Experiment 20000495 PARAMETER Experiment Name: At_Guard_Cells_P Parameter: Harvest Date Value: 8/2/2002
  misc_feature: MA Experiment 20000495 PARAMETER Experiment Name: At_Guard_Cells_P Parameter: Organism Value: A. thaliana
  misc_feature: MA Experiment 20000495 PARAMETER Experiment Name: At_Guard_Cells_P Parameter: Tissue Value: Guard Cells vs. Leaves
  misc_feature: MA Experiment ID: 20000794 Result: Up-regulated in Transcription
  misc_feature: MA Experiment 20000794 PARAMETER Experiment Name: At_Petals_P Parameter: Age (day) Value: 23-25 days
  misc_feature: MA Experiment 20000794 PARAMETER Experiment Name: At_Petals_P Parameter: Plant Line Value: WS
  misc_feature: MA Experiment 20000794 PARAMETER Experiment Name: At_Petals_P Parameter: Tissue Value: Petals vs. Whole plant
  misc_feature: MA Experiment ID: 20001757 Result: Down-regulated in Transcription
  misc_feature: MA Experiment 20001757 PARAMETER Experiment Name: At_50mM_NH4NO3_L-to-H_P Parameter: Timepoint (hr) Value: 6
  misc_feature: MA Experiment 20001757 PARAMETER Experiment Name: At_50mM_NH4NO3_L-to-H_P Parameter: Tissue Value: Leaf
  misc_feature: MA Experiment 20001757 PARAMETER Experiment Name: At_50mM_NH4NO3_L-to-H_P Parameter: Treatment Value: 50mM NH4NO3 vs 100mM Mannitol
  misc_feature: MA Experiment ID: 20001904 Result: Up-regulated in Transcription
  misc_feature: MA Experiment 20001904 PARAMETER Experiment Name: At_Drought_Reproduction_P Parameter: Age (day) Value: 37
  misc_feature: MA Experiment 20001904 PARAMETER Experiment Name: At_Drought_Reproduction_P Parameter: Organism Value: A. thaliana
  misc_feature: MA Experiment 20001904 PARAMETER Experiment Name: At_Drought_Reproduction_P Parameter: Plant Line Value: WS
  misc_feature: MA Experiment 20001904 PARAMETER Experiment Name: At_Drought_Reproduction_P Parameter: Timepoint (day) Value: 7
  misc_feature: MA Experiment 20001904 PARAMETER Experiment Name: At_Drought_Reproduction_P Parameter: Tissue Value: Rosettes
  misc_feature: MA Experiment 20001904 PARAMETER Experiment Name: At_Drought_Reproduction_P Parameter: Treatment Value: Drought vs. No Drought
  misc_feature: MA Experiment ID: 20001905 Result: Up-regulated in Transcription
  misc_feature: MA Experiment 20001905 PARAMETER Experiment Name: At_Drought_Reproduction_P Parameter: Age (day) Value: 40
  misc_feature: MA Experiment 20001905 PARAMETER Experiment Name: At_Drought_Reproduction_P Parameter: Organism Value: A. thaliana
  misc_feature: MA Experiment 20001905 PARAMETER Experiment Name: At_Drought_Reproduction_P Parameter: Plant Line Value: WS
  misc_feature: MA Experiment 20001905 PARAMETER Experiment Name: At_Drought_Reproduction_P Parameter: Timepoint (day) Value: 10
  misc_feature: MA Experiment 20001905 PARAMETER Experiment Name: At_Drought_Reproduction_P Parameter: Tissue Value: Rosettes
  misc_feature: MA Experiment 20001905 PARAMETER Experiment Name: At_Drought_Reproduction_P Parameter: Treatment Value: Drought vs. No Drought
  misc_feature: MA Experiment ID: 20001906 Result: Up-regulated in Transcription
  misc_feature: MA Experiment 20001906 PARAMETER Experiment Name: At_Drought_Reproduction_P Parameter: Age (day) Value: 35
  misc_feature: MA Experiment 20001906 PARAMETER Experiment Name: At_Drought_Reproduction_P Parameter: Organism Value: A. thaliana
  misc_feature: MA Experiment 20001906 PARAMETER Experiment Name: At_Drought_Reproduction_P Parameter: Plant Line Value: WS
  misc_feature: MA Experiment 20001906 PARAMETER Experiment Name: At_Drought_Reproduction_P Parameter: Timepoint (day) Value: 5
  misc_feature: MA Experiment 20001906 PARAMETER Experiment Name: At_Drought_Reproduction_P Parameter: Tissue Value: Siliques
  misc_feature: MA Experiment 20001906 PARAMETER Experiment Name: At_Drought_Reproduction_P Parameter: Treatment Value: Drought vs. No Drought
  misc_feature: MA Experiment ID: 20001908 Result: Up-regulated in Transcription
  misc_feature: MA Experiment 20001908 PARAMETER Experiment Name: At_Drought_Reproduction_P Parameter: Age (day) Value: 40
  misc_feature: MA Experiment 20001908 PARAMETER Experiment Name: At_Drought_Reproduction_P Parameter: Organism Value: A. thaliana
  misc_feature: MA Experiment 20001908 PARAMETER Experiment Name: At_Drought_Reproduction_P Parameter: Plant Line Value: WS
  misc_feature: MA Experiment 20001908 PARAMETER Experiment Name: At_Drought_Reproduction_P Parameter: Timepoint (day) Value: 10
  misc_feature: MA Experiment 20001908 PARAMETER Experiment Name: At_Drought_Reproduction_P Parameter: Tissue Value: Siliques
  misc_feature: MA Experiment 20001908 PARAMETER Experiment Name: At_Drought_Reproduction_P Parameter: Treatment Value: Drought vs. No Drought
  misc_feature: MA Experiment ID: 20001911 Result: Up-regulated in Transcription
  misc_feature: MA Experiment 20001911 PARAMETER Experiment Name: At_Drought_Reproduction_P Parameter: Age (day) Value: 40
  misc_feature: MA Experiment 20001911 PARAMETER Experiment Name: At_Drought_Reproduction_P Parameter: Organism Value: A. thaliana
  misc_feature: MA Experiment 20001911 PARAMETER Experiment Name: At_Drought_Reproduction_P Parameter: Plant Line Value: WS
  misc_feature: MA Experiment 20001911 PARAMETER Experiment Name: At_Drought_Reproduction_P Parameter: Timepoint (day) Value: 10
  misc_feature: MA Experiment 20001911 PARAMETER Experiment Name: At_Drought_Reproduction_P Parameter: Tissue Value: Flowers
  misc_feature: MA Experiment 20001911 PARAMETER Experiment Name: At_Drought_Reproduction_P Parameter: Treatment Value: Drought vs. No Drought
gtcctttttttcttggtttctgaaacataatttcttagaggcggtctgctgcgaaagatccttcctctcacaaccatctctgttcgatagatccaaccaaaaaccgcatcgattttccattcacacggcactgaatgatgatgacttggaggagagcttctcaagtttgtagctgtcgattgttaaatattttcttgtttcttcttgtccagatttcacatataactcaaggaaacaatgttccctctccaataccagttggtgcaaggcatgtgatttgattttttttcaatttcatttaacttatcgaaatttttttaaaaagtatctaaccaaatgcaatagaaaacaaaatatgtgacgacaaatataaaaagtgtttttattaaagataacattaaagaaaacaaaaaggtatttaaagctaactaaaacacgtcattaagagtcatgtagataattgtgaaattgcatgccgttgacataaatttcgtaacaaaagaaaaaacagaacacagaatcttgttctcccaccgatcaccaccggagatatggaatcgccgattactcaaccccaaatgtttagattgcagtttcttcgtcttcttcatagtcgacgatcaccccaagttccattaatagccgattcttcaaatcctatcgagaatcctctctttcaagctgatgttccttctaccagcaatagagtcttgtccaaaagaaaacattggtaagttaaaagatatgcttaaagaagaaaacattcatttgcacactgaggattcagagcaagggaaattacctttgcttattttaagcttgaaagagagaagtgaagaaaaaaggccagcgattgtgtttatgcatggcacaaacacaaacaaagaatggttaaggccatggcttgaagcatatgcttcgcggggatatgtagccatcggtttagactctcgttaccacggtgaacgtgctgattgcaaaactgcatatcgagatgctcttatatcatcttggagaaatggaaacactatgccttttatctttgatactgtatgggatttgatcaaactagctgaatatcttactcagagggatgatatagacccgaaaaagataggaatcaccggtatttcgctaggagggatgcatgcttggtttgctgctgcagctgacactcgctattccgtggttgtcccattaatcggtgttcagggttttagatgggcaatagagaatgatgagtgggaagcaagagtcaacagtatcaaacctttatttgaagaagcaaggattgatctcggaaagaacataatcgacaaagaactagtcgagaaggtgtggaacagaatagctcctggcctagcttcgaagtttgattcaccgtactcattaccagtgattgctccacggcctctttacatccttaacggcgcaaatgatcctcgatgtcctcttggcggactagaacttgcgttaaagagagctgaaaaggcgtataaggaaacagcttctcctggaaacttcaagttcaaagcagaagatggagttggacacgaagcgacgagtttcatgatcaaagaatcatcagactggtttgacaaattccttaaacaagaagatatgacaacttgacagattgtaatattgtgaactaataaagaagaatcatcttcttctcgttaataatgtattcactctcgcaaatcaatatcattacaaatttc

SEQ ID NO: 24151 - protein, 315 aa, Arabidopsis thaliana
  peptide (1)..(315): Ceres Seq. ID no. 13486738
  misc_feature (6)..(79): Homolog of NCBI NO: 34898368 NR Description: ESTs C19441(E10423),C99201(E10423) correspond to
  misc_feature (98)..(308): Homolog of NCBI NO: 34898368 NR Description: ESTs C19441(E10423),C99201(E10423) correspond to
  misc_feature (6)..(315): Homolog of NCBI NO: 30689997 NR Description: expressed protein [Arabidopsis thaliana]
MFLLPAIESCPKENIGKLKDMLKEENIHLHTEDSEQGKLPLLILSLKERSEEKRPAIVFMHGTNTNKEWLRPWLEAYASRGYVAIGLDSRYHGERADCKTAYRDALISSWRNGNTMPFIFDTVWDLIKLAEYLTQRDDIDPKKIGITGISLGGMHAWFAAAADTRYSVVVPLIGVQGFRWAIENDEWEARVNSIKPLFEEARIDLGKNIIDKELVEKVWNRIAPGLASKFDSPYSLPVIAPRPLYILNGANDPRCPLGGLELALKRAEKAYKETASPGNFKFKAEDGVGHEATSFMIKESSDWFDKFLKQEDMTT

SEQ ID NO: 24152 - protein, 295 aa, Arabidopsis thaliana
  peptide (1)..(295): Ceres Seq. ID no. 13486739
  misc_feature (1)..(59): Homolog of NCBI NO: 34898368 NR Description: ESTs C19441(E10423),C99201(E10423) correspond to
  misc_feature (78)..(288): Homolog of NCBI NO: 34898368 NR Description: ESTs C19441(E10423),C99201(E10423) correspond to
  misc_feature (1)..(295): Homolog of NCBI NO: 30689997 NR Description: expressed protein [Arabidopsis thaliana]
MLKEENIHLHTEDSEQGKLPLLILSLKERSEEKRPAIVFMHGTNTNKEWLRPWLEAYASRGYVAIGLDSRYHGERADCKTAYRDALISSWRNGNTMPFIFDTVWDLIKLAEYLTQRDDIDPKKIGITGISLGGMHAWFAAAADTRYSVVVPLIGVQGFRWAIENDEWEARVNSIKPLFEEARIDLGKNIIDKELVEKVWNRIAPGLASKFDSPYSLPVIAPRPLYILNGANDPRCPLGGLELALKRAEKAYKETASPGNFKFKAEDGVGHEATSFMIKESSDWFDKFLKQEDMTT

SEQ ID NO: 24153 - protein, 256 aa, Arabidopsis thaliana
  peptide (1)..(256): Ceres Seq. ID no. 13486740
  misc_feature (1)..(20): Homolog of NCBI NO: 34898368 NR Description: ESTs C19441(E10423),C99201(E10423) correspond to
  misc_feature (39)..(249): Homolog of NCBI NO: 34898368 NR Description: ESTs C19441(E10423),C99201(E10423) correspond to
  misc_feature (1)..(256): Homolog of NCBI NO: 30689997 NR Description: expressed protein [Arabidopsis thaliana]
MHGTNTNKEWLRPWLEAYASRGYVAIGLDSRYHGERADCKTAYRDALISSWRNGNTMPFIFDTVWDLIKLAEYLTQRDDIDPKKIGITGISLGGMHAWFAAAADTRYSVVVPLIGVQGFRWAIENDEWEARVNSIKPLFEEARIDLGKNIIDKELVEKVWNRIAPGLASKFDSPYSLPVIAPRPLYILNGANDPRCPLGGLELALKRAEKAYKETASPGNFKFKAEDGVGHEATSFMIKESSDWFDKFLKQEDMTT

SEQ ID NO: 24154 - DNA, 1490 bp, Arabidopsis thaliana
  misc_feature (1)..(1490): Ceres Seq. ID no. 12324904
  misc_feature: MA Experiment ID: 108461 Result: Up-regulated in Transcription
  misc_feature: MA Experiment 108461 PARAMETER Experiment Name: At_Germinating_Seeds_cDNA_P Parameter: Age (day) Value: 1 vs. 0
  misc_feature: MA Experiment 108461 PARAMETER Experiment Name: At_Germinating_Seeds_cDNA_P Parameter: Tissue Value: Germinating Seeds
  misc_feature: MA Experiment ID: 108462 Result: Up-regulated in Transcription
  misc_feature: MA Experiment 108462 PARAMETER Experiment Name: At_Germinating_Seeds_cDNA_P Parameter: Age (day) Value: 2 vs. 0
  misc_feature: MA Experiment 108462 PARAMETER Experiment Name: At_Germinating_Seeds_cDNA_P Parameter: Tissue Value: Germinating Seeds
  misc_feature: MA Experiment ID: 108463 Result: Up-regulated in Transcription
  misc_feature: MA Experiment 108463 PARAMETER Experiment Name: At_Germinating_Seeds_cDNA_P Parameter: Age (day) Value: 3 vs. 0
  misc_feature: MA Experiment 108463 PARAMETER Experiment Name: At_Germinating_Seeds_cDNA_P Parameter: Tissue Value: Germinating Seeds
  misc_feature: MA Experiment ID: 108464 Result: Up-regulated in Transcription
  misc_feature: MA Experiment 108464 PARAMETER Experiment Name: At_Germinating_Seeds_cDNA_P Parameter: Age (day) Value: 4 vs. 0
  misc_feature: MA Experiment 108464 PARAMETER Experiment Name: At_Germinating_Seeds_cDNA_P Parameter: Tissue Value: Germinating Seeds
  misc_feature: MA Experiment ID: 108488 Result: Up-regulated in Transcription
  misc_feature: MA Experiment ID: 108585 Result: Down-regulated in Transcription
  misc_feature: MA Experiment 108585 PARAMETER Experiment Name: At_5mM_NaNP_cDNA_P Parameter: Timepoint (hr) Value: 6
  misc_feature: MA Experiment 108585 PARAMETER Experiment Name: At_5mM_NaNP_cDNA_P Parameter: Tissue Value: Aerial
  misc_feature: MA Experiment 108585 PARAMETER Experiment Name: At_5mM_NaNP_cDNA_P Parameter: Treatment Value: null
  misc_feature: MA Experiment ID: 108595 Result: Down-regulated in Transcription
  misc_feature: MA Experiment 108595 PARAMETER Experiment Name: At_Ler-pi_Ovule_cDNA_P Parameter: Plant Line Value: null
  misc_feature: MA Experiment ID: 20000089 Result: Down-regulated in Transcription
  misc_feature: MA Experiment ID: 20000090 Result: Down-regulated in Transcription
  misc_feature: MA Experiment ID: 20000111 Result: Down-regulated in Transcription
  misc_feature: MA Experiment 20000111 PARAMETER Experiment Name: At_42deg_Heat_cDNA_P Parameter: Temperature (deg C) Value: 42 vs. 22
  misc_feature: MA Experiment 20000111 PARAMETER Experiment Name: At_42deg_Heat_cDNA_P Parameter: Timepoint (hr) Value: 6
  misc_feature: MA Experiment 20000111 PARAMETER Experiment Name: At_42deg_Heat_cDNA_P Parameter: Tissue Value: Aerial
  misc_feature: MA Experiment ID: 20000113 Result: Down-regulated in Transcription
  misc_feature: MA Experiment 20000113 PARAMETER Experiment Name: At_42deg_Heat_cDNA_P Parameter: Temperature (deg C) Value: 42 vs. 22
  misc_feature: MA Experiment 20000113 PARAMETER Experiment Name: At_42deg_Heat_cDNA_P Parameter: Timepoint (hr) Value: 8
  misc_feature: MA Experiment 20000113 PARAMETER Experiment Name: At_42deg_Heat_cDNA_P Parameter: Tissue Value: Aerial
  misc_feature: MA Experiment ID: 20001248 Result: Down-regulated in Transcription
  misc_feature: MA Experiment 20001248 PARAMETER Experiment Name: At_Far-red-induction_P Parameter: Age (day) Value: 7
  misc_feature: MA Experiment 20001248 PARAMETER Experiment Name: At_Far-red-induction_P Parameter: Light Value: Far-red vs. White
  misc_feature: MA Experiment 20001248 PARAMETER Experiment Name: At_Far-red-induction_P Parameter: Organism Value: A. thaliana
  misc_feature: MA Experiment 20001248 PARAMETER Experiment Name: At_Far-red-induction_P Parameter: Plant Line Value: Columbia
  misc_feature: MA Experiment 20001248 PARAMETER Experiment Name: At_Far-red-induction_P Parameter: Timepoint (hr) Value: 4
  misc_feature: MA Experiment 20001248 PARAMETER Experiment Name: At_Far-red-induction_P Parameter: Tissue Value: Whole Plant
  misc_feature: MA Experiment ID: 20001905 Result: Down-regulated in Transcription
  misc_feature: MA Experiment 20001905 PARAMETER Experiment Name: At_Drought_Reproduction_P Parameter: Age (day) Value: 40
  misc_feature: MA Experiment 20001905 PARAMETER Experiment Name: At_Drought_Reproduction_P Parameter: Organism Value: A. thaliana
  misc_feature: MA Experiment 20001905 PARAMETER Experiment Name: At_Drought_Reproduction_P Parameter: Plant Line Value: WS
  misc_feature: MA Experiment 20001905 PARAMETER Experiment Name: At_Drought_Reproduction_P Parameter: Timepoint (day) Value: 10
  misc_feature: MA Experiment 20001905 PARAMETER Experiment Name: At_Drought_Reproduction_P Parameter: Tissue Value: Rosettes
  misc_feature: MA Experiment 20001905 PARAMETER Experiment Name: At_Drought_Reproduction_P Parameter: Treatment Value: Drought vs. No Drought
  misc_feature: MA Experiment ID: 20001906 Result: Down-regulated in Transcription
  misc_feature: MA Experiment 20001906 PARAMETER Experiment Name: At_Drought_Reproduction_P Parameter: Age (day) Value: 35
  misc_feature: MA Experiment 20001906 PARAMETER Experiment Name: At_Drought_Reproduction_P Parameter: Organism Value: A. thaliana
  misc_feature: MA Experiment 20001906 PARAMETER Experiment Name: At_Drought_Reproduction_P Parameter: Plant Line Value: WS
  misc_feature: MA Experiment 20001906 PARAMETER Experiment Name: At_Drought_Reproduction_P Parameter: Timepoint (day) Value: 5
  misc_feature: MA Experiment 20001906 PARAMETER Experiment Name: At_Drought_Reproduction_P Parameter: Tissue Value: Siliques
  misc_feature: MA Experiment 20001906 PARAMETER Experiment Name: At_Drought_Reproduction_P Parameter: Treatment Value: Drought vs. No Drought
aaaaaagagagaaagaagataagtagttctatgctcctgaaatgggattaaacgagcaacaaaatgttccaagtcagaggaagatcatagtttttatagtcttagcttttataccaatagctctgtttcgactctgttttaataatccattctcctccattaaagacacctctcttcaagactctgcagctaacgttgtgatcactagcttctcttcatcttctcaagaagaagaaagccaagagagttttgatcatatacaagatgaacctttatgcgattatacgcaagggaactgggtcagagacgagattggtccactctacaatggttcaacatgtggaacaatcaaggatggtcagaattgtttccgccatggtagacctgattccggttatctttactggaaatggaaaccaaacgaatgcgatataccgagattcgactcgaaccggtttcttgatcttatgagagataagcatctagcttttatcggtgattccatggctagaaatcagcttgagtctcttttatgcttgctctctaccgtctctagccctgatctcgtctatagaaacggagaagacaataaattcagaagatggcgtttcgagtcacacaacgtcactgtctcggtttactggtccccgtttttggtggccggtttagagaaatcgggaaacttggaccacaatgtattgcacatagaccgcgtggatgagagatggggcaatgatttagaacgttttgatacggtcgtagtctctgtgggacattggtttctgcatccagcggtttactacgagtctggttcggttttgggatgtcattcttgtgaaacaagtaactgtaccgaggtagggttttatgatgtatttagaaaagcgataagaacaacgttgagagcggttgctggaagtggtcgtgaggtgatcttgacgacattttcgccatcacattttgaaggacggccttgggacagtctcggcgcatgtaacatgaccaagccgtacgaagggaaggttttagaaggtctggacttggacatgcgcaaaatagaaattgaggaatatacggcggctgcggctgaggtgaggttagaggtgttggacgtgacggctatgtcggtactgagaccagacggacatcctggtccgtacatgtacgcggacccgttcaagaacggtgtaccggagagaattcctaatgattgtttgcattggtgtctacctggtcctgtcgacacgtggaacgagatcatgatcgagatgttgcggcgatggaaggtttaaatgatgaacattgattgttgaagatcctatgatatcattcatttacacgcatatgacaaaaggtgtaataattttttgggatttcaaaaagtagctaggtagtttattttcttggattatatacgaaaaaaaaaccacatggatgatactcttttttgttggttatttcttccgttcttcaaacgatggaggagtacg

SEQ ID NO: 24155 - protein, 416 aa, Arabidopsis thaliana
  peptide (1)..(416): Ceres Seq. ID no. 12324905
  misc_feature (247)..(411): Pfam Name: Arabidopsis proteins of unknown function Pfam Description: Arabidopsis proteins of unknown function
  misc_feature (75)..(412): Homolog of NCBI NO: 15237211 NR Description: putative protein; protein id: At5g15890.1
  misc_feature (14)..(411): Homolog of NCBI NO: 30686312 NR Description: expressed protein [Arabidopsis thaliana]
  misc_feature (79)..(409): Homolog of NCBI NO: 15234058 NR Description: hypothetical protein; protein id: At4g01080.1
  misc_feature (44)..(409): Homolog of NCBI NO: 28393189 NR Description: unknown protein [Arabidopsis thaliana]
  misc_feature (89)..(411): Homolog of NCBI NO: 25518737 NR Description: hypothetical protein F6F3.23 [imported] -
  misc_feature (4)..(411): Homolog of NCBI NO: 15237044 NR Description: putative protein; protein id: At4g11090.1
  misc_feature (279)..(413): Homolog of NCBI NO: 34900856 NR Description: P0458G06.13 [Oryza sativa (japonica
  misc_feature (79)..(311): Homolog of NCBI NO: 34900856 NR Description: P0458G06.13 [Oryza sativa (japonica
  misc_feature (2)..(411): Homolog of NCBI NO: 30678135 NR Description: expressed protein [Arabidopsis thaliana]
  misc_feature (1)..(416): Homolog of NCBI NO: 15223079 NR Description: unknown protein
MGLNEQQNVPSQRKIIVFIVLAFIPIALFRLCFNNPFSSIKDTSLQDSAANVVITSFSSSSQEEESQESFDHIQDEPLCDYTQGNWVRDEIGPLYNGSTCGTIKDGQNCFRHGRPDSGYLYWKWKPNECDIPRFDSNRFLDLMRDKHLAFIGDSMARNQLESLLCLLSTVSSPDLVYRNGEDNKFRRWRFESHNVTVSVYWSPFLVAGLEKSGNLDHNVLHIDRVDERWGNDLERFDTVVVSVGHWFLHPAVYYESGSVLGCHSCETSNCTEVGFYDVFRKAIRTTLRAVAGSGREVILTTFSPSHFEGRPWDSLGACNMTKPYEGKVLEGLDLDMRKIEIEEYTAAAAEVRLEVLDVTAMSVLRPDGHPGPYMYADPFKNGVPERIPNDCLHWCLPGPVDTWNEIMIEMLRRWKV

SEQ ID NO: 24156 - protein, 274 aa, Arabidopsis thaliana
  peptide (1)..(274): Ceres Seq. ID no. 12324906
  misc_feature (105)..(269): Pfam Name: Arabidopsis proteins of unknown function Pfam Description: Arabidopsis proteins of unknown function
  misc_feature (1)..(270): Homolog of NCBI NO: 15237211 NR Description: putative protein; protein id: At5g15890.1
  misc_feature (1)..(269): Homolog of NCBI NO: 30686312 NR Description: expressed protein [Arabidopsis thaliana]
  misc_feature (1)..(267): Homolog of NCBI NO: 15234058 NR Description: hypothetical protein; protein id: At4g01080.1
  misc_feature (1)..(267): Homolog of NCBI NO: 28393189 NR Description: unknown protein [Arabidopsis thaliana]
  misc_feature (1)..(269): Homolog of NCBI NO: 25518737 NR Description: hypothetical protein F6F3.23 [imported] -
  misc_feature (1)..(269): Homolog of NCBI NO: 15237044 NR Description: putative protein; protein id: At4g11090.1
  misc_feature (137)..(271): Homolog of NCBI NO: 34900856 NR Description: P0458G06.13 [Oryza sativa (japonica
  misc_feature (1)..(169): Homolog of NCBI NO: 34900856 NR Description: P0458G06.13 [Oryza sativa (japonica
  misc_feature (1)..(269): Homolog of NCBI NO: 30678135 NR Description: expressed protein [Arabidopsis thaliana]
  misc_feature (1)..(274): Homolog of NCBI NO: 15223079 NR Description: unknown protein
MRDKHLAFIGDSMARNQLESLLCLLSTVSSPDLVYRNGEDNKFRRWRFESHNVTVSVYWSPFLVAGLEKSGNLDHNVLHIDRVDERWGNDLERFDTVVVSVGHWFLHPAVYYESGSVLGCHSCETSNCTEVGFYDVFRKAIRTTLRAVAGSGREVILTTFSPSHFEGRPWDSLGACNMTKPYEGKVLEGLDLDMRKIEIEEYTAAAAEVRLEVLDVTAMSVLRPDGHPGPYMYADPFKNGVPERIPNDCLHWCLPGPVDTWNEIMIEMLRRWKV

SEQ ID NO: 24157 - protein, 262 aa, Arabidopsis thaliana
  peptide (1)..(262): Ceres Seq. ID no. 12324907
  misc_feature (93)..(257): Pfam Name: Arabidopsis proteins of unknown function Pfam Description: Arabidopsis proteins of unknown function
  misc_feature (1)..(258): Homolog of NCBI NO: 15237211 NR Description: putative protein; protein id: At5g15890.1
  misc_feature (1)..(257): Homolog of NCBI NO: 30686312 NR Description: expressed protein [Arabidopsis thaliana]
  misc_feature (1)..(255): Homolog of NCBI NO: 15234058 NR Description: hypothetical protein; protein id: At4g01080.1
  misc_feature (1)..(255): Homolog of NCBI NO: 28393189 NR Description: unknown protein [Arabidopsis thaliana]
  misc_feature (1)..(257): Homolog of NCBI NO: 25518737 NR Description: hypothetical protein F6F3.23 [imported] -
  misc_feature (1)..(257): Homolog of NCBI NO: 15237044 NR Description: putative protein; protein id: At4g11090.1
  misc_feature (125)..(259): Homolog of NCBI NO: 34900856 NR Description: P0458G06.13 [Oryza sativa (japonica
  misc_feature (1)..(157): Homolog of NCBI NO: 34900856 NR Description: P0458G06.13 [Oryza sativa (japonica
  misc_feature (1)..(257): Homolog of NCBI NO: 30678135 NR Description: expressed protein [Arabidopsis thaliana]
  misc_feature (1)..(262): Homolog of NCBI NO: 15223079 NR Description: unknown protein
MARNQLESLLCLLSTVSSPDLVYRNGEDNKFRRWRFESHNVTVSVYWSPFLVAGLEKSGNLDHNVLHIDRVDERWGNDLERFDTVVVSVGHWFLHPAVYYESGSVLGCHSCETSNCTEVGFYDVFRKAIRTTLRAVAGSGREVILTTFSPSHFEGRPWDSLGACNMTKPYEGKVLEGLDLDMRKIEIEEYTAAAAEVRLEVLDVTAMSVLRPDGHPGPYMYADPFKNGVPERIPNDCLHWCLPGPVDTWNEIMIEMLRRWKV

SEQ ID NO: 24158 - DNA, 1469 bp, Arabidopsis thaliana
  misc_feature (1)..(1469): Ceres Seq. ID no. 12338082
  misc_feature: MA Experiment ID: 20000437 Result: Down-regulated in Transcription
  misc_feature: MA Experiment 20000437 PARAMETER Experiment Name: At_Drought_P Parameter: Age (day) Value: 8
  misc_feature: MA Experiment 20000437 PARAMETER Experiment Name: At_Drought_P Parameter: Organism Value: A. thaliana
  misc_feature: MA Experiment 20000437 PARAMETER Experiment Name: At_Drought_P Parameter: Plant Line Value: WS
  misc_feature: MA Experiment 20000437 PARAMETER Experiment Name: At_Drought_P Parameter: Timepoint (hr) Value: 24
  misc_feature: MA Experiment 20000437 PARAMETER Experiment Name: At_Drought_P Parameter: Tissue Value: Whole Plant
  misc_feature: MA Experiment 20000437 PARAMETER Experiment Name: At_Drought_P Parameter: Treatment Value: Drought vs. No Drought
  misc_feature: MA Experiment ID: 20001557 Result: Up-regulated in Transcription
  misc_feature: MA Experiment 20001557 PARAMETER Experiment Name: At_Drought_Soil_Dry_P Parameter: Age (day) Value: 27
  misc_feature: MA Experiment 20001557 PARAMETER Experiment Name: At_Drought_Soil_Dry_P Parameter: Organism Value: A. thaliana
  misc_feature: MA Experiment 20001557 PARAMETER Experiment Name: At_Drought_Soil_Dry_P Parameter: Plant Line Value: WS
  misc_feature: MA Experiment 20001557 PARAMETER Experiment Name: At_Drought_Soil_Dry_P Parameter: Post Timepoint (hr) Value: 3
  misc_feature: MA Experiment 20001557 PARAMETER Experiment Name: At_Drought_Soil_Dry_P Parameter: Post-Treatment Value: Re-Water vs. No Drought
  misc_feature: MA Experiment 20001557 PARAMETER Experiment Name: At_Drought_Soil_Dry_P Parameter: Timepoint (day) Value: 13
  misc_feature: MA Experiment 20001557 PARAMETER Experiment Name: At_Drought_Soil_Dry_P Parameter: Treatment Value: Drought vs. No Drought
  misc_feature: MA Experiment ID: 20001558 Result: Up-regulated in Transcription
  misc_feature: MA Experiment 20001558 PARAMETER Experiment Name: At_Drought_Soil_Dry_P Parameter: Age (day) Value: 27
  misc_feature: MA Experiment 20001558 PARAMETER Experiment Name: At_Drought_Soil_Dry_P Parameter: Organism Value: A. thaliana
  misc_feature: MA Experiment 20001558 PARAMETER Experiment Name: At_Drought_Soil_Dry_P Parameter: Plant Line Value: WS
  misc_feature: MA Experiment 20001558 PARAMETER Experiment Name: At_Drought_Soil_Dry_P Parameter: Post Timepoint (hr) Value: 6
  misc_feature: MA Experiment 20001558 PARAMETER Experiment Name: At_Drought_Soil_Dry_P Parameter: Post-Treatment Value: Re-Water vs. No Drought
  misc_feature: MA Experiment 20001558 PARAMETER Experiment Name: At_Drought_Soil_Dry_P Parameter: Timepoint (day) Value: 13
  misc_feature: MA Experiment 20001558 PARAMETER Experiment Name: At_Drought_Soil_Dry_P Parameter: Treatment Value: Drought vs. No Drought
aggaagggtttatagattaggtttttaagtcgcacctctctctctcactgccgcatcttttcttagggttcttgtttcgctatctcttaaacacaaacagctctgtccgaataatctctcttcaagtacctctttttcctgattctgtatatcgccatgaattactgatttccctctctataaacccatcaaagtaaaccaatttctcctgtgacttgtacctaactcgatcttaccagactggtgatggcgtctttgaaccctttcgatcttctaggagatgatgctgaggatccaagccggctcgctgtggctttgtctcagaaagtcgagaaagctgctgctgctgttcagcctcctaaggccgctaagttcccaaccaagccggctcctccttctcaagcagtgagggagtcgaggaatgctcctcaaggaggtcgtggtgggactggtggacgtggtggattttcccgtggcaggggtaatggtggatacaaccgggacaacaggaacaatgatgctcctggaaatgagaatggattttctggaggatacaggagaccttctgaagatgctgatggagcaagccgtggtgggtctgttggtggataccgtgttggcggtggtcgtgaaggacctcgccgtggtggagttgccaacggggaatctggtgatgttgaacgcccaccgaggaattatgaccgccatagcaggacaggtcatggtactggcatgaaacgtaatggtggaggtcgtggaaactggggcactactgaagatgatatccctccaacgtctgaggaacctaccacagaggttgagaagagccctgttgctgagaagcaaggaggtgaggatgaaacccctgaagcaaagaaagaactcactgcggaagagaaagcacagaaagaagctgaagaagctgaagccagggagatgactctagaagagtatgagaaaattctggaggagaagaagaaggctctgcaagccacaaaggttgaggaaaggaaagttgacaccaaagtgtttgagtccatgcaacagctctctaacaagaagaacaccgatgaggaaatcttcatcaagctgggatctgacaaggaaaaacgcaaagatgctactgagaaggccaaaaagtcgttgagcattaatgagttcttgaagccggctgatggaaagaggtacaacgggagaggtggaggctcccgcggaagaggaggtcgcggtggtcgtggtgaaggaggaaaccaaaggtatgcaaaagaagctgcagctccggcgattggagacacagctcagttcccttcgttgggctagtaaagacccctggtccttcagcctcgctatctctgtctttcgtttctctttggttgaattttgttagttttataattttttgttacactttctgaaggtcttttctgcgaaactattacgttttttaagttatgaaaaaaattattaag

SEQ ID NO: 24159 - protein, 357 aa, Arabidopsis thaliana
  peptide (1)..(357): Ceres Seq. ID no. 12338083
  misc_feature (131)..(303): Pfam Name: Hyaluronan / mRNA binding family Pfam Description: Hyaluronan / mRNA binding family
  misc_feature (1)..(357): Homolog of NCBI NO: 7488863 NR Description: probable transcription factor - fava bean
  misc_feature (1)..(357): Homolog of NCBI NO: 6492266 NR Description: nuclear RNA binding protein A [Spinacia oleracea]
  misc_feature (1)..(357): Homolog of NCBI NO: 34910712 NR Description: putative nuclear RNA binding protein A
  misc_feature (1)..(357): Homolog of NCBI NO: 21537052 NR Description: nuclear antigen homolog [Arabidopsis thaliana]
  misc_feature (1)..(357): Homolog of NCBI NO: 15235894 NR Description: nuclear antigen homolog
  misc_feature (1)..(357): Homolog of NCBI NO: 39725278 NR Description: salt tolerance protein 2 [Beta vulgaris]
  misc_feature (1)..(337): Homolog of NCBI NO: 21593013 NR Description: nuclear RNA binding protein A-like protein
  misc_feature (1)..(337): Homolog of NCBI NO: 15236552 NR Description: nuclear RNA binding protein A-like protein
  misc_feature (1)..(357): Homolog of NCBI NO: 21553991 NR Description: nuclear RNA binding protein A-like protein
  misc_feature (1)..(357): Homolog of NCBI NO: 15238039 NR Description: putative protein
MASLNPFDLLGDDAEDPSRLAVALSQKVEKAAAAVQPPKAAKFPTKPAPPSQAVRESRNAPQGGRGGTGGRGGFSRGRGNGGYNRDNRNNDAPGNENGFSGGYRRPSEDADGASRGGSVGGYRVGGGREGPRRGGVANGESGDVERPPRNYDRHSRTGHGTGMKRNGGGRGNWGTTEDDIPPTSEEPTTEVEKSPVAEKQGGEDETPEAKKELTAEEKAQKEAEEAEAREMTLEEYEKILEEKKKALQATKVEERKVDTKVFESMQQLSNKKNTDEEIFIKLGSDKEKRKDATEKAKKSLSINEFLKPADGKRYNGRGGGSRGRGGRGGRGEGGNQRYAKEAAAPAIGDTAQFPSLG

SEQ ID NO: 24160 - protein, 195 aa, Arabidopsis thaliana
  peptide (1)..(195): Ceres Seq. ID no. 12338084
  misc_feature (1)..(141): Pfam Name: Hyaluronan / mRNA binding family Pfam Description: Hyaluronan / mRNA binding family
  misc_feature (1)..(195): Homolog of NCBI NO: 7488863 NR Description: probable transcription factor - fava bean
  misc_feature (1)..(195): Homolog of NCBI NO: 6492266 NR Description: nuclear RNA binding protein A [Spinacia oleracea]
  misc_feature (1)..(195): Homolog of NCBI NO: 34910712 NR Description: putative nuclear RNA binding protein A
  misc_feature (1)..(195): Homolog of NCBI NO: 21537052 NR Description: nuclear antigen homolog [Arabidopsis thaliana]
  misc_feature (1)..(195): Homolog of NCBI NO: 15235894 NR Description: nuclear antigen homolog
  misc_feature (1)..(195): Homolog of NCBI NO: 39725278 NR Description: salt tolerance protein 2 [Beta vulgaris]
  misc_feature (1)..(175): Homolog of NCBI NO: 21593013 NR Description: nuclear RNA binding protein A-like protein
  misc_feature (1)..(175): Homolog of NCBI NO: 15236552 NR Description: nuclear RNA binding protein A-like protein
  misc_feature (1)..(195): Homolog of NCBI NO: 21553991 NR Description: nuclear RNA binding protein A-like protein
  misc_feature (1)..(195): Homolog of NCBI NO: 15238039 NR Description: putative protein
MKRNGGGRGNWGTTEDDIPPTSEEPTTEVEKSPVAEKQGGEDETPEAKKELTAEEKAQKEAEEAEAREMTLEEYEKILEEKKKALQATKVEERKVDTKVFESMQQLSNKKNTDEEIFIKLGSDKEKRKDATEKAKKSLSINEFLKPADGKRYNGRGGGSRGRGGRGGRGEGGNQRYAKEAAAPAIGDTAQFPSLG

SEQ ID NO: 24161 - DNA, 1482 bp, Arabidopsis thaliana
  misc_feature (1)..(1482): Ceres Seq. ID no. 12396139
  misc_feature: MA Experiment ID: 108434 Result: Down-regulated in Transcription
  misc_feature: MA Experiment 108434 PARAMETER Experiment Name: At_Root_Tips_cDNA_P Parameter: Tissue Value: Root Tips
  misc_feature: MA Experiment ID: 108461 Result: Up-regulated in Transcription
  misc_feature: MA Experiment 108461 PARAMETER Experiment Name: At_Germinating_Seeds_cDNA_P Parameter: Age (day) Value: 1 vs. 0
  misc_feature: MA Experiment 108461 PARAMETER Experiment Name: At_Germinating_Seeds_cDNA_P Parameter: Tissue Value: Germinating Seeds
  misc_feature: MA Experiment ID: 108462 Result: Up-regulated in Transcription
  misc_feature: MA Experiment 108462 PARAMETER Experiment Name: At_Germinating_Seeds_cDNA_P Parameter: Age (day) Value: 2 vs. 0
  misc_feature: MA Experiment 108462 PARAMETER Experiment Name: At_Germinating_Seeds_cDNA_P Parameter: Tissue Value: Germinating Seeds
  misc_feature: MA Experiment ID: 108463 Result: Up-regulated in Transcription
  misc_feature: MA Experiment 108463 PARAMETER Experiment Name: At_Germinating_Seeds_cDNA_P Parameter: Age (day) Value: 3 vs. 0
  misc_feature: MA Experiment 108463 PARAMETER Experiment Name: At_Germinating_Seeds_cDNA_P Parameter: Tissue Value: Germinating Seeds
  misc_feature: MA Experiment ID: 108464 Result: Up-regulated in Transcription
  misc_feature: MA Experiment 108464 PARAMETER Experiment Name: At_Germinating_Seeds_cDNA_P Parameter: Age (day) Value: 4 vs. 0
  misc_feature: MA Experiment 108464 PARAMETER Experiment Name: At_Germinating_Seeds_cDNA_P Parameter: Tissue Value: Germinating Seeds
  misc_feature: MA Experiment ID: 108488 Result: Down-regulated in Transcription
  misc_feature: MA Experiment ID: 108569 Result: Up-regulated in Transcription
  misc_feature: MA Experiment 108569 PARAMETER Experiment Name: At_0.001%_MeJA__cDNA_P Parameter: Timepoint (hr) Value: 6
  misc_feature: MA Experiment 108569 PARAMETER Experiment Name: At_0.001%_MeJA__cDNA_P Parameter: Tissue Value: Aerial
  misc_feature: MA Experiment 108569 PARAMETER Experiment Name: At_0.001%_MeJA__cDNA_P Parameter: Treatment Value: 0.001% MeJA vs. No Treatment
  misc_feature: MA Experiment ID: 20000072 Result: Down-regulated in Transcription
  misc_feature: MA Experiment 20000072 PARAMETER Experiment Name: At_100uM_ABA_Mutants_cDNA_P Parameter: Plant Line Value: CS8105
  misc_feature: MA Experiment 20000072 PARAMETER Experiment Name: At_100uM_ABA_Mutants_cDNA_P Parameter: Timepoint (hr) Value: 6
  misc_feature: MA Experiment 20000072 PARAMETER Experiment Name: At_100uM_ABA_Mutants_cDNA_P Parameter: Tissue Value: Aerial
  misc_feature: MA Experiment 20000072 PARAMETER Experiment Name: At_100uM_ABA_Mutants_cDNA_P Parameter: Treatment Value: 100uM ABA vs. No Treatment
  misc_feature: MA Experiment ID: 20000087 Result: Down-regulated in Transcription
  misc_feature: MA Experiment 20000087 PARAMETER Experiment Name: At_100uM_ABA_Mutants_cDNA_P Parameter: Plant Line Value: WS
  misc_feature: MA Experiment 20000087 PARAMETER Experiment Name: At_100uM_ABA_Mutants_cDNA_P Parameter: Timepoint (hr) Value: 6
  misc_feature: MA Experiment 20000087 PARAMETER Experiment Name: At_100uM_ABA_Mutants_cDNA_P Parameter: Tissue Value: Aerial
  misc_feature: MA Experiment 20000087 PARAMETER Experiment Name: At_100uM_ABA_Mutants_cDNA_P Parameter: Treatment Value: 100uM ABA vs. No Treatment
  misc_feature: MA Experiment ID: 20000180 Result: Up-regulated in Transcription
  misc_feature: MA Experiment 20000180 PARAMETER Experiment Name: At_Germinating_Seeds_P Parameter: Age (hr) Value: 24 vs. 0
  misc_feature: MA Experiment 20000180 PARAMETER Experiment Name: At_Germinating_Seeds_P Parameter: Tissue Value: Germinating Seeds
  misc_feature: MA Experiment ID: 20000211 Result: Up-regulated in Transcription
  misc_feature: MA Experiment 20000211 PARAMETER Experiment Name: At_0.001percent_MeJA__P Parameter: Age (day) Value: 14
  misc_feature: MA Experiment 20000211 PARAMETER Experiment Name: At_0.001percent_MeJA__P Parameter: Organism Value: A. thaliana
  misc_feature: MA Experiment 20000211 PARAMETER Experiment Name: At_0.001percent_MeJA__P Parameter: Plant Line Value: WS
  misc_feature: MA Experiment 20000211 PARAMETER Experiment Name: At_0.001percent_MeJA__P Parameter: Timepoint (hr) Value: 1
  misc_feature: MA Experiment 20000211 PARAMETER Experiment Name: At_0.001percent_MeJA__P Parameter: Tissue Value: Aerial
  misc_feature: MA Experiment 20000211 PARAMETER Experiment Name: At_0.001percent_MeJA__P Parameter: Treatment Value: 0.001percent MeJA vs. No Treatment
  misc_feature: MA Experiment ID: 20000527 Result: Down-regulated in Transcription
  misc_feature: MA Experiment 20000527 PARAMETER Experiment Name: At_10percent_PEG_P Parameter: Age (day) Value: 20
  misc_feature: MA Experiment 20000527 PARAMETER Experiment Name: At_10percent_PEG_P Parameter: Organism Value: A. thaliana
  misc_feature: MA Experiment 20000527 PARAMETER Experiment Name: At_10percent_PEG_P Parameter: Plant Line Value: WS
  misc_feature: MA Experiment 20000527 PARAMETER Experiment Name: At_10percent_PEG_P Parameter: Timepoint (day) Value: 20
  misc_feature: MA Experiment 20000527 PARAMETER Experiment Name: At_10percent_PEG_P Parameter: Tissue Value: Whole Plant
  misc_feature: MA Experiment 20000527 PARAMETER Experiment Name: At_10percent_PEG_P Parameter: Treatment Value: 10percent PEG vs. No Treatment
  misc_feature: MA Experiment ID: 20001555 Result: Down-regulated in Transcription
  misc_feature: MA Experiment 20001555 PARAMETER Experiment Name: At_Drought_Soil_Dry_P Parameter: Age (day) Value: 24
  misc_feature: MA Experiment 20001555 PARAMETER Experiment Name: At_Drought_Soil_Dry_P Parameter: Organism Value: A. thaliana
  misc_feature: MA Experiment 20001555 PARAMETER Experiment Name: At_Drought_Soil_Dry_P Parameter: Plant Line Value: WS
  misc_feature: MA Experiment 20001555 PARAMETER Experiment Name: At_Drought_Soil_Dry_P Parameter: Post Timepoint (hr) Value: None
  misc_feature: MA Experiment 20001555 PARAMETER Experiment Name: At_Drought_Soil_Dry_P Parameter: Post-Treatment Value: None
  misc_feature: MA Experiment 20001555 PARAMETER Experiment Name: At_Drought_Soil_Dry_P Parameter: Timepoint (day) Value: 10
  misc_feature: MA Experiment 20001555 PARAMETER Experiment Name: At_Drought_Soil_Dry_P Parameter: Treatment Value: Drought vs. No Drought
  misc_feature: MA Experiment ID: 20001559 Result: Down-regulated in Transcription
  misc_feature: MA Experiment 20001559 PARAMETER Experiment Name: At_Drought_Soil_Dry_P Parameter: Age (day) Value: 28
  misc_feature: MA Experiment 20001559 PARAMETER Experiment Name: At_Drought_Soil_Dry_P Parameter: Organism Value: A. thaliana
  misc_feature: MA Experiment 20001559 PARAMETER Experiment Name: At_Drought_Soil_Dry_P Parameter: Plant Line Value: WS
  misc_feature: MA Experiment 20001559 PARAMETER Experiment Name: At_Drought_Soil_Dry_P Parameter: Post Timepoint (hr) Value: 29
  misc_feature: MA Experiment 20001559 PARAMETER Experiment Name: At_Drought_Soil_Dry_P Parameter: Post-Treatment Value: Re-Water vs. No Drought
  misc_feature: MA Experiment 20001559 PARAMETER Experiment Name: At_Drought_Soil_Dry_P Parameter: Timepoint (day) Value: 14
  misc_feature: MA Experiment 20001559 PARAMETER Experiment Name: At_Drought_Soil_Dry_P Parameter: Treatment Value: Drought vs. No Drought
gcctatcattttgccaacgaacgttctttcttcttaatcacagctcagcctgacgcaaccgctcaggctgatctcttccaatttacagccatttcccagctcagatctctgatccggtgagatctctctcaaggaaaaggagttagagcatcatcaagatgaaggcactcattcttgttggaggcttcggcactcgcttgagaccattgactctcagtttcccaaagccccttgttgattttgctaataaacccatgatccttcatcagatagaggctcttaaggcagttggagttgatgaagtggttttggccatcaattatcagccagaggtgatgctgaacttcttgaaggactttgagaccaagctggaaatcaaaatcacttgctcacaagagaccgagccactaggtaccgctggtcctctggctctagcgagagacaaattgcttgatggatctggagagcccttctttgttcttaacagtgatgtgattagtgagtaccctcttaaagaaatgcttgagtttcacaaatctcacggtggggaagcctccataatggtaacaaaggtggatgaaccgtcgaaatatggagtggttgttatggaagaaagcactggaagagtggagaagtttgtggaaaagccaaaactgtatgtaggtaacaagatcaacgctgggatttatcttctgaacccatctgttcttgataagattgagctaagaccgacttcaatcgaaaaagagactttccctaagattgcagcagcgcaagggctctatgctatggtgctaccagggttttggatggacattgggcaaccccgtgactacataacgggtttgagactctacttagactcccttaggaagaaatctcctgccaaattaaccagtgggccacacatagttgggaatgttcttgttgacgaaaccgctacaattggggaaggatgtttgattggaccagacgttgccattggtccaggctgcattgttgagtcaggagtcagactctcccgatgcacggtcatgcgtggagtccgcatcaagaagcatgcgtgtatctcgagcagtatcatcgggtggcactcaacggttggtcaatgggccaggatcgagaacatgacgatcctcggtgaggatgttcatgtgagcgatgagatctatagcaatggaggagttgttttgccacacaaggagatcaaatcaaacatcttgaagccagagatagtgatgtgaaaatgagatattatatgtgcaacttttttttttttttttgtgtcctttcttcaactttgaaatcgctttcgtaattcttaatggcttttgaataagcatcaatcaaaacgctgtatatcttgttagggtcgtttgctgttttgtctctttttttgttttgtaatttataaaaaaatttattctcattttatgtgagatacttttgaatattcattaattataaagctttttttttgtg

SEQ ID NO: 24162 - protein, 361 aa, Arabidopsis thaliana
  peptide (1)..(361): Ceres Seq. ID no. 12396140
  misc_feature (2)..(236): Pfam Name: Nucleotidyl transferase Pfam Description: Nucleotidyl transferase
  misc_feature (1)..(361): Homolog of NCBI NO: 34908274 NR Description: putative GDP-mannose pyrophosphorylase
  misc_feature (1)..(361): Homolog of NCBI NO: 40253523 NR Description: putative GDP-mannose pyrophosphorylase
  misc_feature (1)..(361): Homolog of NCBI NO: 14971013 NR Description: GDP-D-mannose pyrophosphorylase [Nicotiana
  misc_feature (1)..(361): Homolog of NCBI NO: 34902046 NR Description: COG1208, GCD1, Nucleoside-diphosphate-sugar involved in lipopolysaccharide biosynthesis/translation
  misc_feature (1)..(361): Homolog of NCBI NO: 15233308 NR Description: mannose-1-phosphate guanylyltransferase-like
  misc_feature (22)..(345): Homolog of NCBI NO: 15234771 NR Description: GDP-mannose pyrophosphorylase like protein
  misc_feature (1)..(345): Homolog of NCBI NO: 25317396 NR Description: GDP-mannose pyrophosphorylase like protein
  misc_feature (1)..(361): Homolog of NCBI NO: 4103324 NR Description: GDP-mannose pyrophosphorylase [Solanum tuberosum]
  misc_feature (1)..(361): Homolog of NCBI NO: 13509287 NR Description: GDP-mannose pyrophosphorylase [Arabidopsis
  misc_feature (1)..(361): Homolog of NCBI NO: 15225553 NR Description: GDP-mannose  pyrophosphorylase
MKALILVGGFGTRLRPLTLSFPKPLVDFANKPMILHQIEALKAVGVDEVVLAINYQPEVMLNFLKDFETKLEIKITCSQETEPLGTAGPLALARDKLLDGSGEPFFVLNSDVISEYPLKEMLEFHKSHGGEASIMVTKVDEPSKYGVVVMEESTGRVEKFVEKPKLYVGNKINAGIYLLNPSVLDKIELRPTSIEKETFPKIAAAQGLYAMVLPGFWMDIGQPRDYITGLRLYLDSLRKKSPAKLTSGPHIVGNVLVDETATIGEGCLIGPDVAIGPGCIVESGVRLSRCTVMRGVRIKKHACISSSIIGWHSTVGQWARIENMTILGEDVHVSDEIYSNGGVVLPHKEIKSNILKPEIVM

SEQ ID NO: 24163 - protein, 329 aa, Arabidopsis thaliana
  peptide (1)..(329): Ceres Seq. ID no. 12396141
  misc_feature (1)..(204): Pfam Name: Nucleotidyl transferase Pfam Description: Nucleotidyl transferase
  misc_feature (1)..(313): Homolog of NCBI NO: 15234771 NR Description: GDP-mannose pyrophosphorylase like protein
  misc_feature (1)..(313): Homolog of NCBI NO: 25317396 NR Description: GDP-mannose pyrophosphorylase like protein
  misc_feature (1)..(329): Homolog of NCBI NO: 15233308 NR Description: mannose-1-phosphate guanylyltransferase-like
  misc_feature (1)..(329): Homolog of NCBI NO: 34908274 NR Description: putative GDP-mannose pyrophosphorylase
  misc_feature (1)..(329): Homolog of NCBI NO: 40253523 NR Description: putative GDP-mannose pyrophosphorylase
  misc_feature (1)..(329): Homolog of NCBI NO: 14971013 NR Description: GDP-D-mannose pyrophosphorylase [Nicotiana
  misc_feature (1)..(329): Homolog of NCBI NO: 34902046 NR Description: COG1208, GCD1, Nucleoside-diphosphate-sugar involved in lipopolysaccharide biosynthesis/translation
  misc_feature (1)..(329): Homolog of NCBI NO: 4103324 NR Description: GDP-mannose pyrophosphorylase [Solanum tuberosum]
  misc_feature (1)..(329): Homolog of NCBI NO: 13509287 NR Description: GDP-mannose pyrophosphorylase [Arabidopsis
  misc_feature (1)..(329): Homolog of NCBI NO: 15225553 NR Description: GDP-mannose  pyrophosphorylase
MILHQIEALKAVGVDEVVLAINYQPEVMLNFLKDFETKLEIKITCSQETEPLGTAGPLALARDKLLDGSGEPFFVLNSDVISEYPLKEMLEFHKSHGGEASIMVTKVDEPSKYGVVVMEESTGRVEKFVEKPKLYVGNKINAGIYLLNPSVLDKIELRPTSIEKETFPKIAAAQGLYAMVLPGFWMDIGQPRDYITGLRLYLDSLRKKSPAKLTSGPHIVGNVLVDETATIGEGCLIGPDVAIGPGCIVESGVRLSRCTVMRGVRIKKHACISSSIIGWHSTVGQWARIENMTILGEDVHVSDEIYSNGGVVLPHKEIKSNILKPEIVM

SEQ ID NO: 24164 - protein, 302 aa, Arabidopsis thaliana
  peptide (1)..(302): Ceres Seq. ID no. 12396142
  misc_feature (1)..(177): Pfam Name: Nucleotidyl transferase Pfam Description: Nucleotidyl transferase
  misc_feature (1)..(286): Homolog of NCBI NO: 15234771 NR Description: GDP-mannose pyrophosphorylase like protein
  misc_feature (1)..(286): Homolog of NCBI NO: 25317396 NR Description: GDP-mannose pyrophosphorylase like protein
  misc_feature (1)..(302): Homolog of NCBI NO: 15233308 NR Description: mannose-1-phosphate guanylyltransferase-like
  misc_feature (1)..(302): Homolog of NCBI NO: 34908274 NR Description: putative GDP-mannose pyrophosphorylase
  misc_feature (1)..(302): Homolog of NCBI NO: 40253523 NR Description: putative GDP-mannose pyrophosphorylase
  misc_feature (1)..(302): Homolog of NCBI NO: 14971013 NR Description: GDP-D-mannose pyrophosphorylase [Nicotiana
  misc_feature (1)..(302): Homolog of NCBI NO: 34902046 NR Description: COG1208, GCD1, Nucleoside-diphosphate-sugar involved in lipopolysaccharide biosynthesis/translation
  misc_feature (1)..(302): Homolog of NCBI NO: 4103324 NR Description: GDP-mannose pyrophosphorylase [Solanum tuberosum]
  misc_feature (1)..(302): Homolog of NCBI NO: 13509287 NR Description: GDP-mannose pyrophosphorylase [Arabidopsis
  misc_feature (1)..(302): Homolog of NCBI NO: 15225553 NR Description: GDP-mannose  pyrophosphorylase
MLNFLKDFETKLEIKITCSQETEPLGTAGPLALARDKLLDGSGEPFFVLNSDVISEYPLKEMLEFHKSHGGEASIMVTKVDEPSKYGVVVMEESTGRVEKFVEKPKLYVGNKINAGIYLLNPSVLDKIELRPTSIEKETFPKIAAAQGLYAMVLPGFWMDIGQPRDYITGLRLYLDSLRKKSPAKLTSGPHIVGNVLVDETATIGEGCLIGPDVAIGPGCIVESGVRLSRCTVMRGVRIKKHACISSSIIGWHSTVGQWARIENMTILGEDVHVSDEIYSNGGVVLPHKEIKSNILKPEIVM

SEQ ID NO: 24165 - DNA, 1192 bp, Arabidopsis thaliana
  misc_feature (1)..(1192): Ceres Seq. ID no. 12325978
  misc_feature: MA Experiment ID: 108462 Result: Down-regulated in Transcription
  misc_feature: MA Experiment 108462 PARAMETER Experiment Name: At_Germinating_Seeds_cDNA_P Parameter: Age (day) Value: 2 vs. 0
  misc_feature: MA Experiment 108462 PARAMETER Experiment Name: At_Germinating_Seeds_cDNA_P Parameter: Tissue Value: Germinating Seeds
  misc_feature: MA Experiment ID: 108463 Result: Down-regulated in Transcription
  misc_feature: MA Experiment 108463 PARAMETER Experiment Name: At_Germinating_Seeds_cDNA_P Parameter: Age (day) Value: 3 vs. 0
  misc_feature: MA Experiment 108463 PARAMETER Experiment Name: At_Germinating_Seeds_cDNA_P Parameter: Tissue Value: Germinating Seeds
  misc_feature: MA Experiment ID: 108561 Result: Up-regulated in Transcription
  misc_feature: MA Experiment 108561 PARAMETER Experiment Name: At_100uM_ABA_cDNA_P Parameter: Timepoint (hr) Value: 6
  misc_feature: MA Experiment 108561 PARAMETER Experiment Name: At_100uM_ABA_cDNA_P Parameter: Tissue Value: Aerial
  misc_feature: MA Experiment 108561 PARAMETER Experiment Name: At_100uM_ABA_cDNA_P Parameter: Treatment Value: 100uM ABA vs. No Treatment
  misc_feature: MA Experiment ID: 108594 Result: Down-regulated in Transcription
  misc_feature: MA Experiment 108594 PARAMETER Experiment Name: At_Ler-rhl_Root_cDNA_P Parameter: Plant Line Value: null
  misc_feature: MA Experiment ID: 108608 Result: Up-regulated in Transcription
  misc_feature: MA Experiment 108608 PARAMETER Experiment Name: At_100uM_ABA_cDNA_P Parameter: Timepoint (hr) Value: 1
  misc_feature: MA Experiment 108608 PARAMETER Experiment Name: At_100uM_ABA_cDNA_P Parameter: Tissue Value: Aerial
  misc_feature: MA Experiment 108608 PARAMETER Experiment Name: At_100uM_ABA_cDNA_P Parameter: Treatment Value: 100uM ABA vs. No Treatment
  misc_feature: MA Experiment ID: 20000069 Result: Up-regulated in Transcription
  misc_feature: MA Experiment 20000069 PARAMETER Experiment Name: At_100uM_ABA_Mutants_cDNA_P Parameter: Plant Line Value: CS23
  misc_feature: MA Experiment 20000069 PARAMETER Experiment Name: At_100uM_ABA_Mutants_cDNA_P Parameter: Timepoint (hr) Value: 6
  misc_feature: MA Experiment 20000069 PARAMETER Experiment Name: At_100uM_ABA_Mutants_cDNA_P Parameter: Tissue Value: Aerial
  misc_feature: MA Experiment 20000069 PARAMETER Experiment Name: At_100uM_ABA_Mutants_cDNA_P Parameter: Treatment Value: 100uM ABA vs. No Treatment
  misc_feature: MA Experiment ID: 20000070 Result: Up-regulated in Transcription
  misc_feature: MA Experiment 20000070 PARAMETER Experiment Name: At_100uM_ABA_Mutants_cDNA_P Parameter: Plant Line Value: CS24
  misc_feature: MA Experiment 20000070 PARAMETER Experiment Name: At_100uM_ABA_Mutants_cDNA_P Parameter: Timepoint (hr) Value: 6
  misc_feature: MA Experiment 20000070 PARAMETER Experiment Name: At_100uM_ABA_Mutants_cDNA_P Parameter: Tissue Value: Aerial
  misc_feature: MA Experiment 20000070 PARAMETER Experiment Name: At_100uM_ABA_Mutants_cDNA_P Parameter: Treatment Value: 100uM ABA vs. No Treatment
  misc_feature: MA Experiment ID: 20000166 Result: Up-regulated in Transcription
  misc_feature: MA Experiment 20000166 PARAMETER Experiment Name: At_100uM_ABA_P Parameter: Age (day) Value: 14
  misc_feature: MA Experiment 20000166 PARAMETER Experiment Name: At_100uM_ABA_P Parameter: Organism Value: A. thaliana
  misc_feature: MA Experiment 20000166 PARAMETER Experiment Name: At_100uM_ABA_P Parameter: Plant Line Value: WS
  misc_feature: MA Experiment 20000166 PARAMETER Experiment Name: At_100uM_ABA_P Parameter: Timepoint (hr) Value: 1
  misc_feature: MA Experiment 20000166 PARAMETER Experiment Name: At_100uM_ABA_P Parameter: Tissue Value: Aerial
  misc_feature: MA Experiment 20000166 PARAMETER Experiment Name: At_100uM_ABA_P Parameter: Treatment Value: 100uM ABA vs. No Treatment
  misc_feature: MA Experiment ID: 20000182 Result: Up-regulated in Transcription
  misc_feature: MA Experiment 20000182 PARAMETER Experiment Name: At_2mM_SA_P Parameter: Age (day) Value: 14
  misc_feature: MA Experiment 20000182 PARAMETER Experiment Name: At_2mM_SA_P Parameter: Organism Value: A. thaliana
  misc_feature: MA Experiment 20000182 PARAMETER Experiment Name: At_2mM_SA_P Parameter: Plant Line Value: WS
  misc_feature: MA Experiment 20000182 PARAMETER Experiment Name: At_2mM_SA_P Parameter: Timepoint (hr) Value: 6
  misc_feature: MA Experiment 20000182 PARAMETER Experiment Name: At_2mM_SA_P Parameter: Tissue Value: Aerial
  misc_feature: MA Experiment 20000182 PARAMETER Experiment Name: At_2mM_SA_P Parameter: Treatment Value: 2mM SA vs. No Treatment
  misc_feature: MA Experiment ID: 20000185 Result: Up-regulated in Transcription
  misc_feature: MA Experiment 20000185 PARAMETER Experiment Name: At_Roots__P Parameter: Age (day) Value: 7 vs. 21
  misc_feature: MA Experiment 20000185 PARAMETER Experiment Name: At_Roots__P Parameter: Organism Value: A. thaliana
  misc_feature: MA Experiment 20000185 PARAMETER Experiment Name: At_Roots__P Parameter: Tissue Value: Roots vs. Whole Plant
  misc_feature: MA Experiment ID: 20000227 Result: Down-regulated in Transcription
  misc_feature: MA Experiment 20000227 PARAMETER Experiment Name: At_Root-Tips-vs-Tops_P Parameter: Tissue Value: Root Tips vs. Root Tops
  misc_feature: MA Experiment ID: 20000234 Result: Down-regulated in Transcription
  misc_feature: MA Experiment 20000234 PARAMETER Experiment Name: At_Siliques_P Parameter: Age (day) Value: 21
  misc_feature: MA Experiment 20000234 PARAMETER Experiment Name: At_Siliques_P Parameter: Organism Value: A. thaliana
  misc_feature: MA Experiment 20000234 PARAMETER Experiment Name: At_Siliques_P Parameter: Plant Line Value: WS
  misc_feature: MA Experiment 20000234 PARAMETER Experiment Name: At_Siliques_P Parameter: Tissue Value: Less Than 5mm Siliques vs. Whole Plant
  misc_feature: MA Experiment ID: 20000235 Result: Down-regulated in Transcription
  misc_feature: MA Experiment 20000235 PARAMETER Experiment Name: At_Siliques_P Parameter: Age (day) Value: 21
  misc_feature: MA Experiment 20000235 PARAMETER Experiment Name: At_Siliques_P Parameter: Organism Value: A. thaliana
  misc_feature: MA Experiment 20000235 PARAMETER Experiment Name: At_Siliques_P Parameter: Plant Line Value: WS
  misc_feature: MA Experiment 20000235 PARAMETER Experiment Name: At_Siliques_P Parameter: Tissue Value: 5-10mm Siliques vs. Whole Plant
  misc_feature: MA Experiment ID: 20000264 Result: Up-regulated in Transcription
  misc_feature: MA Experiment 20000264 PARAMETER Experiment Name: At_Open_Flower_P Parameter: Age (day) Value: 21
  misc_feature: MA Experiment 20000264 PARAMETER Experiment Name: At_Open_Flower_P Parameter: Plant Line Value: WS
  misc_feature: MA Experiment 20000264 PARAMETER Experiment Name: At_Open_Flower_P Parameter: Tissue Value: Open Flower vs. Whole Plant
  misc_feature: MA Experiment ID: 20000265 Result: Up-regulated in Transcription
  misc_feature: MA Experiment 20000265 PARAMETER Experiment Name: At_Open_Flower_P Parameter: Age (day) Value: 21
  misc_feature: MA Experiment 20000265 PARAMETER Experiment Name: At_Open_Flower_P Parameter: Plant Line Value: WS
  misc_feature: MA Experiment 20000265 PARAMETER Experiment Name: At_Open_Flower_P Parameter: Tissue Value: Closed Flower vs. Whole Plant
  misc_feature: MA Experiment ID: 20000286 Result: Up-regulated in Transcription
  misc_feature: MA Experiment 20000286 PARAMETER Experiment Name: At_Open_Flower_P Parameter: Age (day) Value: 21
  misc_feature: MA Experiment 20000286 PARAMETER Experiment Name: At_Open_Flower_P Parameter: Plant Line Value: WS
  misc_feature: MA Experiment 20000286 PARAMETER Experiment Name: At_Open_Flower_P Parameter: Tissue Value: Half Open vs. Whole Plant
  misc_feature: MA Experiment ID: 20000439 Result: Up-regulated in Transcription
  misc_feature: MA Experiment 20000439 PARAMETER Experiment Name: At_Roots__P Parameter: Age (day) Value: 14 vs. 21
  misc_feature: MA Experiment 20000439 PARAMETER Experiment Name: At_Roots__P Parameter: Organism Value: A. thaliana
  misc_feature: MA Experiment 20000439 PARAMETER Experiment Name: At_Roots__P Parameter: Tissue Value: Roots vs. Whole Plant
  misc_feature: MA Experiment ID: 20000453 Result: Up-regulated in Transcription
  misc_feature: MA Experiment 20000453 PARAMETER Experiment Name: At_100uM_ABA_P Parameter: Age (day) Value: 15
  misc_feature: MA Experiment 20000453 PARAMETER Experiment Name: At_100uM_ABA_P Parameter: Organism Value: A. thaliana
  misc_feature: MA Experiment 20000453 PARAMETER Experiment Name: At_100uM_ABA_P Parameter: Plant Line Value: WS
  misc_feature: MA Experiment 20000453 PARAMETER Experiment Name: At_100uM_ABA_P Parameter: Timepoint (hr) Value: 24
  misc_feature: MA Experiment 20000453 PARAMETER Experiment Name: At_100uM_ABA_P Parameter: Tissue Value: Aerial
  misc_feature: MA Experiment 20000453 PARAMETER Experiment Name: At_100uM_ABA_P Parameter: Treatment Value: 100uM ABA vs. No Treatment
  misc_feature: MA Experiment ID: 20000574 Result: Up-regulated in Transcription
  misc_feature: MA Experiment 20000574 PARAMETER Experiment Name: At_100uM_ABA_Mutants__P Parameter: Organism Value: A. thaliana
  misc_feature: MA Experiment 20000574 PARAMETER Experiment Name: At_100uM_ABA_Mutants__P Parameter: Plant Line Value: CS23 vs. Ler wt
  misc_feature: MA Experiment 20000574 PARAMETER Experiment Name: At_100uM_ABA_Mutants__P Parameter: Timepoint (hr) Value: N/A
  misc_feature: MA Experiment 20000574 PARAMETER Experiment Name: At_100uM_ABA_Mutants__P Parameter: Tissue Value: Whole Plant
  misc_feature: MA Experiment 20000574 PARAMETER Experiment Name: At_100uM_ABA_Mutants__P Parameter: Treatment Value: None
  misc_feature: MA Experiment ID: 20000794 Result: Up-regulated in Transcription
  misc_feature: MA Experiment 20000794 PARAMETER Experiment Name: At_Petals_P Parameter: Age (day) Value: 23-25 days
  misc_feature: MA Experiment 20000794 PARAMETER Experiment Name: At_Petals_P Parameter: Plant Line Value: WS
  misc_feature: MA Experiment 20000794 PARAMETER Experiment Name: At_Petals_P Parameter: Tissue Value: Petals vs. Whole plant
  misc_feature: MA Experiment ID: 20001904 Result: Up-regulated in Transcription
  misc_feature: MA Experiment 20001904 PARAMETER Experiment Name: At_Drought_Reproduction_P Parameter: Age (day) Value: 37
  misc_feature: MA Experiment 20001904 PARAMETER Experiment Name: At_Drought_Reproduction_P Parameter: Organism Value: A. thaliana
  misc_feature: MA Experiment 20001904 PARAMETER Experiment Name: At_Drought_Reproduction_P Parameter: Plant Line Value: WS
  misc_feature: MA Experiment 20001904 PARAMETER Experiment Name: At_Drought_Reproduction_P Parameter: Timepoint (day) Value: 7
  misc_feature: MA Experiment 20001904 PARAMETER Experiment Name: At_Drought_Reproduction_P Parameter: Tissue Value: Rosettes
  misc_feature: MA Experiment 20001904 PARAMETER Experiment Name: At_Drought_Reproduction_P Parameter: Treatment Value: Drought vs. No Drought
  misc_feature: MA Experiment ID: 20001905 Result: Up-regulated in Transcription
  misc_feature: MA Experiment 20001905 PARAMETER Experiment Name: At_Drought_Reproduction_P Parameter: Age (day) Value: 40
  misc_feature: MA Experiment 20001905 PARAMETER Experiment Name: At_Drought_Reproduction_P Parameter: Organism Value: A. thaliana
  misc_feature: MA Experiment 20001905 PARAMETER Experiment Name: At_Drought_Reproduction_P Parameter: Plant Line Value: WS
  misc_feature: MA Experiment 20001905 PARAMETER Experiment Name: At_Drought_Reproduction_P Parameter: Timepoint (day) Value: 10
  misc_feature: MA Experiment 20001905 PARAMETER Experiment Name: At_Drought_Reproduction_P Parameter: Tissue Value: Rosettes
  misc_feature: MA Experiment 20001905 PARAMETER Experiment Name: At_Drought_Reproduction_P Parameter: Treatment Value: Drought vs. No Drought
  misc_feature: MA Experiment ID: 20001906 Result: Up-regulated in Transcription
  misc_feature: MA Experiment 20001906 PARAMETER Experiment Name: At_Drought_Reproduction_P Parameter: Age (day) Value: 35
  misc_feature: MA Experiment 20001906 PARAMETER Experiment Name: At_Drought_Reproduction_P Parameter: Organism Value: A. thaliana
  misc_feature: MA Experiment 20001906 PARAMETER Experiment Name: At_Drought_Reproduction_P Parameter: Plant Line Value: WS
  misc_feature: MA Experiment 20001906 PARAMETER Experiment Name: At_Drought_Reproduction_P Parameter: Timepoint (day) Value: 5
  misc_feature: MA Experiment 20001906 PARAMETER Experiment Name: At_Drought_Reproduction_P Parameter: Tissue Value: Siliques
  misc_feature: MA Experiment 20001906 PARAMETER Experiment Name: At_Drought_Reproduction_P Parameter: Treatment Value: Drought vs. No Drought
  misc_feature: MA Experiment ID: 20001908 Result: Up-regulated in Transcription
  misc_feature: MA Experiment 20001908 PARAMETER Experiment Name: At_Drought_Reproduction_P Parameter: Age (day) Value: 40
  misc_feature: MA Experiment 20001908 PARAMETER Experiment Name: At_Drought_Reproduction_P Parameter: Organism Value: A. thaliana
  misc_feature: MA Experiment 20001908 PARAMETER Experiment Name: At_Drought_Reproduction_P Parameter: Plant Line Value: WS
  misc_feature: MA Experiment 20001908 PARAMETER Experiment Name: At_Drought_Reproduction_P Parameter: Timepoint (day) Value: 10
  misc_feature: MA Experiment 20001908 PARAMETER Experiment Name: At_Drought_Reproduction_P Parameter: Tissue Value: Siliques
  misc_feature: MA Experiment 20001908 PARAMETER Experiment Name: At_Drought_Reproduction_P Parameter: Treatment Value: Drought vs. No Drought
aaagaaaaactatttaagaaacatatgttttggatcaagtaagggtttgatcttgtaccggaatcagatggatttgcctcctggttttaggtttcatccaacagacgaagaactcataacccactatctccacaagaaggttcttgaccttggtttctcggctaaagctattggtgaggttgatttgaacaaagctgagccatgggagttgccatataaagcaaaaattggtgagaaagaatggtactttttctgtgtgagggatagaaagtatccgactggtctgaggactaaccgagcaactcaagccggttattggaaggcgacagggaaggataaagaaatcttccgaggtaaatcgcttgttggtatgaagaaaacacttgttttctacagaggaagagctcctaaaggccagaaaacaaattgggtgatgcatgagtataggctagatggaaaactctctgctcacaacttgcctaaaaccgctaagaatgaatgggtgatctgcagggtatttcataaaactgctggaggtaagaagatcccgatttcgacgttaatccgaatcggttcttacggaaccgggtctagtttaccacctttaactgattcttcaccatacaacgacaaaaccaagaccgaaccagtttacgtgccctgcttctccaaccaagctgaaactagaggaacaatactcaattgcttcagcaacccttcccttagctccatccaaccagattttctccagatgattccactctaccaacctcaatctctcaacatttccgagagttccaatccggttcttacgcaagaacaatcagttttacaagcgatgatggaaaacaacagaaggcagaacttcaaaacattgagcatctcgcaagaaaccggggtttcgaacaccgataactcatcggtttttgaatttgggaggaagcgatttgatcatcaagaagttccatctccctcttccggtccggttgatcttgaacctttctggaattactgaagattcagaacctgaaaagtctattaatttaggtcacaagtaagaaaatctttgcaaagttttatccttttagcgtggtgtgctaagcttgtatagattattgacactacttcctgtattagtgttttatattattatattcaactaaagttaatattagagaggataaaatgaagc

SEQ ID NO: 24166 - protein, 337 aa, Arabidopsis thaliana
  peptide (1)..(337): Ceres Seq. ID no. 12325979
  misc_feature (25)..(151): Pfam Name: No apical meristem (NAM) protein Pfam Description: No apical meristem (NAM) protein
  misc_feature (23)..(337): Homolog of NCBI NO: 21537315 NR Description: NAM, no apical meristem,-like protein
  misc_feature (22)..(337): Homolog of NCBI NO: 15240252 NR Description: NAM, no apical meristem, - like protein
  misc_feature (23)..(337): Homolog of NCBI NO: 30682054 NR Description: NAM (no apical meristem)-related protein
  misc_feature (22)..(337): Homolog of NCBI NO: 30682048 NR Description: NAM (no apical meristem)-related protein
KKNYLRNICFGSSKGLILYRNQMDLPPGFRFHPTDEELITHYLHKKVLDLGFSAKAIGEVDLNKAEPWELPYKAKIGEKEWYFFCVRDRKYPTGLRTNRATQAGYWKATGKDKEIFRGKSLVGMKKTLVFYRGRAPKGQKTNWVMHEYRLDGKLSAHNLPKTAKNEWVICRVFHKTAGGKKIPISTLIRIGSYGTGSSLPPLTDSSPYNDKTKTEPVYVPCFSNQAETRGTILNCFSNPSLSSIQPDFLQMIPLYQPQSLNISESSNPVLTQEQSVLQAMMENNRRQNFKTLSISQETGVSNTDNSSVFEFGRKRFDHQEVPSPSSGPVDLEPFWNY

SEQ ID NO: 24167 - protein, 315 aa, Arabidopsis thaliana; identical to SEQ ID NO: 23928
  peptide (1)..(315): Ceres Seq. ID no. 12325980
  misc_feature (3)..(129): Pfam Name: No apical meristem (NAM) protein Pfam Description: No apical meristem (NAM) protein
  misc_feature (1)..(315): Homolog of NCBI NO: 21537315 NR Description: NAM, no apical meristem,-like protein
  misc_feature (1)..(315): Homolog of NCBI NO: 15240252 NR Description: NAM, no apical meristem, - like protein
  misc_feature (1)..(315): Homolog of NCBI NO: 30682054 NR Description: NAM (no apical meristem)-related protein
  misc_feature (1)..(315): Homolog of NCBI NO: 30682048 NR Description: NAM (no apical meristem)-related protein

SEQ ID NO: 24168 - protein, 214 aa, Arabidopsis thaliana; identical to SEQ ID NO: 23929
  peptide (1)..(214): Ceres Seq. ID no. 12325981
  misc_feature (1)..(214): Homolog of NCBI NO: 21537315 NR Description: NAM, no apical meristem,-like protein
  misc_feature (1)..(214): Homolog of NCBI NO: 15240252 NR Description: NAM, no apical meristem, - like protein
  misc_feature (1)..(214): Homolog of NCBI NO: 30682054 NR Description: NAM (no apical meristem)-related protein
  misc_feature (1)..(214): Homolog of NCBI NO: 30682048 NR Description: NAM (no apical meristem)-related protein

SEQ ID NO: 24169 - DNA, 1529 bp, Arabidopsis thaliana
  misc_feature (1)..(1529): Ceres Seq. ID no. 12328202
  misc_feature: MA Experiment ID: 108462 Result: Up-regulated in Transcription
  misc_feature: MA Experiment 108462 PARAMETER Experiment Name: At_Germinating_Seeds_cDNA_P Parameter: Age (day) Value: 2 vs. 0
  misc_feature: MA Experiment 108462 PARAMETER Experiment Name: At_Germinating_Seeds_cDNA_P Parameter: Tissue Value: Germinating Seeds
  misc_feature: MA Experiment ID: 108464 Result: Up-regulated in Transcription
  misc_feature: MA Experiment 108464 PARAMETER Experiment Name: At_Germinating_Seeds_cDNA_P Parameter: Age (day) Value: 4 vs. 0
  misc_feature: MA Experiment 108464 PARAMETER Experiment Name: At_Germinating_Seeds_cDNA_P Parameter: Tissue Value: Germinating Seeds
  misc_feature: MA Experiment ID: 108469 Result: Up-regulated in Transcription
  misc_feature: MA Experiment ID: 108569 Result: Up-regulated in Transcription
  misc_feature: MA Experiment 108569 PARAMETER Experiment Name: At_0.001%_MeJA__cDNA_P Parameter: Timepoint (hr) Value: 6
  misc_feature: MA Experiment 108569 PARAMETER Experiment Name: At_0.001%_MeJA__cDNA_P Parameter: Tissue Value: Aerial
  misc_feature: MA Experiment 108569 PARAMETER Experiment Name: At_0.001%_MeJA__cDNA_P Parameter: Treatment Value: 0.001% MeJA vs. No Treatment
  misc_feature: MA Experiment ID: 108573 Result: Up-regulated in Transcription
  misc_feature: MA Experiment 108573 PARAMETER Experiment Name: At_Drought_cDNA_P Parameter: Timepoint (hr) Value: 6
  misc_feature: MA Experiment 108573 PARAMETER Experiment Name: At_Drought_cDNA_P Parameter: Tissue Value: Aerial
  misc_feature: MA Experiment 108573 PARAMETER Experiment Name: At_Drought_cDNA_P Parameter: Treatment Value: Drought vs. No Drought
  misc_feature: MA Experiment ID: 108577 Result: Up-regulated in Transcription
  misc_feature: MA Experiment 108577 PARAMETER Experiment Name: At_42deg_Heat_cDNA_P Parameter: Temperature (deg C) Value: 42 vs. 22
  misc_feature: MA Experiment 108577 PARAMETER Experiment Name: At_42deg_Heat_cDNA_P Parameter: Timepoint (hr) Value: 6
  misc_feature: MA Experiment 108577 PARAMETER Experiment Name: At_42deg_Heat_cDNA_P Parameter: Tissue Value: Aerial
  misc_feature: MA Experiment ID: 108585 Result: Up-regulated in Transcription
  misc_feature: MA Experiment 108585 PARAMETER Experiment Name: At_5mM_NaNP_cDNA_P Parameter: Timepoint (hr) Value: 6
  misc_feature: MA Experiment 108585 PARAMETER Experiment Name: At_5mM_NaNP_cDNA_P Parameter: Tissue Value: Aerial
  misc_feature: MA Experiment 108585 PARAMETER Experiment Name: At_5mM_NaNP_cDNA_P Parameter: Treatment Value: null
  misc_feature: MA Experiment ID: 20000087 Result: Down-regulated in Transcription
  misc_feature: MA Experiment 20000087 PARAMETER Experiment Name: At_100uM_ABA_Mutants_cDNA_P Parameter: Plant Line Value: WS
  misc_feature: MA Experiment 20000087 PARAMETER Experiment Name: At_100uM_ABA_Mutants_cDNA_P Parameter: Timepoint (hr) Value: 6
  misc_feature: MA Experiment 20000087 PARAMETER Experiment Name: At_100uM_ABA_Mutants_cDNA_P Parameter: Tissue Value: Aerial
  misc_feature: MA Experiment 20000087 PARAMETER Experiment Name: At_100uM_ABA_Mutants_cDNA_P Parameter: Treatment Value: 100uM ABA vs. No Treatment
  misc_feature: MA Experiment ID: 20000179 Result: Up-regulated in Transcription
  misc_feature: MA Experiment 20000179 PARAMETER Experiment Name: At_Germinating_Seeds_P Parameter: Age (hr) Value: 6 vs. 0
  misc_feature: MA Experiment 20000179 PARAMETER Experiment Name: At_Germinating_Seeds_P Parameter: Tissue Value: Germinating Seeds
  misc_feature: MA Experiment ID: 20000180 Result: Up-regulated in Transcription
  misc_feature: MA Experiment 20000180 PARAMETER Experiment Name: At_Germinating_Seeds_P Parameter: Age (hr) Value: 24 vs. 0
  misc_feature: MA Experiment 20000180 PARAMETER Experiment Name: At_Germinating_Seeds_P Parameter: Tissue Value: Germinating Seeds
  misc_feature: MA Experiment ID: 20000182 Result: Up-regulated in Transcription
  misc_feature: MA Experiment 20000182 PARAMETER Experiment Name: At_2mM_SA_P Parameter: Age (day) Value: 14
  misc_feature: MA Experiment 20000182 PARAMETER Experiment Name: At_2mM_SA_P Parameter: Organism Value: A. thaliana
  misc_feature: MA Experiment 20000182 PARAMETER Experiment Name: At_2mM_SA_P Parameter: Plant Line Value: WS
  misc_feature: MA Experiment 20000182 PARAMETER Experiment Name: At_2mM_SA_P Parameter: Timepoint (hr) Value: 6
  misc_feature: MA Experiment 20000182 PARAMETER Experiment Name: At_2mM_SA_P Parameter: Tissue Value: Aerial
  misc_feature: MA Experiment 20000182 PARAMETER Experiment Name: At_2mM_SA_P Parameter: Treatment Value: 2mM SA vs. No Treatment
  misc_feature: MA Experiment ID: 20000264 Result: Down-regulated in Transcription
  misc_feature: MA Experiment 20000264 PARAMETER Experiment Name: At_Open_Flower_P Parameter: Age (day) Value: 21
  misc_feature: MA Experiment 20000264 PARAMETER Experiment Name: At_Open_Flower_P Parameter: Plant Line Value: WS
  misc_feature: MA Experiment 20000264 PARAMETER Experiment Name: At_Open_Flower_P Parameter: Tissue Value: Open Flower vs. Whole Plant
  misc_feature: MA Experiment ID: 20000265 Result: Down-regulated in Transcription
  misc_feature: MA Experiment 20000265 PARAMETER Experiment Name: At_Open_Flower_P Parameter: Age (day) Value: 21
  misc_feature: MA Experiment 20000265 PARAMETER Experiment Name: At_Open_Flower_P Parameter: Plant Line Value: WS
  misc_feature: MA Experiment 20000265 PARAMETER Experiment Name: At_Open_Flower_P Parameter: Tissue Value: Closed Flower vs. Whole Plant
  misc_feature: MA Experiment ID: 20000286 Result: Down-regulated in Transcription
  misc_feature: MA Experiment 20000286 PARAMETER Experiment Name: At_Open_Flower_P Parameter: Age (day) Value: 21
  misc_feature: MA Experiment 20000286 PARAMETER Experiment Name: At_Open_Flower_P Parameter: Plant Line Value: WS
  misc_feature: MA Experiment 20000286 PARAMETER Experiment Name: At_Open_Flower_P Parameter: Tissue Value: Half Open vs. Whole Plant
  misc_feature: MA Experiment ID: 20000306 Result: Up-regulated in Transcription
  misc_feature: MA Experiment 20000306 PARAMETER Experiment Name: At_Germinating_Seeds_Sub_P Parameter: Age (hr) Value: 6 vs. 0
  misc_feature: MA Experiment 20000306 PARAMETER Experiment Name: At_Germinating_Seeds_Sub_P Parameter: Organism Value: A. thaliana
  misc_feature: MA Experiment 20000306 PARAMETER Experiment Name: At_Germinating_Seeds_Sub_P Parameter: Plant Line Value: WS
  misc_feature: MA Experiment 20000306 PARAMETER Experiment Name: At_Germinating_Seeds_Sub_P Parameter: Tissue Value: Germinating Seeds
  misc_feature: MA Experiment ID: 20000307 Result: Up-regulated in Transcription
  misc_feature: MA Experiment 20000307 PARAMETER Experiment Name: At_Germinating_Seeds_Sub_P Parameter: Age (hr) Value: 24 vs. 0
  misc_feature: MA Experiment 20000307 PARAMETER Experiment Name: At_Germinating_Seeds_Sub_P Parameter: Organism Value: A. thaliana
  misc_feature: MA Experiment 20000307 PARAMETER Experiment Name: At_Germinating_Seeds_Sub_P Parameter: Plant Line Value: WS
  misc_feature: MA Experiment 20000307 PARAMETER Experiment Name: At_Germinating_Seeds_Sub_P Parameter: Tissue Value: Germinating Seeds
  misc_feature: MA Experiment ID: 20000347 Result: Up-regulated in Transcription
  misc_feature: MA Experiment 20000347 PARAMETER Experiment Name: At_2mM_SA_Sub_P Parameter: Age (day) Value: 14
  misc_feature: MA Experiment 20000347 PARAMETER Experiment Name: At_2mM_SA_Sub_P Parameter: Organism Value: A. thaliana
  misc_feature: MA Experiment 20000347 PARAMETER Experiment Name: At_2mM_SA_Sub_P Parameter: Plant Line Value: WS
  misc_feature: MA Experiment 20000347 PARAMETER Experiment Name: At_2mM_SA_Sub_P Parameter: Timepoint (hr) Value: 6
  misc_feature: MA Experiment 20000347 PARAMETER Experiment Name: At_2mM_SA_Sub_P Parameter: Tissue Value: Aerial
  misc_feature: MA Experiment 20000347 PARAMETER Experiment Name: At_2mM_SA_Sub_P Parameter: Treatment Value: 2mM SA vs. No Treatment
  misc_feature: MA Experiment ID: 20000440 Result: Down-regulated in Transcription
  misc_feature: MA Experiment 20000440 PARAMETER Experiment Name: At_Closed-Flower__Sub_P Parameter: Tissue Value: Closed Flower vs. Whole Plant
  misc_feature: MA Experiment ID: 20000495 Result: Up-regulated in Transcription
  misc_feature: MA Experiment 20000495 PARAMETER Experiment Name: At_Guard_Cells_P Parameter: Harvest Date Value: 8/2/2002
  misc_feature: MA Experiment 20000495 PARAMETER Experiment Name: At_Guard_Cells_P Parameter: Organism Value: A. thaliana
  misc_feature: MA Experiment 20000495 PARAMETER Experiment Name: At_Guard_Cells_P Parameter: Tissue Value: Guard Cells vs. Leaves
  misc_feature: MA Experiment ID: 20000794 Result: Down-regulated in Transcription
  misc_feature: MA Experiment 20000794 PARAMETER Experiment Name: At_Petals_P Parameter: Age (day) Value: 23-25 days
  misc_feature: MA Experiment 20000794 PARAMETER Experiment Name: At_Petals_P Parameter: Plant Line Value: WS
  misc_feature: MA Experiment 20000794 PARAMETER Experiment Name: At_Petals_P Parameter: Tissue Value: Petals vs. Whole plant
ctcgtctcaaaccgttccttctcttttaacacttgttcttttaaggcaaaaaggctcgagccacagagatctgagtttctcttcttcgagatctgatcgccgaatctcataatctcccatcgaagcagaatggagacttttctattcacatctgagtctgtaaacgagggacacccagacaagctctgtgaccagatctctgatgcagtcctcgatgcctgccttgaacaagaccctgacagcaaagttgcttgtgagacatgcaccaagaccaacatggtcatggtctttggtgagatcactaccaaggctactgttgactacgagaagattgtccgtgacacctgtcgcgccattggatttgtctctgatgatgttggtcttgatgctgacaaatgcaaagtcctagtcaacattgagcaacagagcccagacattgctcaaggagttcacggtcacttcaccaaatgtcctgaagaaattggagccggtgaccaagggcacatgtttggttatgccactgatgaaacccctgagttaatgcccctgagccatgttcttgccaccaagctcggtgctcgcctaacagaagtcagaaagaatggtacttgcgcctggctaagacctgacggcaaaacccaagtcactgttgagtactacaatgacaagggtgccatggtcccaatccgtgtccacacagtcctcatctccacccaacacgatgaaactgtgaccaacgacgaaattgcccgtgaccttaaggagcatgtcatcaagccagtcatcccagagaagtacctagacgagaaaaccatcttccacttgaacccttcaggccgattcgtcatcggtggaccccatggagacgctggtctcaccgggcgtaagatcatcatcgacacttacggtggatggggagctcacggaggcggtgcattctcaggtaaagacccaaccaaggtcgacagaagcggagcctacattgtgagacaagcagctaagagcgttgtggctaacgggatggctcgtagggctcttgttcaggtctcatacgccattggagtccctgagccattgtctgtctttgtggacacttatgagactggattgattccagacaaggagatactaaagattgtgaaggagagcttcgacttcagaccaggaatgatgacaattaaccttgacctaaagagaggaggaaacggaaggttcttgaaaactgcggcttacggacactttggaagagacgaccctgacttcacctgggaagtcgtcaagccactcaagtgggacaaacctcaagcttaaattttacctactctgtttctgtcttcattccacaaaccaattatctgctcacttttttatttctctgtttttgtggtttattgtgtttatgtatcattgtacttgagctatttcaattgggtgtttgtttttatggcgacttttacacggcttggagtaagtttcatgttgttcttatataattataaccatgaaaaattaatataaactaaagtgtc

SEQ ID NO: 24170 - protein, 393 aa, Arabidopsis thaliana
  peptide (1)..(393): Ceres Seq. ID no. 12328203
  misc_feature (116)..(238): Pfam Name: S-adenosylmethionine synthetase, central domain Pfam Description: S-adenosylmethionine synthetase, central domain
  misc_feature (1)..(390): Homolog of NCBI NO: 3024126 NR Description: S-adenosylmethionine synthetase 1 (Methionine
  misc_feature (1)..(393): Homolog of NCBI NO: 16226059 NR Description: S-adenosyl-L-methionine synthetase [Dendrobium
  misc_feature (1)..(393): Homolog of NCBI NO: 13540316 NR Description: S-adenosyl-L-methionine synthetase [Elaeagnus
  misc_feature (1)..(393): Homolog of NCBI NO: 13540318 NR Description: S-adenosyl-L-methionine synthetase [Elaeagnus
  misc_feature (1)..(393): Homolog of NCBI NO: 1346520 NR Description: S-adenosylmethionine synthetase (Methionine
  misc_feature (1)..(393): Homolog of NCBI NO: 14600068 NR Description: S-adenosylmethionine synthetase [Brassica juncea]
  misc_feature (1)..(393): Homolog of NCBI NO: 15234354 NR Description: S-adenosylmethionine synthase 2
  misc_feature (1)..(393): Homolog of NCBI NO: 14600072 NR Description: S-adenosylmethionine synthetase [Brassica juncea]
  misc_feature (1)..(393): Homolog of NCBI NO: 81647 NR Description: methionine adenosyltransferase (EC 2.5.1.6) -
  misc_feature (1)..(393): Homolog of NCBI NO: 15217781 NR Description: s-adenosylmethionine synthetase
METFLFTSESVNEGHPDKLCDQISDAVLDACLEQDPDSKVACETCTKTNMVMVFGEITTKATVDYEKIVRDTCRAIGFVSDDVGLDADKCKVLVNIEQQSPDIAQGVHGHFTKCPEEIGAGDQGHMFGYATDETPELMPLSHVLATKLGARLTEVRKNGTCAWLRPDGKTQVTVEYYNDKGAMVPIRVHTVLISTQHDETVTNDEIARDLKEHVIKPVIPEKYLDEKTIFHLNPSGRFVIGGPHGDAGLTGRKIIIDTYGGWGAHGGGAFSGKDPTKVDRSGAYIVRQAAKSVVANGMARRALVQVSYAIGVPEPLSVFVDTYETGLIPDKEILKIVKESFDFRPGMMTINLDLKRGGNGRFLKTAAYGHFGRDDPDFTWEVVKPLKWDKPQA

SEQ ID NO: 24171 - protein, 344 aa, Arabidopsis thaliana
  peptide (1)..(344): Ceres Seq. ID no. 12328204
  misc_feature (67)..(189): Pfam Name: S-adenosylmethionine synthetase, central domain Pfam Description: S-adenosylmethionine synthetase, central domain
  misc_feature (1)..(341): Homolog of NCBI NO: 3024126 NR Description: S-adenosylmethionine synthetase 1 (Methionine
  misc_feature (1)..(344): Homolog of NCBI NO: 16226059 NR Description: S-adenosyl-L-methionine synthetase [Dendrobium
  misc_feature (1)..(344): Homolog of NCBI NO: 13540316 NR Description: S-adenosyl-L-methionine synthetase [Elaeagnus
  misc_feature (1)..(344): Homolog of NCBI NO: 13540318 NR Description: S-adenosyl-L-methionine synthetase [Elaeagnus
  misc_feature (1)..(344): Homolog of NCBI NO: 1346520 NR Description: S-adenosylmethionine synthetase (Methionine
  misc_feature (1)..(344): Homolog of NCBI NO: 14600068 NR Description: S-adenosylmethionine synthetase [Brassica juncea]
  misc_feature (1)..(344): Homolog of NCBI NO: 15234354 NR Description: S-adenosylmethionine synthase 2
  misc_feature (1)..(344): Homolog of NCBI NO: 14600072 NR Description: S-adenosylmethionine synthetase [Brassica juncea]
  misc_feature (1)..(344): Homolog of NCBI NO: 81647 NR Description: methionine adenosyltransferase (EC 2.5.1.6) -
  misc_feature (1)..(344): Homolog of NCBI NO: 15217781 NR Description: s-adenosylmethionine synthetase
MVMVFGEITTKATVDYEKIVRDTCRAIGFVSDDVGLDADKCKVLVNIEQQSPDIAQGVHGHFTKCPEEIGAGDQGHMFGYATDETPELMPLSHVLATKLGARLTEVRKNGTCAWLRPDGKTQVTVEYYNDKGAMVPIRVHTVLISTQHDETVTNDEIARDLKEHVIKPVIPEKYLDEKTIFHLNPSGRFVIGGPHGDAGLTGRKIIIDTYGGWGAHGGGAFSGKDPTKVDRSGAYIVRQAAKSVVANGMARRALVQVSYAIGVPEPLSVFVDTYETGLIPDKEILKIVKESFDFRPGMMTINLDLKRGGNGRFLKTAAYGHFGRDDPDFTWEVVKPLKWDKPQA

SEQ ID NO: 24172 - protein, 342 aa, Arabidopsis thaliana
  peptide (1)..(342): Ceres Seq. ID no. 12328205
  misc_feature (65)..(187): Pfam Name: S-adenosylmethionine synthetase, central domain Pfam Description: S-adenosylmethionine synthetase, central domain
  misc_feature (1)..(339): Homolog of NCBI NO: 3024126 NR Description: S-adenosylmethionine synthetase 1 (Methionine
  misc_feature (1)..(342): Homolog of NCBI NO: 16226059 NR Description: S-adenosyl-L-methionine synthetase [Dendrobium
  misc_feature (1)..(342): Homolog of NCBI NO: 13540316 NR Description: S-adenosyl-L-methionine synthetase [Elaeagnus
  misc_feature (1)..(342): Homolog of NCBI NO: 13540318 NR Description: S-adenosyl-L-methionine synthetase [Elaeagnus
  misc_feature (1)..(342): Homolog of NCBI NO: 1346520 NR Description: S-adenosylmethionine synthetase (Methionine
  misc_feature (1)..(342): Homolog of NCBI NO: 14600068 NR Description: S-adenosylmethionine synthetase [Brassica juncea]
  misc_feature (1)..(342): Homolog of NCBI NO: 15234354 NR Description: S-adenosylmethionine synthase 2
  misc_feature (1)..(342): Homolog of NCBI NO: 14600072 NR Description: S-adenosylmethionine synthetase [Brassica juncea]
  misc_feature (1)..(342): Homolog of NCBI NO: 81647 NR Description: methionine adenosyltransferase (EC 2.5.1.6) -
  misc_feature (1)..(342): Homolog of NCBI NO: 15217781 NR Description: s-adenosylmethionine synthetase
MVFGEITTKATVDYEKIVRDTCRAIGFVSDDVGLDADKCKVLVNIEQQSPDIAQGVHGHFTKCPEEIGAGDQGHMFGYATDETPELMPLSHVLATKLGARLTEVRKNGTCAWLRPDGKTQVTVEYYNDKGAMVPIRVHTVLISTQHDETVTNDEIARDLKEHVIKPVIPEKYLDEKTIFHLNPSGRFVIGGPHGDAGLTGRKIIIDTYGGWGAHGGGAFSGKDPTKVDRSGAYIVRQAAKSVVANGMARRALVQVSYAIGVPEPLSVFVDTYETGLIPDKEILKIVKESFDFRPGMMTINLDLKRGGNGRFLKTAAYGHFGRDDPDFTWEVVKPLKWDKPQA

SEQ ID NO: 24173 - DNA, 1501 bp, Arabidopsis thaliana
  misc_feature (1)..(1501): Ceres Seq. ID no. 13490946
  misc_feature: MA Experiment ID: 108435 Result: Down-regulated in Transcription
  misc_feature: MA Experiment 108435 PARAMETER Experiment Name: At_stm_Mutants_cDNA_P Parameter: Plant Line Value: wt Landsburg vs stm
  misc_feature: MA Experiment 108435 PARAMETER Experiment Name: At_stm_Mutants_cDNA_P Parameter: Tissue Value: Shoot Apical Meristem Region
  misc_feature: MA Experiment ID: 108462 Result: Up-regulated in Transcription
  misc_feature: MA Experiment 108462 PARAMETER Experiment Name: At_Germinating_Seeds_cDNA_P Parameter: Age (day) Value: 2 vs. 0
  misc_feature: MA Experiment 108462 PARAMETER Experiment Name: At_Germinating_Seeds_cDNA_P Parameter: Tissue Value: Germinating Seeds
  misc_feature: MA Experiment ID: 108464 Result: Up-regulated in Transcription
  misc_feature: MA Experiment 108464 PARAMETER Experiment Name: At_Germinating_Seeds_cDNA_P Parameter: Age (day) Value: 4 vs. 0
  misc_feature: MA Experiment 108464 PARAMETER Experiment Name: At_Germinating_Seeds_cDNA_P Parameter: Tissue Value: Germinating Seeds
  misc_feature: MA Experiment ID: 108473 Result: Up-regulated in Transcription
  misc_feature: MA Experiment 108473 PARAMETER Experiment Name: At_Drought_Flowers_cDNA_P Parameter: Timepoint (hr) Value: 7 d
  misc_feature: MA Experiment 108473 PARAMETER Experiment Name: At_Drought_Flowers_cDNA_P Parameter: Tissue Value: Flower
  misc_feature: MA Experiment 108473 PARAMETER Experiment Name: At_Drought_Flowers_cDNA_P Parameter: Treatment Value: Drought vs. No Drought
  misc_feature: MA Experiment ID: 108488 Result: Up-regulated in Transcription
  misc_feature: MA Experiment ID: 108501 Result: Up-regulated in Transcription
  misc_feature: MA Experiment 108501 PARAMETER Experiment Name: At_ap2_floral_buds_cDNA_P Parameter: Plant Line Value: ap2 (Ler.)
  misc_feature: MA Experiment 108501 PARAMETER Experiment Name: At_ap2_floral_buds_cDNA_P Parameter: Tissue Value: Closed Flower
  misc_feature: MA Experiment ID: 108572 Result: Up-regulated in Transcription
  misc_feature: MA Experiment 108572 PARAMETER Experiment Name: At_Drought_cDNA_P Parameter: Timepoint (hr) Value: 1
  misc_feature: MA Experiment 108572 PARAMETER Experiment Name: At_Drought_cDNA_P Parameter: Tissue Value: Aerial
  misc_feature: MA Experiment 108572 PARAMETER Experiment Name: At_Drought_cDNA_P Parameter: Treatment Value: Drought vs. No Drought
  misc_feature: MA Experiment ID: 108573 Result: Up-regulated in Transcription
  misc_feature: MA Experiment 108573 PARAMETER Experiment Name: At_Drought_cDNA_P Parameter: Timepoint (hr) Value: 6
  misc_feature: MA Experiment 108573 PARAMETER Experiment Name: At_Drought_cDNA_P Parameter: Tissue Value: Aerial
  misc_feature: MA Experiment 108573 PARAMETER Experiment Name: At_Drought_cDNA_P Parameter: Treatment Value: Drought vs. No Drought
  misc_feature: MA Experiment ID: 108579 Result: Up-regulated in Transcription
  misc_feature: MA Experiment 108579 PARAMETER Experiment Name: At_4deg_Cold_cDNA_P Parameter: Temperature (deg C) Value: 4 vs. 22
  misc_feature: MA Experiment 108579 PARAMETER Experiment Name: At_4deg_Cold_cDNA_P Parameter: Timepoint (hr) Value: 6
  misc_feature: MA Experiment 108579 PARAMETER Experiment Name: At_4deg_Cold_cDNA_P Parameter: Tissue Value: Aerial
  misc_feature: MA Experiment ID: 108594 Result: Up-regulated in Transcription
  misc_feature: MA Experiment 108594 PARAMETER Experiment Name: At_Ler-rhl_Root_cDNA_P Parameter: Plant Line Value: null
  misc_feature: MA Experiment ID: 108595 Result: Down-regulated in Transcription
  misc_feature: MA Experiment 108595 PARAMETER Experiment Name: At_Ler-pi_Ovule_cDNA_P Parameter: Plant Line Value: null
  misc_feature: MA Experiment ID: 108608 Result: Down-regulated in Transcription
  misc_feature: MA Experiment 108608 PARAMETER Experiment Name: At_100uM_ABA_cDNA_P Parameter: Timepoint (hr) Value: 1
  misc_feature: MA Experiment 108608 PARAMETER Experiment Name: At_100uM_ABA_cDNA_P Parameter: Tissue Value: Aerial
  misc_feature: MA Experiment 108608 PARAMETER Experiment Name: At_100uM_ABA_cDNA_P Parameter: Treatment Value: 100uM ABA vs. No Treatment
  misc_feature: MA Experiment ID: 20000069 Result: Down-regulated in Transcription
  misc_feature: MA Experiment 20000069 PARAMETER Experiment Name: At_100uM_ABA_Mutants_cDNA_P Parameter: Plant Line Value: CS23
  misc_feature: MA Experiment 20000069 PARAMETER Experiment Name: At_100uM_ABA_Mutants_cDNA_P Parameter: Timepoint (hr) Value: 6
  misc_feature: MA Experiment 20000069 PARAMETER Experiment Name: At_100uM_ABA_Mutants_cDNA_P Parameter: Tissue Value: Aerial
  misc_feature: MA Experiment 20000069 PARAMETER Experiment Name: At_100uM_ABA_Mutants_cDNA_P Parameter: Treatment Value: 100uM ABA vs. No Treatment
  misc_feature: MA Experiment ID: 20000070 Result: Down-regulated in Transcription
  misc_feature: MA Experiment 20000070 PARAMETER Experiment Name: At_100uM_ABA_Mutants_cDNA_P Parameter: Plant Line Value: CS24
  misc_feature: MA Experiment 20000070 PARAMETER Experiment Name: At_100uM_ABA_Mutants_cDNA_P Parameter: Timepoint (hr) Value: 6
  misc_feature: MA Experiment 20000070 PARAMETER Experiment Name: At_100uM_ABA_Mutants_cDNA_P Parameter: Tissue Value: Aerial
  misc_feature: MA Experiment 20000070 PARAMETER Experiment Name: At_100uM_ABA_Mutants_cDNA_P Parameter: Treatment Value: 100uM ABA vs. No Treatment
  misc_feature: MA Experiment ID: 20000071 Result: Down-regulated in Transcription
  misc_feature: MA Experiment 20000071 PARAMETER Experiment Name: At_100uM_ABA_Mutants_cDNA_P Parameter: Plant Line Value: CS8104
  misc_feature: MA Experiment 20000071 PARAMETER Experiment Name: At_100uM_ABA_Mutants_cDNA_P Parameter: Timepoint (hr) Value: 6
  misc_feature: MA Experiment 20000071 PARAMETER Experiment Name: At_100uM_ABA_Mutants_cDNA_P Parameter: Tissue Value: Aerial
  misc_feature: MA Experiment 20000071 PARAMETER Experiment Name: At_100uM_ABA_Mutants_cDNA_P Parameter: Treatment Value: 100uM ABA vs. No Treatment
  misc_feature: MA Experiment ID: 20000086 Result: Down-regulated in Transcription
  misc_feature: MA Experiment 20000086 PARAMETER Experiment Name: At_100uM_ABA_Mutants_cDNA_P Parameter: Plant Line Value: CS22
  misc_feature: MA Experiment 20000086 PARAMETER Experiment Name: At_100uM_ABA_Mutants_cDNA_P Parameter: Timepoint (hr) Value: 6
  misc_feature: MA Experiment 20000086 PARAMETER Experiment Name: At_100uM_ABA_Mutants_cDNA_P Parameter: Tissue Value: Aerial
  misc_feature: MA Experiment 20000086 PARAMETER Experiment Name: At_100uM_ABA_Mutants_cDNA_P Parameter: Treatment Value: 100uM ABA vs. No Treatment
  misc_feature: MA Experiment ID: 20000087 Result: Down-regulated in Transcription
  misc_feature: MA Experiment 20000087 PARAMETER Experiment Name: At_100uM_ABA_Mutants_cDNA_P Parameter: Plant Line Value: WS
  misc_feature: MA Experiment 20000087 PARAMETER Experiment Name: At_100uM_ABA_Mutants_cDNA_P Parameter: Timepoint (hr) Value: 6
  misc_feature: MA Experiment 20000087 PARAMETER Experiment Name: At_100uM_ABA_Mutants_cDNA_P Parameter: Tissue Value: Aerial
  misc_feature: MA Experiment 20000087 PARAMETER Experiment Name: At_100uM_ABA_Mutants_cDNA_P Parameter: Treatment Value: 100uM ABA vs. No Treatment
  misc_feature: MA Experiment ID: 20000089 Result: Down-regulated in Transcription
  misc_feature: MA Experiment ID: 20000113 Result: Up-regulated in Transcription
  misc_feature: MA Experiment 20000113 PARAMETER Experiment Name: At_42deg_Heat_cDNA_P Parameter: Temperature (deg C) Value: 42 vs. 22
  misc_feature: MA Experiment 20000113 PARAMETER Experiment Name: At_42deg_Heat_cDNA_P Parameter: Timepoint (hr) Value: 8
  misc_feature: MA Experiment 20000113 PARAMETER Experiment Name: At_42deg_Heat_cDNA_P Parameter: Tissue Value: Aerial
  misc_feature: MA Experiment ID: 20000117 Result: Down-regulated in Transcription
  misc_feature: MA Experiment 20000117 PARAMETER Experiment Name: At_100uM_ABA_Mutants_cDNA_P Parameter: Plant Line Value: Columbia
  misc_feature: MA Experiment 20000117 PARAMETER Experiment Name: At_100uM_ABA_Mutants_cDNA_P Parameter: Timepoint (hr) Value: 6
  misc_feature: MA Experiment 20000117 PARAMETER Experiment Name: At_100uM_ABA_Mutants_cDNA_P Parameter: Tissue Value: Aerial
  misc_feature: MA Experiment 20000117 PARAMETER Experiment Name: At_100uM_ABA_Mutants_cDNA_P Parameter: Treatment Value: 100uM ABA vs. No Treatment
  misc_feature: MA Experiment ID: 20000314 Result: Down-regulated in Transcription
  misc_feature: MA Experiment 20000314 PARAMETER Experiment Name: At_14day_Shoots-Roots_Sub_P Parameter: Age (day) Value: 14
  misc_feature: MA Experiment 20000314 PARAMETER Experiment Name: At_14day_Shoots-Roots_Sub_P Parameter: Organism Value: A. thaliana
  misc_feature: MA Experiment 20000314 PARAMETER Experiment Name: At_14day_Shoots-Roots_Sub_P Parameter: Plant Line Value: WS
  misc_feature: MA Experiment 20000314 PARAMETER Experiment Name: At_14day_Shoots-Roots_Sub_P Parameter: Tissue Value: Roots vs. Whole Plant
  misc_feature: MA Experiment ID: 20000315 Result: Up-regulated in Transcription
  misc_feature: MA Experiment 20000315 PARAMETER Experiment Name: At_14day_Shoots-Roots_Sub_P Parameter: Age (day) Value: 14
  misc_feature: MA Experiment 20000315 PARAMETER Experiment Name: At_14day_Shoots-Roots_Sub_P Parameter: Organism Value: A. thaliana
  misc_feature: MA Experiment 20000315 PARAMETER Experiment Name: At_14day_Shoots-Roots_Sub_P Parameter: Plant Line Value: WS
  misc_feature: MA Experiment 20000315 PARAMETER Experiment Name: At_14day_Shoots-Roots_Sub_P Parameter: Tissue Value: Shoots vs. Whole Plant
  misc_feature: MA Experiment ID: 20000355 Result: Down-regulated in Transcription
  misc_feature: MA Experiment 20000355 PARAMETER Experiment Name: At_Siliques_Sub_P Parameter: Age (day) Value: 21
  misc_feature: MA Experiment 20000355 PARAMETER Experiment Name: At_Siliques_Sub_P Parameter: Organism Value: A. thaliana
  misc_feature: MA Experiment 20000355 PARAMETER Experiment Name: At_Siliques_Sub_P Parameter: Plant Line Value: WS
  misc_feature: MA Experiment 20000355 PARAMETER Experiment Name: At_Siliques_Sub_P Parameter: Tissue Value: Less Than 5mm Siliques vs. Whole Plant
  misc_feature: MA Experiment ID: 20000440 Result: Down-regulated in Transcription
  misc_feature: MA Experiment 20000440 PARAMETER Experiment Name: At_Closed-Flower__Sub_P Parameter: Tissue Value: Closed Flower vs. Whole Plant
accacaagattgttggagaaatggtttcatcacttaacatcatcgaagtggcacgagtcaccccttcaaactctgactcggccgagtcactcagtctcccactcacttatttcgaccttatctattataaacttcgcgccgtcgaacgagtcatcttctaccgaatcaccaacgtaactcgccctttctttgactcagtcatcgtcccaaatctcaaaacctctctatcctcatgcctctctcactatctcccactcgctggcaaacttatatgggaaccacttgatcacaaaccaaccattgtctactcccaaaacgacgacgtttcattcagcgtcgccgaaacaaacgctgatttctctagtttatccggcaatgaaccattcccctccaccgagttgtacccgttagtccccgcgttacaaagctccgacgactcggcctccattgtgtcgttccaagtcacgttatttccaaaccaaggattttgcatcggcgtaagtgcacatcatgccgttttagatggaaaaacgacaaccatgtttctcaaatcctgggctcacatatgtaaacatcaagatttttctctaccgcaggatttaatcccaacttacgatcgtacggtcattaaaagtccaacggatagtgaaaacaaagttttgaatgagtggcgctctttcaccaaaatattagctggtggtaaagaacctgccaaccccaagagtttaaagcttaatccatcatttgagattggtcctgacgttgtccgatacactctccagctcacgcgtgaagatatccaaacgcttcgcgagagacttaagagagaagtttcctcctcctcctcctcaacctcatcctcaaaagagcttcgcttgtctacatttgttattgtttactcgtatgtattagtatgcataataagagctcgaggcggggaaccacatagaccggttggatatgcgttttcggtggattgtcgaagcctcatgaatccgccgactccaaattattttggaaattgcatcgctggttgctctagaatgatgctgacggcaaaaatgtttatgggtgaagaaggacttttggctgctgcgacaatggtcagcgattcgatcgaagaatgggacgagagttttgcgtggaagattccggattttgtagcatatgcaactcttccaccagagacacaacttattttagtttcagggtctaaccgatttggagtatacgagttggattttgggtggggtagacctgataaagtgatggttgtgtcgatcagtccaggcaatgggatttccatggcggaaagtagagaccaaaacggcagtgtggagattggcttctcactcaagaagcacgaaatggacacattgattgatttgcttcattgtgaactaactatttaaataaacttttctttacatgaaaaaattgattctctaaacaatatctttaaaacgataacgccaatttatctaatcaatttatttttagc

SEQ ID NO: 24174 - protein, 469 aa, Arabidopsis thaliana
  peptide (1)..(469): Ceres Seq. ID no. 13490947
  misc_feature (9)..(468): Pfam Name: Transferase family Pfam Description: Transferase family
  misc_feature (10)..(464): Homolog of NCBI NO: 15240152 NR Description: transferase family [Arabidopsis thaliana]
  misc_feature (10)..(469): Homolog of NCBI NO: 15230049 NR Description: transferase family [Arabidopsis thaliana]
  misc_feature (10)..(464): Homolog of NCBI NO: 15230048 NR Description: transferase family [Arabidopsis thaliana]
  misc_feature (10)..(462): Homolog of NCBI NO: 15230034 NR Description: transferase family [Arabidopsis thaliana]
  misc_feature (7)..(464): Homolog of NCBI NO: 15241632 NR Description: transferase family [Arabidopsis thaliana]
  misc_feature (6)..(345): Homolog of NCBI NO: 18421824 NR Description: transferase family [Arabidopsis thaliana]
  misc_feature (6)..(464): Homolog of NCBI NO: 10177550 NR Description: anthocyanin acyltransferase-like protein
  misc_feature (6)..(464): Homolog of NCBI NO: 15450469 NR Description: AT5g39050/MXF12_60 [Arabidopsis thaliana]
  misc_feature (7)..(469): Homolog of NCBI NO: 21593292 NR Description: acyltransferase-like protein [Arabidopsis
  misc_feature (7)..(469): Homolog of NCBI NO: 15241631 NR Description: transferase family [Arabidopsis thaliana]
HKIVGEMVSSLNIIEVARVTPSNSDSAESLSLPLTYFDLIYYKLRAVERVIFYRITNVTRPFFDSVIVPNLKTSLSSCLSHYLPLAGKLIWEPLDHKPTIVYSQNDDVSFSVAETNADFSSLSGNEPFPSTELYPLVPALQSSDDSASIVSFQVTLFPNQGFCIGVSAHHAVLDGKTTTMFLKSWAHICKHQDFSLPQDLIPTYDRTVIKSPTDSENKVLNEWRSFTKILAGGKEPANPKSLKLNPSFEIGPDVVRYTLQLTREDIQTLRERLKREVSSSSSSTSSSKELRLSTFVIVYSYVLVCIIRARGGEPHRPVGYAFSVDCRSLMNPPTPNYFGNCIAGCSRMMLTAKMFMGEEGLLAAATMVSDSIEEWDESFAWKIPDFVAYATLPPETQLILVSGSNRFGVYELDFGWGRPDKVMVVSISPGNGISMAESRDQNGSVEIGFSLKKHEMDTLIDLLHCELTI

SEQ ID NO: 24175 - protein, 463 aa, Arabidopsis thaliana
  peptide (1)..(463): Ceres Seq. ID no. 13490948
  misc_feature (3)..(462): Pfam Name: Transferase family Pfam Description: Transferase family
  misc_feature (1)..(463): Homolog of NCBI NO: 21593292 NR Description: acyltransferase-like protein [Arabidopsis
  misc_feature (4)..(458): Homolog of NCBI NO: 15240152 NR Description: transferase family [Arabidopsis thaliana]
  misc_feature (4)..(458): Homolog of NCBI NO: 15230048 NR Description: transferase family [Arabidopsis thaliana]
  misc_feature (1)..(458): Homolog of NCBI NO: 15241632 NR Description: transferase family [Arabidopsis thaliana]
  misc_feature (1)..(458): Homolog of NCBI NO: 10177550 NR Description: anthocyanin acyltransferase-like protein
  misc_feature (1)..(458): Homolog of NCBI NO: 15450469 NR Description: AT5g39050/MXF12_60 [Arabidopsis thaliana]
  misc_feature (1)..(339): Homolog of NCBI NO: 18421824 NR Description: transferase family [Arabidopsis thaliana]
  misc_feature (4)..(456): Homolog of NCBI NO: 15230034 NR Description: transferase family [Arabidopsis thaliana]
  misc_feature (4)..(463): Homolog of NCBI NO: 15230049 NR Description: transferase family [Arabidopsis thaliana]
  misc_feature (1)..(463): Homolog of NCBI NO: 15241631 NR Description: transferase family [Arabidopsis thaliana]
MVSSLNIIEVARVTPSNSDSAESLSLPLTYFDLIYYKLRAVERVIFYRITNVTRPFFDSVIVPNLKTSLSSCLSHYLPLAGKLIWEPLDHKPTIVYSQNDDVSFSVAETNADFSSLSGNEPFPSTELYPLVPALQSSDDSASIVSFQVTLFPNQGFCIGVSAHHAVLDGKTTTMFLKSWAHICKHQDFSLPQDLIPTYDRTVIKSPTDSENKVLNEWRSFTKILAGGKEPANPKSLKLNPSFEIGPDVVRYTLQLTREDIQTLRERLKREVSSSSSSTSSSKELRLSTFVIVYSYVLVCIIRARGGEPHRPVGYAFSVDCRSLMNPPTPNYFGNCIAGCSRMMLTAKMFMGEEGLLAAATMVSDSIEEWDESFAWKIPDFVAYATLPPETQLILVSGSNRFGVYELDFGWGRPDKVMVVSISPGNGISMAESRDQNGSVEIGFSLKKHEMDTLIDLLHCELTI

SEQ ID NO: 24176 - protein, 290 aa, Arabidopsis thaliana
  peptide (1)..(290): Ceres Seq. ID no. 13490949
  misc_feature (1)..(289): Pfam Name: Transferase family Pfam Description: Transferase family
  misc_feature (1)..(285): Homolog of NCBI NO: 15240152 NR Description: transferase family [Arabidopsis thaliana]
  misc_feature (1)..(290): Homolog of NCBI NO: 15230049 NR Description: transferase family [Arabidopsis thaliana]
  misc_feature (1)..(285): Homolog of NCBI NO: 15230048 NR Description: transferase family [Arabidopsis thaliana]
  misc_feature (1)..(283): Homolog of NCBI NO: 15230034 NR Description: transferase family [Arabidopsis thaliana]
  misc_feature (1)..(285): Homolog of NCBI NO: 15241632 NR Description: transferase family [Arabidopsis thaliana]
  misc_feature (1)..(166): Homolog of NCBI NO: 18421824 NR Description: transferase family [Arabidopsis thaliana]
  misc_feature (1)..(285): Homolog of NCBI NO: 10177550 NR Description: anthocyanin acyltransferase-like protein
  misc_feature (1)..(285): Homolog of NCBI NO: 15450469 NR Description: AT5g39050/MXF12_60 [Arabidopsis thaliana]
  misc_feature (1)..(290): Homolog of NCBI NO: 21593292 NR Description: acyltransferase-like protein [Arabidopsis
  misc_feature (1)..(290): Homolog of NCBI NO: 15241631 NR Description: transferase family [Arabidopsis thaliana]
MFLKSWAHICKHQDFSLPQDLIPTYDRTVIKSPTDSENKVLNEWRSFTKILAGGKEPANPKSLKLNPSFEIGPDVVRYTLQLTREDIQTLRERLKREVSSSSSSTSSSKELRLSTFVIVYSYVLVCIIRARGGEPHRPVGYAFSVDCRSLMNPPTPNYFGNCIAGCSRMMLTAKMFMGEEGLLAAATMVSDSIEEWDESFAWKIPDFVAYATLPPETQLILVSGSNRFGVYELDFGWGRPDKVMVVSISPGNGISMAESRDQNGSVEIGFSLKKHEMDTLIDLLHCELTI

SEQ ID NO: 24177 - DNA, 1793 bp, Arabidopsis thaliana
  misc_feature (1)..(1793): Ceres Seq. ID no. 13499642
  misc_feature: MA Experiment ID: 108434 Result: Up-regulated in Transcription
  misc_feature: MA Experiment 108434 PARAMETER Experiment Name: At_Root_Tips_cDNA_P Parameter: Tissue Value: Root Tips
  misc_feature: MA Experiment ID: 108473 Result: Down-regulated in Transcription
  misc_feature: MA Experiment 108473 PARAMETER Experiment Name: At_Drought_Flowers_cDNA_P Parameter: Timepoint (hr) Value: 7 d
  misc_feature: MA Experiment 108473 PARAMETER Experiment Name: At_Drought_Flowers_cDNA_P Parameter: Tissue Value: Flower
  misc_feature: MA Experiment 108473 PARAMETER Experiment Name: At_Drought_Flowers_cDNA_P Parameter: Treatment Value: Drought vs. No Drought
  misc_feature: MA Experiment ID: 108572 Result: Down-regulated in Transcription
  misc_feature: MA Experiment 108572 PARAMETER Experiment Name: At_Drought_cDNA_P Parameter: Timepoint (hr) Value: 1
  misc_feature: MA Experiment 108572 PARAMETER Experiment Name: At_Drought_cDNA_P Parameter: Tissue Value: Aerial
  misc_feature: MA Experiment 108572 PARAMETER Experiment Name: At_Drought_cDNA_P Parameter: Treatment Value: Drought vs. No Drought
  misc_feature: MA Experiment ID: 108573 Result: Down-regulated in Transcription
  misc_feature: MA Experiment 108573 PARAMETER Experiment Name: At_Drought_cDNA_P Parameter: Timepoint (hr) Value: 6
  misc_feature: MA Experiment 108573 PARAMETER Experiment Name: At_Drought_cDNA_P Parameter: Tissue Value: Aerial
  misc_feature: MA Experiment 108573 PARAMETER Experiment Name: At_Drought_cDNA_P Parameter: Treatment Value: Drought vs. No Drought
  misc_feature: MA Experiment ID: 108668 Result: Down-regulated in Transcription
  misc_feature: MA Experiment 108668 PARAMETER Experiment Name: At_2mM_SA_cDNA_P Parameter: Plant Line Value: WS
  misc_feature: MA Experiment 108668 PARAMETER Experiment Name: At_2mM_SA_cDNA_P Parameter: Timepoint (hr) Value: 6
  misc_feature: MA Experiment 108668 PARAMETER Experiment Name: At_2mM_SA_cDNA_P Parameter: Treatment Value: 2mM SA vs. No Treatment
  misc_feature: MA Experiment ID: 20000069 Result: Down-regulated in Transcription
  misc_feature: MA Experiment 20000069 PARAMETER Experiment Name: At_100uM_ABA_Mutants_cDNA_P Parameter: Plant Line Value: CS23
  misc_feature: MA Experiment 20000069 PARAMETER Experiment Name: At_100uM_ABA_Mutants_cDNA_P Parameter: Timepoint (hr) Value: 6
  misc_feature: MA Experiment 20000069 PARAMETER Experiment Name: At_100uM_ABA_Mutants_cDNA_P Parameter: Tissue Value: Aerial
  misc_feature: MA Experiment 20000069 PARAMETER Experiment Name: At_100uM_ABA_Mutants_cDNA_P Parameter: Treatment Value: 100uM ABA vs. No Treatment
  misc_feature: MA Experiment ID: 20000071 Result: Down-regulated in Transcription
  misc_feature: MA Experiment 20000071 PARAMETER Experiment Name: At_100uM_ABA_Mutants_cDNA_P Parameter: Plant Line Value: CS8104
  misc_feature: MA Experiment 20000071 PARAMETER Experiment Name: At_100uM_ABA_Mutants_cDNA_P Parameter: Timepoint (hr) Value: 6
  misc_feature: MA Experiment 20000071 PARAMETER Experiment Name: At_100uM_ABA_Mutants_cDNA_P Parameter: Tissue Value: Aerial
  misc_feature: MA Experiment 20000071 PARAMETER Experiment Name: At_100uM_ABA_Mutants_cDNA_P Parameter: Treatment Value: 100uM ABA vs. No Treatment
  misc_feature: MA Experiment ID: 20000072 Result: Down-regulated in Transcription
  misc_feature: MA Experiment 20000072 PARAMETER Experiment Name: At_100uM_ABA_Mutants_cDNA_P Parameter: Plant Line Value: CS8105
  misc_feature: MA Experiment 20000072 PARAMETER Experiment Name: At_100uM_ABA_Mutants_cDNA_P Parameter: Timepoint (hr) Value: 6
  misc_feature: MA Experiment 20000072 PARAMETER Experiment Name: At_100uM_ABA_Mutants_cDNA_P Parameter: Tissue Value: Aerial
  misc_feature: MA Experiment 20000072 PARAMETER Experiment Name: At_100uM_ABA_Mutants_cDNA_P Parameter: Treatment Value: 100uM ABA vs. No Treatment
  misc_feature: MA Experiment ID: 20000086 Result: Down-regulated in Transcription
  misc_feature: MA Experiment 20000086 PARAMETER Experiment Name: At_100uM_ABA_Mutants_cDNA_P Parameter: Plant Line Value: CS22
  misc_feature: MA Experiment 20000086 PARAMETER Experiment Name: At_100uM_ABA_Mutants_cDNA_P Parameter: Timepoint (hr) Value: 6
  misc_feature: MA Experiment 20000086 PARAMETER Experiment Name: At_100uM_ABA_Mutants_cDNA_P Parameter: Tissue Value: Aerial
  misc_feature: MA Experiment 20000086 PARAMETER Experiment Name: At_100uM_ABA_Mutants_cDNA_P Parameter: Treatment Value: 100uM ABA vs. No Treatment
  misc_feature: MA Experiment ID: 20000087 Result: Down-regulated in Transcription
  misc_feature: MA Experiment 20000087 PARAMETER Experiment Name: At_100uM_ABA_Mutants_cDNA_P Parameter: Plant Line Value: WS
  misc_feature: MA Experiment 20000087 PARAMETER Experiment Name: At_100uM_ABA_Mutants_cDNA_P Parameter: Timepoint (hr) Value: 6
  misc_feature: MA Experiment 20000087 PARAMETER Experiment Name: At_100uM_ABA_Mutants_cDNA_P Parameter: Tissue Value: Aerial
  misc_feature: MA Experiment 20000087 PARAMETER Experiment Name: At_100uM_ABA_Mutants_cDNA_P Parameter: Treatment Value: 100uM ABA vs. No Treatment
  misc_feature: MA Experiment ID: 20000090 Result: Down-regulated in Transcription
  misc_feature: MA Experiment ID: 20000113 Result: Down-regulated in Transcription
  misc_feature: MA Experiment 20000113 PARAMETER Experiment Name: At_42deg_Heat_cDNA_P Parameter: Temperature (deg C) Value: 42 vs. 22
  misc_feature: MA Experiment 20000113 PARAMETER Experiment Name: At_42deg_Heat_cDNA_P Parameter: Timepoint (hr) Value: 8
  misc_feature: MA Experiment 20000113 PARAMETER Experiment Name: At_42deg_Heat_cDNA_P Parameter: Tissue Value: Aerial
  misc_feature: MA Experiment ID: 20000234 Result: Up-regulated in Transcription
  misc_feature: MA Experiment 20000234 PARAMETER Experiment Name: At_Siliques_P Parameter: Age (day) Value: 21
  misc_feature: MA Experiment 20000234 PARAMETER Experiment Name: At_Siliques_P Parameter: Organism Value: A. thaliana
  misc_feature: MA Experiment 20000234 PARAMETER Experiment Name: At_Siliques_P Parameter: Plant Line Value: WS
  misc_feature: MA Experiment 20000234 PARAMETER Experiment Name: At_Siliques_P Parameter: Tissue Value: Less Than 5mm Siliques vs. Whole Plant
  misc_feature: MA Experiment ID: 20000265 Result: Up-regulated in Transcription
  misc_feature: MA Experiment 20000265 PARAMETER Experiment Name: At_Open_Flower_P Parameter: Age (day) Value: 21
  misc_feature: MA Experiment 20000265 PARAMETER Experiment Name: At_Open_Flower_P Parameter: Plant Line Value: WS
  misc_feature: MA Experiment 20000265 PARAMETER Experiment Name: At_Open_Flower_P Parameter: Tissue Value: Closed Flower vs. Whole Plant
  misc_feature: MA Experiment ID: 20000286 Result: Up-regulated in Transcription
  misc_feature: MA Experiment 20000286 PARAMETER Experiment Name: At_Open_Flower_P Parameter: Age (day) Value: 21
  misc_feature: MA Experiment 20000286 PARAMETER Experiment Name: At_Open_Flower_P Parameter: Plant Line Value: WS
  misc_feature: MA Experiment 20000286 PARAMETER Experiment Name: At_Open_Flower_P Parameter: Tissue Value: Half Open vs. Whole Plant
  misc_feature: MA Experiment ID: 20000436 Result: Down-regulated in Transcription
  misc_feature: MA Experiment 20000436 PARAMETER Experiment Name: At_Drought_P Parameter: Age (day) Value: 7
  misc_feature: MA Experiment 20000436 PARAMETER Experiment Name: At_Drought_P Parameter: Organism Value: A. thaliana
  misc_feature: MA Experiment 20000436 PARAMETER Experiment Name: At_Drought_P Parameter: Plant Line Value: WS
  misc_feature: MA Experiment 20000436 PARAMETER Experiment Name: At_Drought_P Parameter: Timepoint (hr) Value: 12
  misc_feature: MA Experiment 20000436 PARAMETER Experiment Name: At_Drought_P Parameter: Tissue Value: Whole Plant
  misc_feature: MA Experiment 20000436 PARAMETER Experiment Name: At_Drought_P Parameter: Treatment Value: Drought vs. No Drought
  misc_feature: MA Experiment ID: 20000437 Result: Down-regulated in Transcription
  misc_feature: MA Experiment 20000437 PARAMETER Experiment Name: At_Drought_P Parameter: Age (day) Value: 8
  misc_feature: MA Experiment 20000437 PARAMETER Experiment Name: At_Drought_P Parameter: Organism Value: A. thaliana
  misc_feature: MA Experiment 20000437 PARAMETER Experiment Name: At_Drought_P Parameter: Plant Line Value: WS
  misc_feature: MA Experiment 20000437 PARAMETER Experiment Name: At_Drought_P Parameter: Timepoint (hr) Value: 24
  misc_feature: MA Experiment 20000437 PARAMETER Experiment Name: At_Drought_P Parameter: Tissue Value: Whole Plant
  misc_feature: MA Experiment 20000437 PARAMETER Experiment Name: At_Drought_P Parameter: Treatment Value: Drought vs. No Drought
  misc_feature: MA Experiment ID: 20000495 Result: Up-regulated in Transcription
  misc_feature: MA Experiment 20000495 PARAMETER Experiment Name: At_Guard_Cells_P Parameter: Harvest Date Value: 8/2/2002
  misc_feature: MA Experiment 20000495 PARAMETER Experiment Name: At_Guard_Cells_P Parameter: Organism Value: A. thaliana
  misc_feature: MA Experiment 20000495 PARAMETER Experiment Name: At_Guard_Cells_P Parameter: Tissue Value: Guard Cells vs. Leaves
  misc_feature: MA Experiment ID: 20001757 Result: Up-regulated in Transcription
  misc_feature: MA Experiment 20001757 PARAMETER Experiment Name: At_50mM_NH4NO3_L-to-H_P Parameter: Timepoint (hr) Value: 6
  misc_feature: MA Experiment 20001757 PARAMETER Experiment Name: At_50mM_NH4NO3_L-to-H_P Parameter: Tissue Value: Leaf
  misc_feature: MA Experiment 20001757 PARAMETER Experiment Name: At_50mM_NH4NO3_L-to-H_P Parameter: Treatment Value: 50mM NH4NO3 vs 100mM Mannitol
  misc_feature: MA Experiment ID: 20001911 Result: Down-regulated in Transcription
  misc_feature: MA Experiment 20001911 PARAMETER Experiment Name: At_Drought_Reproduction_P Parameter: Age (day) Value: 40
  misc_feature: MA Experiment 20001911 PARAMETER Experiment Name: At_Drought_Reproduction_P Parameter: Organism Value: A. thaliana
  misc_feature: MA Experiment 20001911 PARAMETER Experiment Name: At_Drought_Reproduction_P Parameter: Plant Line Value: WS
  misc_feature: MA Experiment 20001911 PARAMETER Experiment Name: At_Drought_Reproduction_P Parameter: Timepoint (day) Value: 10
  misc_feature: MA Experiment 20001911 PARAMETER Experiment Name: At_Drought_Reproduction_P Parameter: Tissue Value: Flowers
  misc_feature: MA Experiment 20001911 PARAMETER Experiment Name: At_Drought_Reproduction_P Parameter: Treatment Value: Drought vs. No Drought
gagacagagacagattgagagaaagtttggattttgatatgtgtggttggatttttgttacaaggcaaaaccagacccaccttcaaacttgtccccacgaactacattatcattgttttgttcgaacttcttcttcttctcgttagggttttctttcattggctctgagctactctttattgcttaggccttagtgtgtgtgtgtgaatcttctcagcgaaagccaagttcttttctttgttggtgtttctgggtttattgcgacaatgggagctgagcattttagcctggtgaagttcaatagaggtttctttgtgtgtttatgggtgatgctctcgctatcttgcgcagcagcgagctatggctcttcaaggcaaaagtttgaggtgaagaagcatttgaataggctcaacaaacctcctgttaagactattcagagtccagatggagatataatcgactgtattcctatttcaaagcagccagcttttgaccaccccttcctcaaagaccacaagattcagatgaggcctagttaccacccagaagggctctttgatgacaataaggtatctgctgaaccaaaggggaaagaaactcatatccctcagttgtggcaccggtatggcaaatgtactgaaggaaccattcccatgaggaggacaagggaggatgatgtgttgagagcaagttcagttaaaagatatggcaagaagaagcataggtctgttcctattcctaaatctgcggaacccgacctcatcaaccaaaatggtcatcaacacgccatagcttatgtggaaggagataagtactacggagctaaggcgactttgaatgtgtgggagccaaagatacagaacacaaacgaattcagcttgtcgcagatatggcttttggggggttcctttggacaagatcttaacagtattgaagctggctggcaggtgagtccggatctatatggagacaataacacaagactcttcacttactggactagtgatgcctatcaagctaccggttgctacaatcttctttgctcaggtttcattcaaatcaacagtgacatagcaatgggagcaagcatctcaccagtctctggataccgcaattcccagtatgatatcagtattctaatctggaaggatccaaaggagggacattggtggatgcaatttgggaatgggtatgttttggggtactggccatcatttctgttctcctacctaacagaaagtgcatcgatgatcgaatggggaggagaagttgtgaactcacagtcagaaggccaccacacttggacacagatgggaagtggtcactttccagaagaaggtttcagtaaagcaagttactttcggaacattcaagtcgtagatggatccaacaacctcaaagcaccaaaaggacttggtacattcaccgagaagtccaactgttatgatgttcaaacgggaagcaatgatgactggggacattacttctactacggtggtcccggtaagaacaagaactgcccataaacccgggcatgtgtagtgtttactcagcttgtatctctctttcagtcttgtgaatttcctccttcttgggtagtattaggctgtagtaagaaagtgaagtagtgatatgtatgtgtaagctctctcagtgatgggaagttttgtaggtttgtgtggttttaacttaatgataaggtgtttgtttgtagtagtagtctccatgtaactagatgggggaaaagtaggtgtgactttaagtttcttaaaagctcaaagaaactttagccc

SEQ ID NO: 24178 - protein, 419 aa, Arabidopsis thaliana
  peptide (1)..(419): Ceres Seq. ID no. 13499643
  misc_feature (183)..(377): Pfam Name: Arabidopsis proteins of unknown function Pfam Description: Arabidopsis proteins of unknown function
  misc_feature (41)..(419): Homolog of NCBI NO: 15220207 NR Description: expressed protein [Arabidopsis thaliana]
  misc_feature (15)..(419): Homolog of NCBI NO: 18406483 NR Description: expressed protein [Arabidopsis thaliana]
  misc_feature (20)..(419): Homolog of NCBI NO: 34393299 NR Description: putative DD1A protein [Oryza sativa (japonica
  misc_feature (14)..(419): Homolog of NCBI NO: 30103019 NR Description: unknown protein [Oryza sativa (japonica
  misc_feature (13)..(419): Homolog of NCBI NO: 34393554 NR Description: putative carboxyl-terminal proteinase
  misc_feature (1)..(418): Homolog of NCBI NO: 15241244 NR Description: expressed protein [Arabidopsis thaliana]
  misc_feature (2)..(419): Homolog of NCBI NO: 27311623 NR Description: unknown protein [Arabidopsis thaliana]
  misc_feature (2)..(419): Homolog of NCBI NO: 15222707 NR Description: expressed protein [Arabidopsis thaliana]
  misc_feature (1)..(419): Homolog of NCBI NO: 21593294 NR Description: putative carboxyl-terminal peptidase [Arabidopsis
  misc_feature (1)..(419): Homolog of NCBI NO: 18400044 NR Description: expressed protein [Arabidopsis thaliana]
MGAEHFSLVKFNRGFFVCLWVMLSLSCAAASYGSSRQKFEVKKHLNRLNKPPVKTIQSPDGDIIDCIPISKQPAFDHPFLKDHKIQMRPSYHPEGLFDDNKVSAEPKGKETHIPQLWHRYGKCTEGTIPMRRTREDDVLRASSVKRYGKKKHRSVPIPKSAEPDLINQNGHQHAIAYVEGDKYYGAKATLNVWEPKIQNTNEFSLSQIWLLGGSFGQDLNSIEAGWQVSPDLYGDNNTRLFTYWTSDAYQATGCYNLLCSGFIQINSDIAMGASISPVSGYRNSQYDISILIWKDPKEGHWWMQFGNGYVLGYWPSFLFSYLTESASMIEWGGEVVNSQSEGHHTWTQMGSGHFPEEGFSKASYFRNIQVVDGSNNLKAPKGLGTFTEKSNCYDVQTGSNDDWGHYFYYGGPGKNKNCP

SEQ ID NO: 24179 - protein, 398 aa, Arabidopsis thaliana
  peptide (1)..(398): Ceres Seq. ID no. 13499644
  misc_feature (162)..(356): Pfam Name: Arabidopsis proteins of unknown function Pfam Description: Arabidopsis proteins of unknown function
  misc_feature (20)..(398): Homolog of NCBI NO: 15220207 NR Description: expressed protein [Arabidopsis thaliana]
  misc_feature (1)..(398): Homolog of NCBI NO: 18406483 NR Description: expressed protein [Arabidopsis thaliana]
  misc_feature (1)..(398): Homolog of NCBI NO: 34393299 NR Description: putative DD1A protein [Oryza sativa (japonica
  misc_feature (1)..(398): Homolog of NCBI NO: 30103019 NR Description: unknown protein [Oryza sativa (japonica
  misc_feature (1)..(398): Homolog of NCBI NO: 34393554 NR Description: putative carboxyl-terminal proteinase
  misc_feature (1)..(397): Homolog of NCBI NO: 15241244 NR Description: expressed protein [Arabidopsis thaliana]
  misc_feature (1)..(398): Homolog of NCBI NO: 27311623 NR Description: unknown protein [Arabidopsis thaliana]
  misc_feature (1)..(398): Homolog of NCBI NO: 15222707 NR Description: expressed protein [Arabidopsis thaliana]
  misc_feature (1)..(398): Homolog of NCBI NO: 21593294 NR Description: putative carboxyl-terminal peptidase [Arabidopsis
  misc_feature (1)..(398): Homolog of NCBI NO: 18400044 NR Description: expressed protein [Arabidopsis thaliana]
MLSLSCAAASYGSSRQKFEVKKHLNRLNKPPVKTIQSPDGDIIDCIPISKQPAFDHPFLKDHKIQMRPSYHPEGLFDDNKVSAEPKGKETHIPQLWHRYGKCTEGTIPMRRTREDDVLRASSVKRYGKKKHRSVPIPKSAEPDLINQNGHQHAIAYVEGDKYYGAKATLNVWEPKIQNTNEFSLSQIWLLGGSFGQDLNSIEAGWQVSPDLYGDNNTRLFTYWTSDAYQATGCYNLLCSGFIQINSDIAMGASISPVSGYRNSQYDISILIWKDPKEGHWWMQFGNGYVLGYWPSFLFSYLTESASMIEWGGEVVNSQSEGHHTWTQMGSGHFPEEGFSKASYFRNIQVVDGSNNLKAPKGLGTFTEKSNCYDVQTGSNDDWGHYFYYGGPGKNKNCP

SEQ ID NO: 24180 - protein, 333 aa, Arabidopsis thaliana
  peptide (1)..(333): Ceres Seq. ID no. 13499645
  misc_feature (97)..(291): Pfam Name: Arabidopsis proteins of unknown function Pfam Description: Arabidopsis proteins of unknown function
  misc_feature (1)..(333): Homolog of NCBI NO: 15220207 NR Description: expressed protein [Arabidopsis thaliana]
  misc_feature (1)..(333): Homolog of NCBI NO: 18406483 NR Description: expressed protein [Arabidopsis thaliana]
  misc_feature (1)..(333): Homolog of NCBI NO: 34393299 NR Description: putative DD1A protein [Oryza sativa (japonica
  misc_feature (1)..(333): Homolog of NCBI NO: 30103019 NR Description: unknown protein [Oryza sativa (japonica
  misc_feature (1)..(333): Homolog of NCBI NO: 34393554 NR Description: putative carboxyl-terminal proteinase
  misc_feature (1)..(332): Homolog of NCBI NO: 15241244 NR Description: expressed protein [Arabidopsis thaliana]
  misc_feature (1)..(333): Homolog of NCBI NO: 27311623 NR Description: unknown protein [Arabidopsis thaliana]
  misc_feature (1)..(333): Homolog of NCBI NO: 15222707 NR Description: expressed protein [Arabidopsis thaliana]
  misc_feature (1)..(333): Homolog of NCBI NO: 21593294 NR Description: putative carboxyl-terminal peptidase [Arabidopsis
  misc_feature (1)..(333): Homolog of NCBI NO: 18400044 NR Description: expressed protein [Arabidopsis thaliana]
MRPSYHPEGLFDDNKVSAEPKGKETHIPQLWHRYGKCTEGTIPMRRTREDDVLRASSVKRYGKKKHRSVPIPKSAEPDLINQNGHQHAIAYVEGDKYYGAKATLNVWEPKIQNTNEFSLSQIWLLGGSFGQDLNSIEAGWQVSPDLYGDNNTRLFTYWTSDAYQATGCYNLLCSGFIQINSDIAMGASISPVSGYRNSQYDISILIWKDPKEGHWWMQFGNGYVLGYWPSFLFSYLTESASMIEWGGEVVNSQSEGHHTWTQMGSGHFPEEGFSKASYFRNIQVVDGSNNLKAPKGLGTFTEKSNCYDVQTGSNDDWGHYFYYGGPGKNKNCP

SEQ ID NO: 24181 - DNA, 1258 bp, Arabidopsis thaliana
  misc_feature (1)..(1258): Ceres Seq. ID no. 12577595
  misc_feature: MA Experiment ID: 108434 Result: Down-regulated in Transcription
  misc_feature: MA Experiment 108434 PARAMETER Experiment Name: At_Root_Tips_cDNA_P Parameter: Tissue Value: Root Tips
  misc_feature: MA Experiment ID: 108464 Result: Up-regulated in Transcription
  misc_feature: MA Experiment 108464 PARAMETER Experiment Name: At_Germinating_Seeds_cDNA_P Parameter: Age (day) Value: 4 vs. 0
  misc_feature: MA Experiment 108464 PARAMETER Experiment Name: At_Germinating_Seeds_cDNA_P Parameter: Tissue Value: Germinating Seeds
  misc_feature: MA Experiment ID: 20000180 Result: Up-regulated in Transcription
  misc_feature: MA Experiment 20000180 PARAMETER Experiment Name: At_Germinating_Seeds_P Parameter: Age (hr) Value: 24 vs. 0
  misc_feature: MA Experiment 20000180 PARAMETER Experiment Name: At_Germinating_Seeds_P Parameter: Tissue Value: Germinating Seeds
  misc_feature: MA Experiment ID: 20000182 Result: Up-regulated in Transcription
  misc_feature: MA Experiment 20000182 PARAMETER Experiment Name: At_2mM_SA_P Parameter: Age (day) Value: 14
  misc_feature: MA Experiment 20000182 PARAMETER Experiment Name: At_2mM_SA_P Parameter: Organism Value: A. thaliana
  misc_feature: MA Experiment 20000182 PARAMETER Experiment Name: At_2mM_SA_P Parameter: Plant Line Value: WS
  misc_feature: MA Experiment 20000182 PARAMETER Experiment Name: At_2mM_SA_P Parameter: Timepoint (hr) Value: 6
  misc_feature: MA Experiment 20000182 PARAMETER Experiment Name: At_2mM_SA_P Parameter: Tissue Value: Aerial
  misc_feature: MA Experiment 20000182 PARAMETER Experiment Name: At_2mM_SA_P Parameter: Treatment Value: 2mM SA vs. No Treatment
  misc_feature: MA Experiment ID: 20000184 Result: Down-regulated in Transcription
  misc_feature: MA Experiment 20000184 PARAMETER Experiment Name: At_Shoots__P Parameter: Age (day) Value: 7
  misc_feature: MA Experiment 20000184 PARAMETER Experiment Name: At_Shoots__P Parameter: Tissue Value: Shoots vs. Whole Plant
  misc_feature: MA Experiment ID: 20000224 Result: Up-regulated in Transcription
  misc_feature: MA Experiment ID: 20000234 Result: Down-regulated in Transcription
  misc_feature: MA Experiment 20000234 PARAMETER Experiment Name: At_Siliques_P Parameter: Age (day) Value: 21
  misc_feature: MA Experiment 20000234 PARAMETER Experiment Name: At_Siliques_P Parameter: Organism Value: A. thaliana
  misc_feature: MA Experiment 20000234 PARAMETER Experiment Name: At_Siliques_P Parameter: Plant Line Value: WS
  misc_feature: MA Experiment 20000234 PARAMETER Experiment Name: At_Siliques_P Parameter: Tissue Value: Less Than 5mm Siliques vs. Whole Plant
  misc_feature: MA Experiment ID: 20000438 Result: Down-regulated in Transcription
  misc_feature: MA Experiment 20000438 PARAMETER Experiment Name: At_Shoots__P Parameter: Age (day) Value: 14
  misc_feature: MA Experiment 20000438 PARAMETER Experiment Name: At_Shoots__P Parameter: Tissue Value: Shoots vs. Whole Plant
  misc_feature: MA Experiment ID: 20000527 Result: Down-regulated in Transcription
  misc_feature: MA Experiment 20000527 PARAMETER Experiment Name: At_10percent_PEG_P Parameter: Age (day) Value: 20
  misc_feature: MA Experiment 20000527 PARAMETER Experiment Name: At_10percent_PEG_P Parameter: Organism Value: A. thaliana
  misc_feature: MA Experiment 20000527 PARAMETER Experiment Name: At_10percent_PEG_P Parameter: Plant Line Value: WS
  misc_feature: MA Experiment 20000527 PARAMETER Experiment Name: At_10percent_PEG_P Parameter: Timepoint (day) Value: 20
  misc_feature: MA Experiment 20000527 PARAMETER Experiment Name: At_10percent_PEG_P Parameter: Tissue Value: Whole Plant
  misc_feature: MA Experiment 20000527 PARAMETER Experiment Name: At_10percent_PEG_P Parameter: Treatment Value: 10percent PEG vs. No Treatment
  misc_feature: MA Experiment ID: 20001555 Result: Down-regulated in Transcription
  misc_feature: MA Experiment 20001555 PARAMETER Experiment Name: At_Drought_Soil_Dry_P Parameter: Age (day) Value: 24
  misc_feature: MA Experiment 20001555 PARAMETER Experiment Name: At_Drought_Soil_Dry_P Parameter: Organism Value: A. thaliana
  misc_feature: MA Experiment 20001555 PARAMETER Experiment Name: At_Drought_Soil_Dry_P Parameter: Plant Line Value: WS
  misc_feature: MA Experiment 20001555 PARAMETER Experiment Name: At_Drought_Soil_Dry_P Parameter: Post Timepoint (hr) Value: None
  misc_feature: MA Experiment 20001555 PARAMETER Experiment Name: At_Drought_Soil_Dry_P Parameter: Post-Treatment Value: None
  misc_feature: MA Experiment 20001555 PARAMETER Experiment Name: At_Drought_Soil_Dry_P Parameter: Timepoint (day) Value: 10
  misc_feature: MA Experiment 20001555 PARAMETER Experiment Name: At_Drought_Soil_Dry_P Parameter: Treatment Value: Drought vs. No Drought
  misc_feature: MA Experiment ID: 20001556 Result: Down-regulated in Transcription
  misc_feature: MA Experiment 20001556 PARAMETER Experiment Name: At_Drought_Soil_Dry_P Parameter: Age (day) Value: 26
  misc_feature: MA Experiment 20001556 PARAMETER Experiment Name: At_Drought_Soil_Dry_P Parameter: Organism Value: A. thaliana
  misc_feature: MA Experiment 20001556 PARAMETER Experiment Name: At_Drought_Soil_Dry_P Parameter: Plant Line Value: WS
  misc_feature: MA Experiment 20001556 PARAMETER Experiment Name: At_Drought_Soil_Dry_P Parameter: Post Timepoint (hr) Value: None
  misc_feature: MA Experiment 20001556 PARAMETER Experiment Name: At_Drought_Soil_Dry_P Parameter: Post-Treatment Value: None
  misc_feature: MA Experiment 20001556 PARAMETER Experiment Name: At_Drought_Soil_Dry_P Parameter: Timepoint (day) Value: 12
  misc_feature: MA Experiment 20001556 PARAMETER Experiment Name: At_Drought_Soil_Dry_P Parameter: Treatment Value: Drought vs. No Drought
  misc_feature: MA Experiment ID: 20001557 Result: Down-regulated in Transcription
  misc_feature: MA Experiment 20001557 PARAMETER Experiment Name: At_Drought_Soil_Dry_P Parameter: Age (day) Value: 27
  misc_feature: MA Experiment 20001557 PARAMETER Experiment Name: At_Drought_Soil_Dry_P Parameter: Organism Value: A. thaliana
  misc_feature: MA Experiment 20001557 PARAMETER Experiment Name: At_Drought_Soil_Dry_P Parameter: Plant Line Value: WS
  misc_feature: MA Experiment 20001557 PARAMETER Experiment Name: At_Drought_Soil_Dry_P Parameter: Post Timepoint (hr) Value: 3
  misc_feature: MA Experiment 20001557 PARAMETER Experiment Name: At_Drought_Soil_Dry_P Parameter: Post-Treatment Value: Re-Water vs. No Drought
  misc_feature: MA Experiment 20001557 PARAMETER Experiment Name: At_Drought_Soil_Dry_P Parameter: Timepoint (day) Value: 13
  misc_feature: MA Experiment 20001557 PARAMETER Experiment Name: At_Drought_Soil_Dry_P Parameter: Treatment Value: Drought vs. No Drought
  misc_feature: MA Experiment ID: 20001559 Result: Down-regulated in Transcription
  misc_feature: MA Experiment 20001559 PARAMETER Experiment Name: At_Drought_Soil_Dry_P Parameter: Age (day) Value: 28
  misc_feature: MA Experiment 20001559 PARAMETER Experiment Name: At_Drought_Soil_Dry_P Parameter: Organism Value: A. thaliana
  misc_feature: MA Experiment 20001559 PARAMETER Experiment Name: At_Drought_Soil_Dry_P Parameter: Plant Line Value: WS
  misc_feature: MA Experiment 20001559 PARAMETER Experiment Name: At_Drought_Soil_Dry_P Parameter: Post Timepoint (hr) Value: 29
  misc_feature: MA Experiment 20001559 PARAMETER Experiment Name: At_Drought_Soil_Dry_P Parameter: Post-Treatment Value: Re-Water vs. No Drought
  misc_feature: MA Experiment 20001559 PARAMETER Experiment Name: At_Drought_Soil_Dry_P Parameter: Timepoint (day) Value: 14
  misc_feature: MA Experiment 20001559 PARAMETER Experiment Name: At_Drought_Soil_Dry_P Parameter: Treatment Value: Drought vs. No Drought
cctgtttttaggctcactcgtggactttttttaatttctttcctttgccatatttataaaataaaagagagagaaagaattttcaataattttcaacaagcaaagttcatgatggggaataagcgaaatctcggatttgtgatcttcttctgggctctggtggttgcagtagtagccacggccatcgagcatcgtcgcaatgagaggactaaaggcgtcaatggtcttgacaagatcatcatccgcgaccgtcgtggccgatctgctgaggtttacttgtatggaggtcaagtcagttcttggaaaaatgagaatggagaggagttacttgttatgagtagcaaggctatattccagcctccaacaccgattcgtggaggaattccagtattgtttccgcaatacagtaacaccggtccacttccctcacatggatttgtaagacagaggttctgggaggttgagactaaaccacctcctttgccatcactttctactgctcatgttgacctgatcgtaagatcatccaatgaggatttgaagatctggccgcataagtttgagtatagactgagagtagcattgggacatgatggagatttgacgttaacatctcgtgttaagaatactgatacaaaaccatttaacttcacatttgctcttcacccctacttcgctgtttccaatatcagtgaaatccatgtcgaaggattacacaacttggattaccttgaccaacaaaagaacagaacacgtttcactgatcatgagaaggttataactttcaatgctcaacttgacaggttgtacctaagcactccagatcaactaagaatcgtggaccataagaaaaagaagactattgttgtacacaaggagggacaagttgatgccgtggtgtggaatccatgggacaagaaagtatccgatttgggagttgaagattataagcattttgtaacggtggaaagcgcggctgtcgctaaaccaatcacagtgaaccccggcaaagaatggaaaggaatactccatgtgtctgtggttccttcaaatcggaaagcttgaccctataaaagtcttgcattcatcatcctcatcctttaaaaaaaaacttaaaactgtctttattaaagtatacttaatgttcccgagagacatcacatggtgaacacaaagttagttgggttccaaactggactcttggccagttttattgttttgtaactttagcattcatgaataaaaaagtgcgttaatc

SEQ ID NO: 24182 - protein, 354 aa, Arabidopsis thaliana
  peptide (1)..(354): Ceres Seq. ID no. 12577596
  misc_feature (77)..(346): Pfam Name: Aldose 1-epimerase Pfam Description: Aldose 1-epimerase
  misc_feature (71)..(350): Homolog of NCBI NO: 15236591 NR Description: putative protein
  misc_feature (68)..(351): Homolog of NCBI NO: 2501555 NR Description: POSSIBLE APOSPORY-ASSOCIATED PROTEIN C
  misc_feature (68)..(351): Homolog of NCBI NO: 40253263 NR Description: putative Aldose 1-epimerase
  misc_feature (68)..(351): Homolog of NCBI NO: 38344152 NR Description: OSJNBa0041A02.19 [Oryza sativa (japonica
  misc_feature (71)..(351): Homolog of NCBI NO: 19387263 NR Description: putative apospory-associated protein C
  misc_feature (61)..(351): Homolog of NCBI NO: 15242099 NR Description: apospory-associated protein C
  misc_feature (134)..(354): Homolog of NCBI NO: 4538919 NR Description: possible apospory-associated like
  misc_feature (38)..(354): Homolog of NCBI NO: 7485483 NR Description: hypothetical protein F14M19.180 - Arabidopsis
  misc_feature (37)..(354): Homolog of NCBI NO: 18416643 NR Description: possible apospory-associated like protein
  misc_feature (38)..(354): Homolog of NCBI NO: 21593295 NR Description: possible apospory-associated like protein
PVFRLTRGLFLISFLCHIYKIKERERIFNNFQQAKFMMGNKRNLGFVIFFWALVVAVVATAIEHRRNERTKGVNGLDKIIIRDRRGRSAEVYLYGGQVSSWKNENGEELLVMSSKAIFQPPTPIRGGIPVLFPQYSNTGPLPSHGFVRQRFWEVETKPPPLPSLSTAHVDLIVRSSNEDLKIWPHKFEYRLRVALGHDGDLTLTSRVKNTDTKPFNFTFALHPYFAVSNISEIHVEGLHNLDYLDQQKNRTRFTDHEKVITFNAQLDRLYLSTPDQLRIVDHKKKKTIVVHKEGQVDAVVWNPWDKKVSDLGVEDYKHFVTVESAAVAKPITVNPGKEWKGILHVSVVPSNRKA

SEQ ID NO: 24183 - protein, 318 aa, Arabidopsis thaliana
  peptide (1)..(318): Ceres Seq. ID no. 12577597
  misc_feature (41)..(310): Pfam Name: Aldose 1-epimerase Pfam Description: Aldose 1-epimerase
  misc_feature (35)..(314): Homolog of NCBI NO: 15236591 NR Description: putative protein
  misc_feature (32)..(315): Homolog of NCBI NO: 2501555 NR Description: POSSIBLE APOSPORY-ASSOCIATED PROTEIN C
  misc_feature (32)..(315): Homolog of NCBI NO: 40253263 NR Description: putative Aldose 1-epimerase
  misc_feature (32)..(315): Homolog of NCBI NO: 38344152 NR Description: OSJNBa0041A02.19 [Oryza sativa (japonica
  misc_feature (35)..(315): Homolog of NCBI NO: 19387263 NR Description: putative apospory-associated protein C
  misc_feature (25)..(315): Homolog of NCBI NO: 15242099 NR Description: apospory-associated protein C
  misc_feature (98)..(318): Homolog of NCBI NO: 4538919 NR Description: possible apospory-associated like
  misc_feature (2)..(318): Homolog of NCBI NO: 7485483 NR Description: hypothetical protein F14M19.180 - Arabidopsis
  misc_feature (1)..(318): Homolog of NCBI NO: 18416643 NR Description: possible apospory-associated like protein
  misc_feature (2)..(318): Homolog of NCBI NO: 21593295 NR Description: possible apospory-associated like protein
MMGNKRNLGFVIFFWALVVAVVATAIEHRRNERTKGVNGLDKIIIRDRRGRSAEVYLYGGQVSSWKNENGEELLVMSSKAIFQPPTPIRGGIPVLFPQYSNTGPLPSHGFVRQRFWEVETKPPPLPSLSTAHVDLIVRSSNEDLKIWPHKFEYRLRVALGHDGDLTLTSRVKNTDTKPFNFTFALHPYFAVSNISEIHVEGLHNLDYLDQQKNRTRFTDHEKVITFNAQLDRLYLSTPDQLRIVDHKKKKTIVVHKEGQVDAVVWNPWDKKVSDLGVEDYKHFVTVESAAVAKPITVNPGKEWKGILHVSVVPSNRKA

SEQ ID NO: 24184 - protein, 317 aa, Arabidopsis thaliana
  peptide (1)..(317): Ceres Seq. ID no. 12577598
  misc_feature (40)..(309): Pfam Name: Aldose 1-epimerase Pfam Description: Aldose 1-epimerase
  misc_feature (31)..(314): Homolog of NCBI NO: 2501555 NR Description: POSSIBLE APOSPORY-ASSOCIATED PROTEIN C
  misc_feature (31)..(314): Homolog of NCBI NO: 40253263 NR Description: putative Aldose 1-epimerase
  misc_feature (31)..(314): Homolog of NCBI NO: 38344152 NR Description: OSJNBa0041A02.19 [Oryza sativa (japonica
  misc_feature (34)..(314): Homolog of NCBI NO: 19387263 NR Description: putative apospory-associated protein C
  misc_feature (24)..(314): Homolog of NCBI NO: 15242099 NR Description: apospory-associated protein C
  misc_feature (34)..(313): Homolog of NCBI NO: 15236591 NR Description: putative protein
  misc_feature (97)..(317): Homolog of NCBI NO: 4538919 NR Description: possible apospory-associated like
  misc_feature (1)..(317): Homolog of NCBI NO: 7485483 NR Description: hypothetical protein F14M19.180 - Arabidopsis
  misc_feature (1)..(317): Homolog of NCBI NO: 18416643 NR Description: possible apospory-associated like protein
  misc_feature (1)..(317): Homolog of NCBI NO: 21593295 NR Description: possible apospory-associated like protein
MGNKRNLGFVIFFWALVVAVVATAIEHRRNERTKGVNGLDKIIIRDRRGRSAEVYLYGGQVSSWKNENGEELLVMSSKAIFQPPTPIRGGIPVLFPQYSNTGPLPSHGFVRQRFWEVETKPPPLPSLSTAHVDLIVRSSNEDLKIWPHKFEYRLRVALGHDGDLTLTSRVKNTDTKPFNFTFALHPYFAVSNISEIHVEGLHNLDYLDQQKNRTRFTDHEKVITFNAQLDRLYLSTPDQLRIVDHKKKKTIVVHKEGQVDAVVWNPWDKKVSDLGVEDYKHFVTVESAAVAKPITVNPGKEWKGILHVSVVPSNRKA

SEQ ID NO: 24185 - DNA, 1187 bp, Arabidopsis thaliana
  misc_feature (1)..(1187): Ceres Seq. ID no. 12324987
  misc_feature: MA Experiment ID: 20000224 Result: Down-regulated in Transcription
  misc_feature: MA Experiment ID: 20000496 Result: Up-regulated in Transcription
  misc_feature: MA Experiment 20000496 PARAMETER Experiment Name: At_Guard_Cells_P Parameter: Harvest Date Value: 7/19/2002
  misc_feature: MA Experiment 20000496 PARAMETER Experiment Name: At_Guard_Cells_P Parameter: Organism Value: Canola
  misc_feature: MA Experiment 20000496 PARAMETER Experiment Name: At_Guard_Cells_P Parameter: Tissue Value: Guard Cells vs. Leaves
accgttgaacactttcccgagaaaagcttctctcatcttttattttcccggaaaaaaataatcaaacttttactctcttccgatctcctttccttgtacatctagatccaagcggtatcgatggctcgacgtggattattgatttcgttcttcgctatcttctccgtcctgcttcaatcttccacttctctgatcagttcttctagcgtcttcgtcaatccttccaaagtcaagcaggtttcatcgaaacccagggcgtttgtgtatgaagggtttctcacggaattggaatgtgatcatatggtctcccttgcaaaagcgagcctgaagagatctgctgttgctgataatgatagtggagagagcaaattcagcgaggttcgaaccagctctggcacctttatctccaaaggaaaggatcccattgtttctggtatagaagataagatctccacttggacatttcttccaaaagaaaacggggaagacattcaggtattgagatacgagcacggccaaaaatacgatgctcactttgattactttcatgacaaagtcaacattgtccgtggtggacatcgcatggcaacaattcttatgtatctatccaatgtgacgaaaggtggagaaactgtattccctgatgcagagataccttctcgccgagtactatctgaaaataaagaagacctttctgattgtgccaagagaggaattgctgtgaaaccaaggaaaggggatgctttgttgttcttcaacctccacccagacgcaatcccggacccattgagccttcacggtggatgtcctgtgatagaaggagagaaatggtcggcaaccaagtggatccacgtagactcatttgataggatcgtgacaccaagcggaaactgcacggatatgaacgagagctgtgagagatgggcagttcttggggaatgcacaaagaatccagagtacatggttggaactacagagcttcctggctattgcaggcgaagctgtaaggcttgctagactttattttacctcttctttgtcttattatgtgcctttactctcaaagttttctgtttttttccgagtttctcttagagttgttgtcgttgatgaaatttgttctaaggggagttctgtaaaactatactgttcctgaaaagaatataatgtaaacacatagattcagt

SEQ ID NO: 24186 - protein, 298 aa, Arabidopsis thaliana
  peptide (1)..(298): Ceres Seq. ID no. 12324988
  misc_feature (120)..(245): Pfam Name: 2OG-Fe(II) oxygenase superfamily Pfam Description: 2OG-Fe(II) oxygenase superfamily
  misc_feature (100)..(298): Homolog of NCBI NO: 37534316 NR Description: unknown protein [Oryza sativa (japonica
  misc_feature (20)..(298): Homolog of NCBI NO: 29150368 NR Description: putative oxidoreductase [Oryza sativa (japonica
  misc_feature (26)..(298): Homolog of NCBI NO: 18086437 NR Description: AT3g28480/MFJ20_16 [Arabidopsis thaliana]
  misc_feature (26)..(298): Homolog of NCBI NO: 18405808 NR Description: prolyl 4-hydroxylase, putative
  misc_feature (26)..(298): Homolog of NCBI NO: 9294583 NR Description: prolyl 4-hydroxylase alpha subunit-like protein
  misc_feature (1)..(298): Homolog of NCBI NO: 29150365 NR Description: putative oxidoreductase [Oryza sativa (japonica
  misc_feature (1)..(298): Homolog of NCBI NO: 21618073 NR Description: prolyl 4-hydroxylase alpha subunit-like protein
  misc_feature (1)..(298): Homolog of NCBI NO: 18397528 NR Description: expressed protein
  misc_feature (1)..(298): Homolog of NCBI NO: 20260280 NR Description: unknown protein [Arabidopsis thaliana]
  misc_feature (1)..(298): Homolog of NCBI NO: 15239594 NR Description: putative protein
MARRGLLISFFAIFSVLLQSSTSLISSSSVFVNPSKVKQVSSKPRAFVYEGFLTELECDHMVSLAKASLKRSAVADNDSGESKFSEVRTSSGTFISKGKDPIVSGIEDKISTWTFLPKENGEDIQVLRYEHGQKYDAHFDYFHDKVNIVRGGHRMATILMYLSNVTKGGETVFPDAEIPSRRVLSENKEDLSDCAKRGIAVKPRKGDALLFFNLHPDAIPDPLSLHGGCPVIEGEKWSATKWIHVDSFDRIVTPSGNCTDMNESCERWAVLGECTKNPEYMVGTTELPGYCRRSCKAC

SEQ ID NO: 24187 - protein, 238 aa, Arabidopsis thaliana
  peptide (1)..(238): Ceres Seq. ID no. 12324989
  misc_feature (60)..(185): Pfam Name: 2OG-Fe(II) oxygenase superfamily Pfam Description: 2OG-Fe(II) oxygenase superfamily
  misc_feature (40)..(238): Homolog of NCBI NO: 37534316 NR Description: unknown protein [Oryza sativa (japonica
  misc_feature (1)..(238): Homolog of NCBI NO: 29150368 NR Description: putative oxidoreductase [Oryza sativa (japonica
  misc_feature (1)..(238): Homolog of NCBI NO: 18086437 NR Description: AT3g28480/MFJ20_16 [Arabidopsis thaliana]
  misc_feature (1)..(238): Homolog of NCBI NO: 18405808 NR Description: prolyl 4-hydroxylase, putative
  misc_feature (1)..(238): Homolog of NCBI NO: 9294583 NR Description: prolyl 4-hydroxylase alpha subunit-like protein
  misc_feature (1)..(238): Homolog of NCBI NO: 29150365 NR Description: putative oxidoreductase [Oryza sativa (japonica
  misc_feature (1)..(238): Homolog of NCBI NO: 21618073 NR Description: prolyl 4-hydroxylase alpha subunit-like protein
  misc_feature (1)..(238): Homolog of NCBI NO: 18397528 NR Description: expressed protein
  misc_feature (1)..(238): Homolog of NCBI NO: 20260280 NR Description: unknown protein [Arabidopsis thaliana]
  misc_feature (1)..(238): Homolog of NCBI NO: 15239594 NR Description: putative protein
MVSLAKASLKRSAVADNDSGESKFSEVRTSSGTFISKGKDPIVSGIEDKISTWTFLPKENGEDIQVLRYEHGQKYDAHFDYFHDKVNIVRGGHRMATILMYLSNVTKGGETVFPDAEIPSRRVLSENKEDLSDCAKRGIAVKPRKGDALLFFNLHPDAIPDPLSLHGGCPVIEGEKWSATKWIHVDSFDRIVTPSGNCTDMNESCERWAVLGECTKNPEYMVGTTELPGYCRRSCKAC

SEQ ID NO: 24188 - DNA, 1322 bp, Arabidopsis thaliana
  misc_feature (1)..(1322): Ceres Seq. ID no. 13486960
  misc_feature: MA Experiment ID: 108435 Result: Down-regulated in Transcription
  misc_feature: MA Experiment 108435 PARAMETER Experiment Name: At_stm_Mutants_cDNA_P Parameter: Plant Line Value: wt Landsburg vs stm
  misc_feature: MA Experiment 108435 PARAMETER Experiment Name: At_stm_Mutants_cDNA_P Parameter: Tissue Value: Shoot Apical Meristem Region
  misc_feature: MA Experiment ID: 108462 Result: Down-regulated in Transcription
  misc_feature: MA Experiment 108462 PARAMETER Experiment Name: At_Germinating_Seeds_cDNA_P Parameter: Age (day) Value: 2 vs. 0
  misc_feature: MA Experiment 108462 PARAMETER Experiment Name: At_Germinating_Seeds_cDNA_P Parameter: Tissue Value: Germinating Seeds
  misc_feature: MA Experiment ID: 108463 Result: Down-regulated in Transcription
  misc_feature: MA Experiment 108463 PARAMETER Experiment Name: At_Germinating_Seeds_cDNA_P Parameter: Age (day) Value: 3 vs. 0
  misc_feature: MA Experiment 108463 PARAMETER Experiment Name: At_Germinating_Seeds_cDNA_P Parameter: Tissue Value: Germinating Seeds
  misc_feature: MA Experiment ID: 108576 Result: Up-regulated in Transcription
  misc_feature: MA Experiment 108576 PARAMETER Experiment Name: At_42deg_Heat_cDNA_P Parameter: Temperature (deg C) Value: 42 vs. 22
  misc_feature: MA Experiment 108576 PARAMETER Experiment Name: At_42deg_Heat_cDNA_P Parameter: Timepoint (hr) Value: 1
  misc_feature: MA Experiment 108576 PARAMETER Experiment Name: At_42deg_Heat_cDNA_P Parameter: Tissue Value: Aerial
  misc_feature: MA Experiment ID: 108668 Result: Down-regulated in Transcription
  misc_feature: MA Experiment 108668 PARAMETER Experiment Name: At_2mM_SA_cDNA_P Parameter: Plant Line Value: WS
  misc_feature: MA Experiment 108668 PARAMETER Experiment Name: At_2mM_SA_cDNA_P Parameter: Timepoint (hr) Value: 6
  misc_feature: MA Experiment 108668 PARAMETER Experiment Name: At_2mM_SA_cDNA_P Parameter: Treatment Value: 2mM SA vs. No Treatment
  misc_feature: MA Experiment ID: 20000069 Result: Up-regulated in Transcription
  misc_feature: MA Experiment 20000069 PARAMETER Experiment Name: At_100uM_ABA_Mutants_cDNA_P Parameter: Plant Line Value: CS23
  misc_feature: MA Experiment 20000069 PARAMETER Experiment Name: At_100uM_ABA_Mutants_cDNA_P Parameter: Timepoint (hr) Value: 6
  misc_feature: MA Experiment 20000069 PARAMETER Experiment Name: At_100uM_ABA_Mutants_cDNA_P Parameter: Tissue Value: Aerial
  misc_feature: MA Experiment 20000069 PARAMETER Experiment Name: At_100uM_ABA_Mutants_cDNA_P Parameter: Treatment Value: 100uM ABA vs. No Treatment
  misc_feature: MA Experiment ID: 20000070 Result: Up-regulated in Transcription
  misc_feature: MA Experiment 20000070 PARAMETER Experiment Name: At_100uM_ABA_Mutants_cDNA_P Parameter: Plant Line Value: CS24
  misc_feature: MA Experiment 20000070 PARAMETER Experiment Name: At_100uM_ABA_Mutants_cDNA_P Parameter: Timepoint (hr) Value: 6
  misc_feature: MA Experiment 20000070 PARAMETER Experiment Name: At_100uM_ABA_Mutants_cDNA_P Parameter: Tissue Value: Aerial
  misc_feature: MA Experiment 20000070 PARAMETER Experiment Name: At_100uM_ABA_Mutants_cDNA_P Parameter: Treatment Value: 100uM ABA vs. No Treatment
  misc_feature: MA Experiment ID: 20000071 Result: Up-regulated in Transcription
  misc_feature: MA Experiment 20000071 PARAMETER Experiment Name: At_100uM_ABA_Mutants_cDNA_P Parameter: Plant Line Value: CS8104
  misc_feature: MA Experiment 20000071 PARAMETER Experiment Name: At_100uM_ABA_Mutants_cDNA_P Parameter: Timepoint (hr) Value: 6
  misc_feature: MA Experiment 20000071 PARAMETER Experiment Name: At_100uM_ABA_Mutants_cDNA_P Parameter: Tissue Value: Aerial
  misc_feature: MA Experiment 20000071 PARAMETER Experiment Name: At_100uM_ABA_Mutants_cDNA_P Parameter: Treatment Value: 100uM ABA vs. No Treatment
  misc_feature: MA Experiment ID: 20000072 Result: Up-regulated in Transcription
  misc_feature: MA Experiment 20000072 PARAMETER Experiment Name: At_100uM_ABA_Mutants_cDNA_P Parameter: Plant Line Value: CS8105
  misc_feature: MA Experiment 20000072 PARAMETER Experiment Name: At_100uM_ABA_Mutants_cDNA_P Parameter: Timepoint (hr) Value: 6
  misc_feature: MA Experiment 20000072 PARAMETER Experiment Name: At_100uM_ABA_Mutants_cDNA_P Parameter: Tissue Value: Aerial
  misc_feature: MA Experiment 20000072 PARAMETER Experiment Name: At_100uM_ABA_Mutants_cDNA_P Parameter: Treatment Value: 100uM ABA vs. No Treatment
  misc_feature: MA Experiment ID: 20000086 Result: Up-regulated in Transcription
  misc_feature: MA Experiment 20000086 PARAMETER Experiment Name: At_100uM_ABA_Mutants_cDNA_P Parameter: Plant Line Value: CS22
  misc_feature: MA Experiment 20000086 PARAMETER Experiment Name: At_100uM_ABA_Mutants_cDNA_P Parameter: Timepoint (hr) Value: 6
  misc_feature: MA Experiment 20000086 PARAMETER Experiment Name: At_100uM_ABA_Mutants_cDNA_P Parameter: Tissue Value: Aerial
  misc_feature: MA Experiment 20000086 PARAMETER Experiment Name: At_100uM_ABA_Mutants_cDNA_P Parameter: Treatment Value: 100uM ABA vs. No Treatment
  misc_feature: MA Experiment ID: 20000087 Result: Up-regulated in Transcription
  misc_feature: MA Experiment 20000087 PARAMETER Experiment Name: At_100uM_ABA_Mutants_cDNA_P Parameter: Plant Line Value: WS
  misc_feature: MA Experiment 20000087 PARAMETER Experiment Name: At_100uM_ABA_Mutants_cDNA_P Parameter: Timepoint (hr) Value: 6
  misc_feature: MA Experiment 20000087 PARAMETER Experiment Name: At_100uM_ABA_Mutants_cDNA_P Parameter: Tissue Value: Aerial
  misc_feature: MA Experiment 20000087 PARAMETER Experiment Name: At_100uM_ABA_Mutants_cDNA_P Parameter: Treatment Value: 100uM ABA vs. No Treatment
  misc_feature: MA Experiment ID: 20000088 Result: Up-regulated in Transcription
  misc_feature: MA Experiment 20000088 PARAMETER Experiment Name: At_100uM_ABA_Mutants_cDNA_P Parameter: Plant Line Value: Landsberg
  misc_feature: MA Experiment 20000088 PARAMETER Experiment Name: At_100uM_ABA_Mutants_cDNA_P Parameter: Timepoint (hr) Value: 6
  misc_feature: MA Experiment 20000088 PARAMETER Experiment Name: At_100uM_ABA_Mutants_cDNA_P Parameter: Tissue Value: Aerial
  misc_feature: MA Experiment 20000088 PARAMETER Experiment Name: At_100uM_ABA_Mutants_cDNA_P Parameter: Treatment Value: 100uM ABA vs. No Treatment
  misc_feature: MA Experiment ID: 20000089 Result: Up-regulated in Transcription
  misc_feature: MA Experiment ID: 20000173 Result: Down-regulated in Transcription
  misc_feature: MA Experiment 20000173 PARAMETER Experiment Name: At_42deg_Heat_P Parameter: Age (day) Value: 14
  misc_feature: MA Experiment 20000173 PARAMETER Experiment Name: At_42deg_Heat_P Parameter: Organism Value: A. thaliana
  misc_feature: MA Experiment 20000173 PARAMETER Experiment Name: At_42deg_Heat_P Parameter: Plant Line Value: WS
  misc_feature: MA Experiment 20000173 PARAMETER Experiment Name: At_42deg_Heat_P Parameter: Temperature (deg C) Value: 42 vs. 22
  misc_feature: MA Experiment 20000173 PARAMETER Experiment Name: At_42deg_Heat_P Parameter: Timepoint (hr) Value: 6
  misc_feature: MA Experiment 20000173 PARAMETER Experiment Name: At_42deg_Heat_P Parameter: Tissue Value: Aerial
  misc_feature: MA Experiment ID: 20000182 Result: Down-regulated in Transcription
  misc_feature: MA Experiment 20000182 PARAMETER Experiment Name: At_2mM_SA_P Parameter: Age (day) Value: 14
  misc_feature: MA Experiment 20000182 PARAMETER Experiment Name: At_2mM_SA_P Parameter: Organism Value: A. thaliana
  misc_feature: MA Experiment 20000182 PARAMETER Experiment Name: At_2mM_SA_P Parameter: Plant Line Value: WS
  misc_feature: MA Experiment 20000182 PARAMETER Experiment Name: At_2mM_SA_P Parameter: Timepoint (hr) Value: 6
  misc_feature: MA Experiment 20000182 PARAMETER Experiment Name: At_2mM_SA_P Parameter: Tissue Value: Aerial
  misc_feature: MA Experiment 20000182 PARAMETER Experiment Name: At_2mM_SA_P Parameter: Treatment Value: 2mM SA vs. No Treatment
  misc_feature: MA Experiment ID: 20000185 Result: Down-regulated in Transcription
  misc_feature: MA Experiment 20000185 PARAMETER Experiment Name: At_Roots__P Parameter: Age (day) Value: 7 vs. 21
  misc_feature: MA Experiment 20000185 PARAMETER Experiment Name: At_Roots__P Parameter: Organism Value: A. thaliana
  misc_feature: MA Experiment 20000185 PARAMETER Experiment Name: At_Roots__P Parameter: Tissue Value: Roots vs. Whole Plant
  misc_feature: MA Experiment ID: 20000437 Result: Up-regulated in Transcription
  misc_feature: MA Experiment 20000437 PARAMETER Experiment Name: At_Drought_P Parameter: Age (day) Value: 8
  misc_feature: MA Experiment 20000437 PARAMETER Experiment Name: At_Drought_P Parameter: Organism Value: A. thaliana
  misc_feature: MA Experiment 20000437 PARAMETER Experiment Name: At_Drought_P Parameter: Plant Line Value: WS
  misc_feature: MA Experiment 20000437 PARAMETER Experiment Name: At_Drought_P Parameter: Timepoint (hr) Value: 24
  misc_feature: MA Experiment 20000437 PARAMETER Experiment Name: At_Drought_P Parameter: Tissue Value: Whole Plant
  misc_feature: MA Experiment 20000437 PARAMETER Experiment Name: At_Drought_P Parameter: Treatment Value: Drought vs. No Drought
  misc_feature: MA Experiment ID: 20000439 Result: Down-regulated in Transcription
  misc_feature: MA Experiment 20000439 PARAMETER Experiment Name: At_Roots__P Parameter: Age (day) Value: 14 vs. 21
  misc_feature: MA Experiment 20000439 PARAMETER Experiment Name: At_Roots__P Parameter: Organism Value: A. thaliana
  misc_feature: MA Experiment 20000439 PARAMETER Experiment Name: At_Roots__P Parameter: Tissue Value: Roots vs. Whole Plant
  misc_feature: MA Experiment ID: 20001451 Result: Down-regulated in Transcription
  misc_feature: MA Experiment 20001451 PARAMETER Experiment Name: At_Far-red-induction_P Parameter: Age (day) Value: 7
  misc_feature: MA Experiment 20001451 PARAMETER Experiment Name: At_Far-red-induction_P Parameter: Light Value: Far-red vs. White
  misc_feature: MA Experiment 20001451 PARAMETER Experiment Name: At_Far-red-induction_P Parameter: Organism Value: A. thaliana
  misc_feature: MA Experiment 20001451 PARAMETER Experiment Name: At_Far-red-induction_P Parameter: Plant Line Value: Columbia
  misc_feature: MA Experiment 20001451 PARAMETER Experiment Name: At_Far-red-induction_P Parameter: Timepoint (hr) Value: 24
  misc_feature: MA Experiment 20001451 PARAMETER Experiment Name: At_Far-red-induction_P Parameter: Tissue Value: Whole Plant
  misc_feature: MA Experiment ID: 20001458 Result: Up-regulated in Transcription
  misc_feature: MA Experiment 20001458 PARAMETER Experiment Name: At_50mM_NH4NO3_L-to-H_P Parameter: Age (day) Value: Undefined
  misc_feature: MA Experiment 20001458 PARAMETER Experiment Name: At_50mM_NH4NO3_L-to-H_P Parameter: Organism Value: Undefined
  misc_feature: MA Experiment 20001458 PARAMETER Experiment Name: At_50mM_NH4NO3_L-to-H_P Parameter: Plant Line Value: Undefined
  misc_feature: MA Experiment 20001458 PARAMETER Experiment Name: At_50mM_NH4NO3_L-to-H_P Parameter: Timepoint (hr) Value: 2
  misc_feature: MA Experiment 20001458 PARAMETER Experiment Name: At_50mM_NH4NO3_L-to-H_P Parameter: Tissue Value: Siliques
  misc_feature: MA Experiment 20001458 PARAMETER Experiment Name: At_50mM_NH4NO3_L-to-H_P Parameter: Treatment Value: 50mM NH4NO3 vs. 100mM Manitol
  misc_feature: MA Experiment ID: 20001757 Result: Up-regulated in Transcription
  misc_feature: MA Experiment 20001757 PARAMETER Experiment Name: At_50mM_NH4NO3_L-to-H_P Parameter: Timepoint (hr) Value: 6
  misc_feature: MA Experiment 20001757 PARAMETER Experiment Name: At_50mM_NH4NO3_L-to-H_P Parameter: Tissue Value: Leaf
  misc_feature: MA Experiment 20001757 PARAMETER Experiment Name: At_50mM_NH4NO3_L-to-H_P Parameter: Treatment Value: 50mM NH4NO3 vs 100mM Mannitol
  misc_feature: MA Experiment ID: 20001906 Result: Down-regulated in Transcription
  misc_feature: MA Experiment 20001906 PARAMETER Experiment Name: At_Drought_Reproduction_P Parameter: Age (day) Value: 35
  misc_feature: MA Experiment 20001906 PARAMETER Experiment Name: At_Drought_Reproduction_P Parameter: Organism Value: A. thaliana
  misc_feature: MA Experiment 20001906 PARAMETER Experiment Name: At_Drought_Reproduction_P Parameter: Plant Line Value: WS
  misc_feature: MA Experiment 20001906 PARAMETER Experiment Name: At_Drought_Reproduction_P Parameter: Timepoint (day) Value: 5
  misc_feature: MA Experiment 20001906 PARAMETER Experiment Name: At_Drought_Reproduction_P Parameter: Tissue Value: Siliques
  misc_feature: MA Experiment 20001906 PARAMETER Experiment Name: At_Drought_Reproduction_P Parameter: Treatment Value: Drought vs. No Drought
ctctctcgatcttactcaattttgcgtttctgcttttcattttctctcaagaagcgtaaatggcgaacaatggacctaactgggacggattactcaaatggagcctctcacattccgatggagcttcctcttctagccgtataagtgaggaagatcgacaatggtttgtggaagctatgcaagcacatacaatcgattcaatctctcgtatgaaagtaatatctcaaatcatgaagatgcctgaacaagtcttggaggctcaaggagttacacctgatgatcttgaaggaatgttggctgagctgcaggaacacgtcgagtcgatagatttggccaatgatcttcactccattggaggtttggttcctctccttagctatctcaagaactctaatgcgaaaattcgagcaaagtctgccgatgttttgactacggttgtccaaaacaatccaagaagccagcaacttgttatggaagcaaatgggttcgaaccattattaactaactttattgctgatcctgacattagagtccggaccaaggcactcggggctatatcttctcttatccgtaacaaccaacccgggattacagcattccgtctggcaaatggttatgctggcctgcgagacgctttggtctctgataccgttagattccaaagaaaagcgttgaacttgcttcactatcttctccaagaaagcaactcagactgtaaaatcgttagagatcttggattccctcgcataatgatccacctagcatccaaccaagattttgaagttcgggaattcgctcttcgtggtctcctagagcttgcccgtgaagaatctgtgagaaaccttgatagaggggatgtgaatctaagacagcttcttgaggagagaacaagacgaataattgtgatgtcggacgaagatctttgtgcagctagagaagaaagacagctagtggatagtctttggaccgtgtgttatgatgaaccgtcccttctaagagaaagaggtctggtctacctcccttctgacgacgagctggctcctgatgtggttagggaccgctttgaacctcctctaagggcttgggctgcaagacgacatgatgaaacgagtgaatccccggttccacttcttcttggtcctgcaccgtgatctcgttcaaccaaattattagattttgcagttatcaacaaatcagctttgctttagaatttctctagctcttgtttatgtatatctgagcgacaacaagacgctattaaagagattatctgtgttctgtttctgtaatacaaatctacactcatggacttcaagttctac

SEQ ID NO: 24189 - protein, 363 aa, Arabidopsis thaliana
  peptide (1)..(363): Ceres Seq. ID no. 13486961
  misc_feature (130)..(171): Pfam Name: Armadillo/beta-catenin-like repeat Pfam Description: Armadillo/beta-catenin-like repeat
  misc_feature (10)..(274): Homolog of NCBI NO: 31221541 NR Description: ENSANGP00000019732 [Anopheles gambiae]
  misc_feature (9)..(286): Homolog of NCBI NO: 15231095 NR Description: expressed protein [Arabidopsis thaliana]
  misc_feature (1)..(312): Homolog of NCBI NO: 15241689 NR Description: expressed protein [Arabidopsis thaliana]
  misc_feature (5)..(363): Homolog of NCBI NO: 34897412 NR Description: putative Hsp70 binding protein
  misc_feature (1)..(29): Homolog of NCBI NO: 6478927 NR Description: hypothetical protein [Arabidopsis thaliana]
  misc_feature (30)..(361): Homolog of NCBI NO: 6478927 NR Description: hypothetical protein [Arabidopsis thaliana]
  misc_feature (1)..(361): Homolog of NCBI NO: 21553998 NR Description: unknown [Arabidopsis thaliana]
  misc_feature (1)..(361): Homolog of NCBI NO: 18398480 NR Description: expressed protein [Arabidopsis thaliana]
  misc_feature (1)..(363): Homolog of NCBI NO: 26449490 NR Description: unknown protein [Arabidopsis thaliana]
  misc_feature (1)..(363): Homolog of NCBI NO: 15232329 NR Description: expressed protein [Arabidopsis thaliana]
MANNGPNWDGLLKWSLSHSDGASSSSRISEEDRQWFVEAMQAHTIDSISRMKVISQIMKMPEQVLEAQGVTPDDLEGMLAELQEHVESIDLANDLHSIGGLVPLLSYLKNSNAKIRAKSADVLTTVVQNNPRSQQLVMEANGFEPLLTNFIADPDIRVRTKALGAISSLIRNNQPGITAFRLANGYAGLRDALVSDTVRFQRKALNLLHYLLQESNSDCKIVRDLGFPRIMIHLASNQDFEVREFALRGLLELAREESVRNLDRGDVNLRQLLEERTRRIIVMSDEDLCAAREERQLVDSLWTVCYDEPSLLRERGLVYLPSDDELAPDVVRDRFEPPLRAWAARRHDETSESPVPLLLGPAP

SEQ ID NO: 24190 - protein, 324 aa, Arabidopsis thaliana
  peptide (1)..(324): Ceres Seq. ID no. 13486962
  misc_feature (91)..(132): Pfam Name: Armadillo/beta-catenin-like repeat Pfam Description: Armadillo/beta-catenin-like repeat
  misc_feature (1)..(221): Homolog of NCBI NO: 16769376 NR Description: LD28549p [Drosophila melanogaster]
  misc_feature (1)..(235): Homolog of NCBI NO: 31221541 NR Description: ENSANGP00000019732 [Anopheles gambiae]
  misc_feature (1)..(247): Homolog of NCBI NO: 15231095 NR Description: expressed protein [Arabidopsis thaliana]
  misc_feature (1)..(273): Homolog of NCBI NO: 15241689 NR Description: expressed protein [Arabidopsis thaliana]
  misc_feature (1)..(324): Homolog of NCBI NO: 34897412 NR Description: putative Hsp70 binding protein
  misc_feature (1)..(322): Homolog of NCBI NO: 6478927 NR Description: hypothetical protein [Arabidopsis thaliana]
  misc_feature (1)..(322): Homolog of NCBI NO: 21553998 NR Description: unknown [Arabidopsis thaliana]
  misc_feature (1)..(322): Homolog of NCBI NO: 18398480 NR Description: expressed protein [Arabidopsis thaliana]
  misc_feature (1)..(324): Homolog of NCBI NO: 26449490 NR Description: unknown protein [Arabidopsis thaliana]
  misc_feature (1)..(324): Homolog of NCBI NO: 15232329 NR Description: expressed protein [Arabidopsis thaliana]
MQAHTIDSISRMKVISQIMKMPEQVLEAQGVTPDDLEGMLAELQEHVESIDLANDLHSIGGLVPLLSYLKNSNAKIRAKSADVLTTVVQNNPRSQQLVMEANGFEPLLTNFIADPDIRVRTKALGAISSLIRNNQPGITAFRLANGYAGLRDALVSDTVRFQRKALNLLHYLLQESNSDCKIVRDLGFPRIMIHLASNQDFEVREFALRGLLELAREESVRNLDRGDVNLRQLLEERTRRIIVMSDEDLCAAREERQLVDSLWTVCYDEPSLLRERGLVYLPSDDELAPDVVRDRFEPPLRAWAARRHDETSESPVPLLLGPAP

SEQ ID NO: 24191 - protein, 313 aa, Arabidopsis thaliana
  peptide (1)..(313): Ceres Seq. ID no. 13486963
  misc_feature (80)..(121): Pfam Name: Armadillo/beta-catenin-like repeat Pfam Description: Armadillo/beta-catenin-like repeat
  misc_feature (1)..(210): Homolog of NCBI NO: 16769376 NR Description: LD28549p [Drosophila melanogaster]
  misc_feature (1)..(224): Homolog of NCBI NO: 31221541 NR Description: ENSANGP00000019732 [Anopheles gambiae]
  misc_feature (1)..(236): Homolog of NCBI NO: 15231095 NR Description: expressed protein [Arabidopsis thaliana]
  misc_feature (1)..(262): Homolog of NCBI NO: 15241689 NR Description: expressed protein [Arabidopsis thaliana]
  misc_feature (1)..(313): Homolog of NCBI NO: 34897412 NR Description: putative Hsp70 binding protein
  misc_feature (1)..(311): Homolog of NCBI NO: 6478927 NR Description: hypothetical protein [Arabidopsis thaliana]
  misc_feature (1)..(311): Homolog of NCBI NO: 21553998 NR Description: unknown [Arabidopsis thaliana]
  misc_feature (1)..(311): Homolog of NCBI NO: 18398480 NR Description: expressed protein [Arabidopsis thaliana]
  misc_feature (1)..(313): Homolog of NCBI NO: 26449490 NR Description: unknown protein [Arabidopsis thaliana]
  misc_feature (1)..(313): Homolog of NCBI NO: 15232329 NR Description: expressed protein [Arabidopsis thaliana]
MKVISQIMKMPEQVLEAQGVTPDDLEGMLAELQEHVESIDLANDLHSIGGLVPLLSYLKNSNAKIRAKSADVLTTVVQNNPRSQQLVMEANGFEPLLTNFIADPDIRVRTKALGAISSLIRNNQPGITAFRLANGYAGLRDALVSDTVRFQRKALNLLHYLLQESNSDCKIVRDLGFPRIMIHLASNQDFEVREFALRGLLELAREESVRNLDRGDVNLRQLLEERTRRIIVMSDEDLCAAREERQLVDSLWTVCYDEPSLLRERGLVYLPSDDELAPDVVRDRFEPPLRAWAARRHDETSESPVPLLLGPAP

SEQ ID NO: 24192 - DNA, 947 bp, Arabidopsis thaliana
  misc_feature (1)..(947): Ceres Seq. ID no. 12321529
  misc_feature: MA Experiment ID: 20001905 Result: Down-regulated in Transcription
  misc_feature: MA Experiment 20001905 PARAMETER Experiment Name: At_Drought_Reproduction_P Parameter: Age (day) Value: 40
  misc_feature: MA Experiment 20001905 PARAMETER Experiment Name: At_Drought_Reproduction_P Parameter: Organism Value: A. thaliana
  misc_feature: MA Experiment 20001905 PARAMETER Experiment Name: At_Drought_Reproduction_P Parameter: Plant Line Value: WS
  misc_feature: MA Experiment 20001905 PARAMETER Experiment Name: At_Drought_Reproduction_P Parameter: Timepoint (day) Value: 10
  misc_feature: MA Experiment 20001905 PARAMETER Experiment Name: At_Drought_Reproduction_P Parameter: Tissue Value: Rosettes
  misc_feature: MA Experiment 20001905 PARAMETER Experiment Name: At_Drought_Reproduction_P Parameter: Treatment Value: Drought vs. No Drought
acctaacgcagattcttcttctctaccatattcgttgaaaccagagaagatggtgggtgtgtcgccgaagatcgctccgtcgatgttgtcatcggactttgcaaatcttgccgcggaggctaagcggatgatcgatttgggcgccaattggcttcacatggacattatggacgggcattttgtttctaacctaacgattggtgctcctgtcatcgagagtttgaggaagcacacaaatgcatatcttgattgccacttaatggtgacgaaccccatggattatgtggatcagatggctaaagctggggcgtctggtttcacattccacgttgaggtggcccaagagaattggcaagaacttgtgaagaagattaaggctgctgggatgaggccaggtgtggctctaaagcctggaacacctgttgaacaagtctatcctctggtcgaaggtacaaatccggtcgaaatggttcttgtgatgactgtggagcctggatttggaggccagaagttcatgcccagcatgatggacaaggtcagggcattgaggaacaagtacccaacacttgatattgaggtggacggcggcttaggcccttccacaatcgatgcagcagctgcagctggagccaactgtatcgtcgcaggaagttcagtgtttggagctccgaagcctggggacgtcatatcccttttgcgggctagtgttgagaaagcacaaccctccacttaaggaagttggtgccctaactctatgagccaaggtcttaagctaatacttttttatttctttgaaatggaataaaccttagatcttagttacttgttatacaattaaaatgtgtctgagagcttttgccctagcgatgaaattccacaagaaaatcaccggagatagaattttttgttaagaaattgtttattatgtagcagttacattttagtct

SEQ ID NO: 24193 - protein, 243 aa, Arabidopsis thaliana
  peptide (1)..(243): Ceres Seq. ID no. 12321530
  misc_feature (23)..(223): Pfam Name: Ribulose-phosphate 3 epimerase family Pfam Description: Ribulose-phosphate 3 epimerase family
  misc_feature (22)..(239): Homolog of NCBI NO: 17552948 NR Description: D-ribulose-5-Phosphate 3-epimerase (24.4 kD)
  misc_feature (24)..(239): Homolog of NCBI NO: 39581355 NR Description: Hypothetical protein CBG15299 [Caenorhabditis
  misc_feature (20)..(238): Homolog of NCBI NO: 6322341 NR Description: D-ribulose-5-Phosphate 3-epimerase; Rpe1p
  misc_feature (23)..(240): Homolog of NCBI NO: 40385883 NR Description: ribulose-5-phosphate-3-epimerase isoform 1
  misc_feature (23)..(240): Homolog of NCBI NO: 27532955 NR Description: RIKEN cDNA 5730518J08 [Mus musculus]
  misc_feature (20)..(240): Homolog of NCBI NO: 19114917 NR Description: putative ribulose phosphate 3-epimerase
  misc_feature (23)..(240): Homolog of NCBI NO: 28373310 NR Description: Chain A, The Structure Of The Cytosolic
  misc_feature (20)..(243): Homolog of NCBI NO: 6091725 NR Description: putative D-ribulose-5-phosphate 3-epimerase
  misc_feature (20)..(243): Homolog of NCBI NO: 18395962 NR Description: putative D-ribulose-5-phosphate 3-epimerase
  misc_feature (17)..(243): Homolog of NCBI NO: 15221735 NR Description: putative D-ribulose-5-phosphate-3-epimerase
PNADSSSLPYSLKPEKMVGVSPKIAPSMLSSDFANLAAEAKRMIDLGANWLHMDIMDGHFVSNLTIGAPVIESLRKHTNAYLDCHLMVTNPMDYVDQMAKAGASGFTFHVEVAQENWQELVKKIKAAGMRPGVALKPGTPVEQVYPLVEGTNPVEMVLVMTVEPGFGGQKFMPSMMDKVRALRNKYPTLDIEVDGGLGPSTIDAAAAAGANCIVAGSSVFGAPKPGDVISLLRASVEKAQPST

SEQ ID NO: 24194 - protein, 227 aa, Arabidopsis thaliana
  peptide (1)..(227): Ceres Seq. ID no. 12321531
  misc_feature (7)..(207): Pfam Name: Ribulose-phosphate 3 epimerase family Pfam Description: Ribulose-phosphate 3 epimerase family
  misc_feature (6)..(223): Homolog of NCBI NO: 17552948 NR Description: D-ribulose-5-Phosphate 3-epimerase (24.4 kD)
  misc_feature (8)..(223): Homolog of NCBI NO: 39581355 NR Description: Hypothetical protein CBG15299 [Caenorhabditis
  misc_feature (4)..(222): Homolog of NCBI NO: 6322341 NR Description: D-ribulose-5-Phosphate 3-epimerase; Rpe1p
  misc_feature (7)..(224): Homolog of NCBI NO: 40385883 NR Description: ribulose-5-phosphate-3-epimerase isoform 1
  misc_feature (7)..(224): Homolog of NCBI NO: 27532955 NR Description: RIKEN cDNA 5730518J08 [Mus musculus]
  misc_feature (4)..(224): Homolog of NCBI NO: 19114917 NR Description: putative ribulose phosphate 3-epimerase
  misc_feature (7)..(224): Homolog of NCBI NO: 28373310 NR Description: Chain A, The Structure Of The Cytosolic
  misc_feature (4)..(227): Homolog of NCBI NO: 6091725 NR Description: putative D-ribulose-5-phosphate 3-epimerase
  misc_feature (4)..(227): Homolog of NCBI NO: 18395962 NR Description: putative D-ribulose-5-phosphate 3-epimerase
  misc_feature (1)..(227): Homolog of NCBI NO: 15221735 NR Description: putative D-ribulose-5-phosphate-3-epimerase
MVGVSPKIAPSMLSSDFANLAAEAKRMIDLGANWLHMDIMDGHFVSNLTIGAPVIESLRKHTNAYLDCHLMVTNPMDYVDQMAKAGASGFTFHVEVAQENWQELVKKIKAAGMRPGVALKPGTPVEQVYPLVEGTNPVEMVLVMTVEPGFGGQKFMPSMMDKVRALRNKYPTLDIEVDGGLGPSTIDAAAAAGANCIVAGSSVFGAPKPGDVISLLRASVEKAQPST

SEQ ID NO: 24195 - protein, 216 aa, Arabidopsis thaliana
  peptide (1)..(216): Ceres Seq. ID no. 12321532
  misc_feature (1)..(196): Pfam Name: Ribulose-phosphate 3 epimerase family Pfam Description: Ribulose-phosphate 3 epimerase family
  misc_feature (1)..(213): Homolog of NCBI NO: 28373310 NR Description: Chain A, The Structure Of The Cytosolic
  misc_feature (1)..(216): Homolog of NCBI NO: 6091725 NR Description: putative D-ribulose-5-phosphate 3-epimerase
  misc_feature (1)..(212): Homolog of NCBI NO: 17552948 NR Description: D-ribulose-5-Phosphate 3-epimerase (24.4 kD)
  misc_feature (1)..(211): Homolog of NCBI NO: 6322341 NR Description: D-ribulose-5-Phosphate 3-epimerase; Rpe1p
  misc_feature (1)..(213): Homolog of NCBI NO: 27532955 NR Description: RIKEN cDNA 5730518J08 [Mus musculus]
  misc_feature (1)..(213): Homolog of NCBI NO: 19114917 NR Description: putative ribulose phosphate 3-epimerase
  misc_feature (1)..(213): Homolog of NCBI NO: 40385883 NR Description: ribulose-5-phosphate-3-epimerase isoform 1
  misc_feature (1)..(212): Homolog of NCBI NO: 39581355 NR Description: Hypothetical protein CBG15299 [Caenorhabditis
  misc_feature (1)..(216): Homolog of NCBI NO: 18395962 NR Description: putative D-ribulose-5-phosphate 3-epimerase
  misc_feature (1)..(216): Homolog of NCBI NO: 15221735 NR Description: putative D-ribulose-5-phosphate-3-epimerase
MLSSDFANLAAEAKRMIDLGANWLHMDIMDGHFVSNLTIGAPVIESLRKHTNAYLDCHLMVTNPMDYVDQMAKAGASGFTFHVEVAQENWQELVKKIKAAGMRPGVALKPGTPVEQVYPLVEGTNPVEMVLVMTVEPGFGGQKFMPSMMDKVRALRNKYPTLDIEVDGGLGPSTIDAAAAAGANCIVAGSSVFGAPKPGDVISLLRASVEKAQPST

SEQ ID NO: 24196 - DNA, 643 bp, Arabidopsis thaliana
  misc_feature (1)..(643): Ceres Seq. ID no. 13645876
  misc_feature: MA Experiment ID: 108435 Result: Down-regulated in Transcription
  misc_feature: MA Experiment 108435 PARAMETER Experiment Name: At_stm_Mutants_cDNA_P Parameter: Plant Line Value: wt Landsburg vs stm
  misc_feature: MA Experiment 108435 PARAMETER Experiment Name: At_stm_Mutants_cDNA_P Parameter: Tissue Value: Shoot Apical Meristem Region
  misc_feature: MA Experiment ID: 108573 Result: Down-regulated in Transcription
  misc_feature: MA Experiment 108573 PARAMETER Experiment Name: At_Drought_cDNA_P Parameter: Timepoint (hr) Value: 6
  misc_feature: MA Experiment 108573 PARAMETER Experiment Name: At_Drought_cDNA_P Parameter: Tissue Value: Aerial
  misc_feature: MA Experiment 108573 PARAMETER Experiment Name: At_Drought_cDNA_P Parameter: Treatment Value: Drought vs. No Drought
  misc_feature: MA Experiment ID: 108595 Result: Down-regulated in Transcription
  misc_feature: MA Experiment 108595 PARAMETER Experiment Name: At_Ler-pi_Ovule_cDNA_P Parameter: Plant Line Value: null
  misc_feature: MA Experiment ID: 20000185 Result: Down-regulated in Transcription
  misc_feature: MA Experiment 20000185 PARAMETER Experiment Name: At_Roots__P Parameter: Age (day) Value: 7 vs. 21
  misc_feature: MA Experiment 20000185 PARAMETER Experiment Name: At_Roots__P Parameter: Organism Value: A. thaliana
  misc_feature: MA Experiment 20000185 PARAMETER Experiment Name: At_Roots__P Parameter: Tissue Value: Roots vs. Whole Plant
  misc_feature: MA Experiment ID: 20000437 Result: Down-regulated in Transcription
  misc_feature: MA Experiment 20000437 PARAMETER Experiment Name: At_Drought_P Parameter: Age (day) Value: 8
  misc_feature: MA Experiment 20000437 PARAMETER Experiment Name: At_Drought_P Parameter: Organism Value: A. thaliana
  misc_feature: MA Experiment 20000437 PARAMETER Experiment Name: At_Drought_P Parameter: Plant Line Value: WS
  misc_feature: MA Experiment 20000437 PARAMETER Experiment Name: At_Drought_P Parameter: Timepoint (hr) Value: 24
  misc_feature: MA Experiment 20000437 PARAMETER Experiment Name: At_Drought_P Parameter: Tissue Value: Whole Plant
  misc_feature: MA Experiment 20000437 PARAMETER Experiment Name: At_Drought_P Parameter: Treatment Value: Drought vs. No Drought
  misc_feature: MA Experiment ID: 20000439 Result: Down-regulated in Transcription
  misc_feature: MA Experiment 20000439 PARAMETER Experiment Name: At_Roots__P Parameter: Age (day) Value: 14 vs. 21
  misc_feature: MA Experiment 20000439 PARAMETER Experiment Name: At_Roots__P Parameter: Organism Value: A. thaliana
  misc_feature: MA Experiment 20000439 PARAMETER Experiment Name: At_Roots__P Parameter: Tissue Value: Roots vs. Whole Plant
  misc_feature: MA Experiment ID: 20000794 Result: Down-regulated in Transcription
  misc_feature: MA Experiment 20000794 PARAMETER Experiment Name: At_Petals_P Parameter: Age (day) Value: 23-25 days
  misc_feature: MA Experiment 20000794 PARAMETER Experiment Name: At_Petals_P Parameter: Plant Line Value: WS
  misc_feature: MA Experiment 20000794 PARAMETER Experiment Name: At_Petals_P Parameter: Tissue Value: Petals vs. Whole plant
  misc_feature: MA Experiment ID: 20001757 Result: Up-regulated in Transcription
  misc_feature: MA Experiment 20001757 PARAMETER Experiment Name: At_50mM_NH4NO3_L-to-H_P Parameter: Timepoint (hr) Value: 6
  misc_feature: MA Experiment 20001757 PARAMETER Experiment Name: At_50mM_NH4NO3_L-to-H_P Parameter: Tissue Value: Leaf
  misc_feature: MA Experiment 20001757 PARAMETER Experiment Name: At_50mM_NH4NO3_L-to-H_P Parameter: Treatment Value: 50mM NH4NO3 vs 100mM Mannitol
tgattctcttatccatcaatcgttacttcgtttcttctctatcaccaggaaaaaagaagaagatagctcctgaagacaaaaatggcggtttctctcccgaactcgtttcttcagattagcccatgtgttccttctctgcaattaagaaagccggtgatggcggcagtgaaaggaggaaaacaatcggtgagaagaagcagcaatacggtggttcagataacgtgtcgtaagaaggaattgcatcctgaattccacgaagacgcaaaggtttactgcaatggagagctggtgatgactacaggaggaacaaagaaagagtatgtggttgatgtatggtcaggtaaccatccgttttacctcgggaatcgttcggctttgatggttgatgctgatcaagttgagaagtttcgtaagaggttcgctgggctttctgagattatggagattcctgtgcttaaaggagaaatcattatgcctactaagaaaagtaaaggtcccaaagggaagaagaaatgatgagtcttttctggtaaagcttatgtctttgaatttgttgtcttttcaattgaagtcgagatactgcttaggctgttaaaaattgtatgtgaattttcttctgaatgctattggttatgctttctct

SEQ ID NO: 24197 - protein, 144 aa, Arabidopsis thaliana
  peptide (1)..(144): Ceres Seq. ID no. 13645877
  misc_feature (50)..(117): Pfam Name: Ribosomal protein L31 Pfam Description: Ribosomal protein L31
  misc_feature (50)..(117): Pfam Name: Ribosomal protein L31 Pfam Description: Ribosomal protein L31
  misc_feature (50)..(113): Homolog of NCBI NO: 33241133 NR Description: Ribosomal protein L31
  misc_feature (50)..(117): Homolog of NCBI NO: 17231678 NR Description: 50S ribosomal protein L31 [Nostoc sp. PCC 7120]
  misc_feature (50)..(113): Homolog of NCBI NO: 33862086 NR Description: 50S ribosomal protein L31
  misc_feature (50)..(143): Homolog of NCBI NO: 23042796 NR Description: hypothetical protein [Trichodesmium erythraeum
  misc_feature (50)..(118): Homolog of NCBI NO: 11467741 NR Description: ribosomal protein L31 [Guillardia theta]
  misc_feature (50)..(113): Homolog of NCBI NO: 33241133 NR Description: Ribosomal protein L31
  misc_feature (50)..(113): Homolog of NCBI NO: 33862086 NR Description: 50S ribosomal protein L31
  misc_feature (50)..(118): Homolog of NCBI NO: 11467741 NR Description: ribosomal protein L31 [Guillardia theta]
  misc_feature (1)..(144): Homolog of NCBI NO: 18410833 NR Description: chloroplast 50S ribosomal protein L31 -related
  misc_feature (46)..(144): Homolog of NCBI NO: 3885513 NR Description: similar to chloroplast 50S ribosomal protein L31
  misc_feature (24)..(118): Homolog of NCBI NO: 34912982 NR Description: putative chloroplast 50S ribosomal protein L31
  misc_feature (50)..(119): Homolog of NCBI NO: 32307564 NR Description: ribosomal protein rpL31 [Bigelowiella natans]
  misc_feature (50)..(144): Homolog of NCBI NO: 22297654 NR Description: 50S ribosomal protein L31 [Thermosynechococcus
  misc_feature (50)..(143): Homolog of NCBI NO: 23042796 NR Description: hypothetical protein [Trichodesmium erythraeum
  misc_feature (50)..(117): Homolog of NCBI NO: 17231678 NR Description: 50S ribosomal protein L31 [Nostoc sp. PCC 7120]
  misc_feature (50)..(144): Homolog of NCBI NO: 22297654 NR Description: 50S ribosomal protein L31 [Thermosynechococcus
  misc_feature (50)..(119): Homolog of NCBI NO: 32307564 NR Description: ribosomal protein rpL31 [Bigelowiella natans]
  misc_feature (24)..(118): Homolog of NCBI NO: 34912982 NR Description: putative chloroplast 50S ribosomal protein L31
  misc_feature (46)..(144): Homolog of NCBI NO: 3885513 NR Description: similar to chloroplast 50S ribosomal protein L31
  misc_feature (1)..(144): Homolog of NCBI NO: 18410833 NR Description: chloroplast 50S ribosomal protein L31 -related
MAVSLPNSFLQISPCVPSLQLRKPVMAAVKGGKQSVRRSSNTVVQITCRKKELHPEFHEDAKVYCNGELVMTTGGTKKEYVVDVWSGNHPFYLGNRSALMVDADQVEKFRKRFAGLSEIMEIPVLKGEIIMPTKKSKGPKGKKK

SEQ ID NO: 24198 - protein, 119 aa, Arabidopsis thaliana
  peptide (1)..(119): Ceres Seq. ID no. 13645878
  misc_feature (25)..(92): Pfam Name: Ribosomal protein L31 Pfam Description: Ribosomal protein L31
  misc_feature (25)..(92): Pfam Name: Ribosomal protein L31 Pfam Description: Ribosomal protein L31
  misc_feature (25)..(88): Homolog of NCBI NO: 33241133 NR Description: Ribosomal protein L31
  misc_feature (25)..(92): Homolog of NCBI NO: 17231678 NR Description: 50S ribosomal protein L31 [Nostoc sp. PCC 7120]
  misc_feature (25)..(88): Homolog of NCBI NO: 33862086 NR Description: 50S ribosomal protein L31
  misc_feature (25)..(118): Homolog of NCBI NO: 23042796 NR Description: hypothetical protein [Trichodesmium erythraeum
  misc_feature (25)..(93): Homolog of NCBI NO: 11467741 NR Description: ribosomal protein L31 [Guillardia theta]
  misc_feature (25)..(88): Homolog of NCBI NO: 33241133 NR Description: Ribosomal protein L31
  misc_feature (25)..(88): Homolog of NCBI NO: 33862086 NR Description: 50S ribosomal protein L31
  misc_feature (25)..(93): Homolog of NCBI NO: 11467741 NR Description: ribosomal protein L31 [Guillardia theta]
  misc_feature (1)..(119): Homolog of NCBI NO: 18410833 NR Description: chloroplast 50S ribosomal protein L31 -related
  misc_feature (21)..(119): Homolog of NCBI NO: 3885513 NR Description: similar to chloroplast 50S ribosomal protein L31
  misc_feature (1)..(93): Homolog of NCBI NO: 34912982 NR Description: putative chloroplast 50S ribosomal protein L31
  misc_feature (25)..(94): Homolog of NCBI NO: 32307564 NR Description: ribosomal protein rpL31 [Bigelowiella natans]
  misc_feature (25)..(119): Homolog of NCBI NO: 22297654 NR Description: 50S ribosomal protein L31 [Thermosynechococcus
  misc_feature (25)..(118): Homolog of NCBI NO: 23042796 NR Description: hypothetical protein [Trichodesmium erythraeum
  misc_feature (25)..(92): Homolog of NCBI NO: 17231678 NR Description: 50S ribosomal protein L31 [Nostoc sp. PCC 7120]
  misc_feature (25)..(119): Homolog of NCBI NO: 22297654 NR Description: 50S ribosomal protein L31 [Thermosynechococcus
  misc_feature (25)..(94): Homolog of NCBI NO: 32307564 NR Description: ribosomal protein rpL31 [Bigelowiella natans]
  misc_feature (1)..(93): Homolog of NCBI NO: 34912982 NR Description: putative chloroplast 50S ribosomal protein L31
  misc_feature (21)..(119): Homolog of NCBI NO: 3885513 NR Description: similar to chloroplast 50S ribosomal protein L31
  misc_feature (1)..(119): Homolog of NCBI NO: 18410833 NR Description: chloroplast 50S ribosomal protein L31 -related
MAAVKGGKQSVRRSSNTVVQITCRKKELHPEFHEDAKVYCNGELVMTTGGTKKEYVVDVWSGNHPFYLGNRSALMVDADQVEKFRKRFAGLSEIMEIPVLKGEIIMPTKKSKGPKGKKK

SEQ ID NO: 24199 - protein, 74 aa, Arabidopsis thaliana
  peptide (1)..(74): Ceres Seq. ID no. 13645879
  misc_feature (1)..(43): Homolog of NCBI NO: 33241133 NR Description: Ribosomal protein L31
  misc_feature (1)..(47): Homolog of NCBI NO: 17231678 NR Description: 50S ribosomal protein L31 [Nostoc sp. PCC 7120]
  misc_feature (1)..(43): Homolog of NCBI NO: 33862086 NR Description: 50S ribosomal protein L31
  misc_feature (1)..(73): Homolog of NCBI NO: 23042796 NR Description: hypothetical protein [Trichodesmium erythraeum
  misc_feature (1)..(48): Homolog of NCBI NO: 11467741 NR Description: ribosomal protein L31 [Guillardia theta]
  misc_feature (1)..(74): Homolog of NCBI NO: 22297654 NR Description: 50S ribosomal protein L31 [Thermosynechococcus
  misc_feature (1)..(49): Homolog of NCBI NO: 32307564 NR Description: ribosomal protein rpL31 [Bigelowiella natans]
  misc_feature (1)..(48): Homolog of NCBI NO: 34912982 NR Description: putative chloroplast 50S ribosomal protein L31
  misc_feature (1)..(74): Homolog of NCBI NO: 3885513 NR Description: similar to chloroplast 50S ribosomal protein L31
  misc_feature (1)..(74): Homolog of NCBI NO: 18410833 NR Description: chloroplast 50S ribosomal protein L31 -related
  misc_feature (1)..(43): Homolog of NCBI NO: 33241133 NR Description: Ribosomal protein L31
  misc_feature (1)..(47): Homolog of NCBI NO: 17231678 NR Description: 50S ribosomal protein L31 [Nostoc sp. PCC 7120]
  misc_feature (1)..(43): Homolog of NCBI NO: 33862086 NR Description: 50S ribosomal protein L31
  misc_feature (1)..(73): Homolog of NCBI NO: 23042796 NR Description: hypothetical protein [Trichodesmium erythraeum
  misc_feature (1)..(48): Homolog of NCBI NO: 11467741 NR Description: ribosomal protein L31 [Guillardia theta]
  misc_feature (1)..(74): Homolog of NCBI NO: 22297654 NR Description: 50S ribosomal protein L31 [Thermosynechococcus
  misc_feature (1)..(49): Homolog of NCBI NO: 32307564 NR Description: ribosomal protein rpL31 [Bigelowiella natans]
  misc_feature (1)..(48): Homolog of NCBI NO: 34912982 NR Description: putative chloroplast 50S ribosomal protein L31
  misc_feature (1)..(74): Homolog of NCBI NO: 3885513 NR Description: similar to chloroplast 50S ribosomal protein L31
  misc_feature (1)..(74): Homolog of NCBI NO: 18410833 NR Description: chloroplast 50S ribosomal protein L31 -related
MTTGGTKKEYVVDVWSGNHPFYLGNRSALMVDADQVEKFRKRFAGLSEIMEIPVLKGEIIMPTKKSKGPKGKKK

SEQ ID NO: 24200 - DNA, 1537 bp, Arabidopsis thaliana
  misc_feature (1)..(1537): Ceres Seq. ID no. 13490783
  misc_feature: MA Experiment ID: 108434 Result: Up-regulated in Transcription
  misc_feature: MA Experiment 108434 PARAMETER Experiment Name: At_Root_Tips_cDNA_P Parameter: Tissue Value: Root Tips
  misc_feature: MA Experiment ID: 108461 Result: Up-regulated in Transcription
  misc_feature: MA Experiment 108461 PARAMETER Experiment Name: At_Germinating_Seeds_cDNA_P Parameter: Age (day) Value: 1 vs. 0
  misc_feature: MA Experiment 108461 PARAMETER Experiment Name: At_Germinating_Seeds_cDNA_P Parameter: Tissue Value: Germinating Seeds
  misc_feature: MA Experiment ID: 108576 Result: Down-regulated in Transcription
  misc_feature: MA Experiment 108576 PARAMETER Experiment Name: At_42deg_Heat_cDNA_P Parameter: Temperature (deg C) Value: 42 vs. 22
  misc_feature: MA Experiment 108576 PARAMETER Experiment Name: At_42deg_Heat_cDNA_P Parameter: Timepoint (hr) Value: 1
  misc_feature: MA Experiment 108576 PARAMETER Experiment Name: At_42deg_Heat_cDNA_P Parameter: Tissue Value: Aerial
  misc_feature: MA Experiment ID: 108595 Result: Down-regulated in Transcription
  misc_feature: MA Experiment 108595 PARAMETER Experiment Name: At_Ler-pi_Ovule_cDNA_P Parameter: Plant Line Value: null
  misc_feature: MA Experiment ID: 20000112 Result: Down-regulated in Transcription
  misc_feature: MA Experiment 20000112 PARAMETER Experiment Name: At_42deg_Heat_cDNA_P Parameter: Temperature (deg C) Value: 42 vs. 22
  misc_feature: MA Experiment 20000112 PARAMETER Experiment Name: At_42deg_Heat_cDNA_P Parameter: Timepoint (hr) Value: 2
  misc_feature: MA Experiment 20000112 PARAMETER Experiment Name: At_42deg_Heat_cDNA_P Parameter: Tissue Value: Aerial
  misc_feature: MA Experiment ID: 20000144 Result: Down-regulated in Transcription
  misc_feature: MA Experiment 20000144 PARAMETER Experiment Name: At_42deg_Heat_cDNA_P Parameter: Temperature (deg C) Value: 42 vs. 22
  misc_feature: MA Experiment 20000144 PARAMETER Experiment Name: At_42deg_Heat_cDNA_P Parameter: Timepoint (hr) Value: 1
  misc_feature: MA Experiment 20000144 PARAMETER Experiment Name: At_42deg_Heat_cDNA_P Parameter: Tissue Value: Aerial
ggccacgttttttttttttttgaaagtcgaaatcaaatcacattaccccaaatctctcttctttgaactttaatcctcttctctattgcatgctttaagctccaaacccaaaacgcaggaaaatctctttgacagtttttggttttagatgggaccaatcaaaacgataaagaagaagaagagagcagagaagaaggttgatcggaacgtattgcttgctgctactgctgctgctacttccgcatccgccgccgctgctcttaataacaacgacgacgacgacgactcatcatctcagtctttggattggtgggatggattctctcgccgtatttatggagggtcaacggatccaaagacatttgagtcagttttcaaaatatcaaggaagacatttgactacatttgctctcttgtgaaagccgatttcacagcaaagcctgcaaatttcagcgactcaaatgggaaccctttatctctcaatgaccgtgtagctgtggcgcttaggaggcttggctctggtgaatctctctctgtcattggagagacctttgggatgaaccagtcaacagtctcccaaatcacttggcgctttgttgaatcaatggaagagagagcaatacaccatctctcatggccttcgaaactcgatgaaataaaatcaaagtttgagaaaatctcaggtcttcctaactgctgtggcgctatcgacattacacatattgttatgaaccttcctgctgtggaaccgtcaaacaaagtttggttggacggagaaaagaacttcagcatgactttgcaggccgtagtagacccggacatgagattcctcgatgtaatagctggttggcctgggagtttaaatgatgatgttgtcctcaagaactcaggattctacaaactagttgagaaagggaagagactgaacggggaaaagttaccgctctcagaaagaaccgagctaagagaatacatagtaggtgattcaggttttcctcttcttccatggcttctcactccataccaaggcaaacccacgtcgcttcctcaaaccgagttcaacaaaagacactccgaggcaacaaaagccgcgcagatggcactatcgaagcttaaagacaggtggaggataataaacggggtaatgtggatgcctgatagaaaccggttaccaaggataatctttgtctgttgcttgctgcacaacattattatcgatatggaggatcaaactttggatgaccaacctttgtctcagcaacatgacatgaactacagacaacgaagctgcaagcttgccgatgaggcttcatcggtcttgagagatgaactctctgaccaactgtgtggaaaaaattcatcagcttgattactctctcccggttcttgtggtctttctatgaaagcttcatttgcttctttttccttctggtaattttgtttagcataacattttatcgtttgatttgatctattgacatattcttttatgggacaaacaaaaatgtgtatcttatgaatgttatttttaatttat

SEQ ID NO: 24201 - protein, 406 aa, Arabidopsis thaliana
  peptide (1)..(406): Ceres Seq. ID no. 13490784
  misc_feature (9)..(399): Homolog of NCBI NO: 30688449 NR Description: expressed protein [Arabidopsis thaliana]
  misc_feature (9)..(399): Homolog of NCBI NO: 21592524 NR Description: unknown [Arabidopsis thaliana]
  misc_feature (9)..(399): Homolog of NCBI NO: 7452044 NR Description: hypothetical protein F27B13.20 - Arabidopsis
  misc_feature (50)..(366): Homolog of NCBI NO: 15239835 NR Description: expressed protein [Arabidopsis thaliana]
  misc_feature (1)..(145): Homolog of NCBI NO: 11357482 NR Description: hypothetical protein F16M2.120 - Arabidopsis
  misc_feature (144)..(399): Homolog of NCBI NO: 11357482 NR Description: hypothetical protein F16M2.120 - Arabidopsis
  misc_feature (1)..(399): Homolog of NCBI NO: 18412695 NR Description: expressed protein [Arabidopsis thaliana]
  misc_feature (1)..(399): Homolog of NCBI NO: 25553597 NR Description: OJ1656_E11.28 [Oryza sativa (japonica
  misc_feature (53)..(405): Homolog of NCBI NO: 34908114 NR Description: P0031D11.14 [Oryza sativa (japonica
  misc_feature (1)..(406): Homolog of NCBI NO: 15233248 NR Description: expressed protein [Arabidopsis thaliana]
MGPIKTIKKKKRAEKKVDRNVLLAATAAATSASAAAALNNNDDDDDSSSQSLDWWDGFSRRIYGGSTDPKTFESVFKISRKTFDYICSLVKADFTAKPANFSDSNGNPLSLNDRVAVALRRLGSGESLSVIGETFGMNQSTVSQITWRFVESMEERAIHHLSWPSKLDEIKSKFEKISGLPNCCGAIDITHIVMNLPAVEPSNKVWLDGEKNFSMTLQAVVDPDMRFLDVIAGWPGSLNDDVVLKNSGFYKLVEKGKRLNGEKLPLSERTELREYIVGDSGFPLLPWLLTPYQGKPTSLPQTEFNKRHSEATKAAQMALSKLKDRWRIINGVMWMPDRNRLPRIIFVCCLLHNIIIDMEDQTLDDQPLSQQHDMNYRQRSCKLADEASSVLRDELSDQLCGKNSSA

SEQ ID NO: 24202 - protein, 270 aa, Arabidopsis thaliana
  peptide (1)..(270): Ceres Seq. ID no. 13490785
  misc_feature (1)..(263): Homolog of NCBI NO: 21902022 NR Description: B1097D05.23 [Oryza sativa (japonica
  misc_feature (1)..(263): Homolog of NCBI NO: 30688449 NR Description: expressed protein [Arabidopsis thaliana]
  misc_feature (1)..(263): Homolog of NCBI NO: 21592524 NR Description: unknown [Arabidopsis thaliana]
  misc_feature (1)..(263): Homolog of NCBI NO: 7452044 NR Description: hypothetical protein F27B13.20 - Arabidopsis
  misc_feature (1)..(230): Homolog of NCBI NO: 15239835 NR Description: expressed protein [Arabidopsis thaliana]
  misc_feature (8)..(263): Homolog of NCBI NO: 11357482 NR Description: hypothetical protein F16M2.120 - Arabidopsis
  misc_feature (1)..(263): Homolog of NCBI NO: 18412695 NR Description: expressed protein [Arabidopsis thaliana]
  misc_feature (1)..(263): Homolog of NCBI NO: 25553597 NR Description: OJ1656_E11.28 [Oryza sativa (japonica
  misc_feature (1)..(269): Homolog of NCBI NO: 34908114 NR Description: P0031D11.14 [Oryza sativa (japonica
  misc_feature (1)..(270): Homolog of NCBI NO: 15233248 NR Description: expressed protein [Arabidopsis thaliana]
MNQSTVSQITWRFVESMEERAIHHLSWPSKLDEIKSKFEKISGLPNCCGAIDITHIVMNLPAVEPSNKVWLDGEKNFSMTLQAVVDPDMRFLDVIAGWPGSLNDDVVLKNSGFYKLVEKGKRLNGEKLPLSERTELREYIVGDSGFPLLPWLLTPYQGKPTSLPQTEFNKRHSEATKAAQMALSKLKDRWRIINGVMWMPDRNRLPRIIFVCCLLHNIIIDMEDQTLDDQPLSQQHDMNYRQRSCKLADEASSVLRDELSDQLCGKNSSA

SEQ ID NO: 24203 - protein, 254 aa, Arabidopsis thaliana
  peptide (1)..(254): Ceres Seq. ID no. 13490786
  misc_feature (1)..(247): Homolog of NCBI NO: 21902022 NR Description: B1097D05.23 [Oryza sativa (japonica
  misc_feature (1)..(247): Homolog of NCBI NO: 30688449 NR Description: expressed protein [Arabidopsis thaliana]
  misc_feature (1)..(247): Homolog of NCBI NO: 21592524 NR Description: unknown [Arabidopsis thaliana]
  misc_feature (1)..(247): Homolog of NCBI NO: 7452044 NR Description: hypothetical protein F27B13.20 - Arabidopsis
  misc_feature (1)..(214): Homolog of NCBI NO: 15239835 NR Description: expressed protein [Arabidopsis thaliana]
  misc_feature (1)..(247): Homolog of NCBI NO: 11357482 NR Description: hypothetical protein F16M2.120 - Arabidopsis
  misc_feature (1)..(247): Homolog of NCBI NO: 18412695 NR Description: expressed protein [Arabidopsis thaliana]
  misc_feature (1)..(247): Homolog of NCBI NO: 25553597 NR Description: OJ1656_E11.28 [Oryza sativa (japonica
  misc_feature (1)..(253): Homolog of NCBI NO: 34908114 NR Description: P0031D11.14 [Oryza sativa (japonica
  misc_feature (1)..(254): Homolog of NCBI NO: 15233248 NR Description: expressed protein [Arabidopsis thaliana]
MEERAIHHLSWPSKLDEIKSKFEKISGLPNCCGAIDITHIVMNLPAVEPSNKVWLDGEKNFSMTLQAVVDPDMRFLDVIAGWPGSLNDDVVLKNSGFYKLVEKGKRLNGEKLPLSERTELREYIVGDSGFPLLPWLLTPYQGKPTSLPQTEFNKRHSEATKAAQMALSKLKDRWRIINGVMWMPDRNRLPRIIFVCCLLHNIIIDMEDQTLDDQPLSQQHDMNYRQRSCKLADEASSVLRDELSDQLCGKNSSA

SEQ ID NO: 24204 - DNA, 1250 bp, Arabidopsis thaliana
  misc_feature (1)..(1250): Ceres Seq. ID no. 12385312
  misc_feature: MA Experiment ID: 108434 Result: Down-regulated in Transcription
  misc_feature: MA Experiment 108434 PARAMETER Experiment Name: At_Root_Tips_cDNA_P Parameter: Tissue Value: Root Tips
  misc_feature: MA Experiment ID: 108464 Result: Up-regulated in Transcription
  misc_feature: MA Experiment 108464 PARAMETER Experiment Name: At_Germinating_Seeds_cDNA_P Parameter: Age (day) Value: 4 vs. 0
  misc_feature: MA Experiment 108464 PARAMETER Experiment Name: At_Germinating_Seeds_cDNA_P Parameter: Tissue Value: Germinating Seeds
  misc_feature: MA Experiment ID: 108473 Result: Up-regulated in Transcription
  misc_feature: MA Experiment 108473 PARAMETER Experiment Name: At_Drought_Flowers_cDNA_P Parameter: Timepoint (hr) Value: 7 d
  misc_feature: MA Experiment 108473 PARAMETER Experiment Name: At_Drought_Flowers_cDNA_P Parameter: Tissue Value: Flower
  misc_feature: MA Experiment 108473 PARAMETER Experiment Name: At_Drought_Flowers_cDNA_P Parameter: Treatment Value: Drought vs. No Drought
  misc_feature: MA Experiment ID: 108488 Result: Down-regulated in Transcription
  misc_feature: MA Experiment ID: 108501 Result: Down-regulated in Transcription
  misc_feature: MA Experiment 108501 PARAMETER Experiment Name: At_ap2_floral_buds_cDNA_P Parameter: Plant Line Value: ap2 (Ler.)
  misc_feature: MA Experiment 108501 PARAMETER Experiment Name: At_ap2_floral_buds_cDNA_P Parameter: Tissue Value: Closed Flower
  misc_feature: MA Experiment ID: 108572 Result: Up-regulated in Transcription
  misc_feature: MA Experiment 108572 PARAMETER Experiment Name: At_Drought_cDNA_P Parameter: Timepoint (hr) Value: 1
  misc_feature: MA Experiment 108572 PARAMETER Experiment Name: At_Drought_cDNA_P Parameter: Tissue Value: Aerial
  misc_feature: MA Experiment 108572 PARAMETER Experiment Name: At_Drought_cDNA_P Parameter: Treatment Value: Drought vs. No Drought
  misc_feature: MA Experiment ID: 108573 Result: Up-regulated in Transcription
  misc_feature: MA Experiment 108573 PARAMETER Experiment Name: At_Drought_cDNA_P Parameter: Timepoint (hr) Value: 6
  misc_feature: MA Experiment 108573 PARAMETER Experiment Name: At_Drought_cDNA_P Parameter: Tissue Value: Aerial
  misc_feature: MA Experiment 108573 PARAMETER Experiment Name: At_Drought_cDNA_P Parameter: Treatment Value: Drought vs. No Drought
  misc_feature: MA Experiment ID: 108574 Result: Down-regulated in Transcription
  misc_feature: MA Experiment 108574 PARAMETER Experiment Name: At_Wounding__cDNA_P Parameter: Timepoint (hr) Value: 1
  misc_feature: MA Experiment 108574 PARAMETER Experiment Name: At_Wounding__cDNA_P Parameter: Tissue Value: Aerial
  misc_feature: MA Experiment 108574 PARAMETER Experiment Name: At_Wounding__cDNA_P Parameter: Treatment Value: Wounding vs. No Wounding
  misc_feature: MA Experiment ID: 108577 Result: Down-regulated in Transcription
  misc_feature: MA Experiment 108577 PARAMETER Experiment Name: At_42deg_Heat_cDNA_P Parameter: Temperature (deg C) Value: 42 vs. 22
  misc_feature: MA Experiment 108577 PARAMETER Experiment Name: At_42deg_Heat_cDNA_P Parameter: Timepoint (hr) Value: 6
  misc_feature: MA Experiment 108577 PARAMETER Experiment Name: At_42deg_Heat_cDNA_P Parameter: Tissue Value: Aerial
  misc_feature: MA Experiment ID: 108594 Result: Up-regulated in Transcription
  misc_feature: MA Experiment 108594 PARAMETER Experiment Name: At_Ler-rhl_Root_cDNA_P Parameter: Plant Line Value: null
  misc_feature: MA Experiment ID: 20000069 Result: Up-regulated in Transcription
  misc_feature: MA Experiment 20000069 PARAMETER Experiment Name: At_100uM_ABA_Mutants_cDNA_P Parameter: Plant Line Value: CS23
  misc_feature: MA Experiment 20000069 PARAMETER Experiment Name: At_100uM_ABA_Mutants_cDNA_P Parameter: Timepoint (hr) Value: 6
  misc_feature: MA Experiment 20000069 PARAMETER Experiment Name: At_100uM_ABA_Mutants_cDNA_P Parameter: Tissue Value: Aerial
  misc_feature: MA Experiment 20000069 PARAMETER Experiment Name: At_100uM_ABA_Mutants_cDNA_P Parameter: Treatment Value: 100uM ABA vs. No Treatment
  misc_feature: MA Experiment ID: 20000071 Result: Up-regulated in Transcription
  misc_feature: MA Experiment 20000071 PARAMETER Experiment Name: At_100uM_ABA_Mutants_cDNA_P Parameter: Plant Line Value: CS8104
  misc_feature: MA Experiment 20000071 PARAMETER Experiment Name: At_100uM_ABA_Mutants_cDNA_P Parameter: Timepoint (hr) Value: 6
  misc_feature: MA Experiment 20000071 PARAMETER Experiment Name: At_100uM_ABA_Mutants_cDNA_P Parameter: Tissue Value: Aerial
  misc_feature: MA Experiment 20000071 PARAMETER Experiment Name: At_100uM_ABA_Mutants_cDNA_P Parameter: Treatment Value: 100uM ABA vs. No Treatment
  misc_feature: MA Experiment ID: 20000072 Result: Up-regulated in Transcription
  misc_feature: MA Experiment 20000072 PARAMETER Experiment Name: At_100uM_ABA_Mutants_cDNA_P Parameter: Plant Line Value: CS8105
  misc_feature: MA Experiment 20000072 PARAMETER Experiment Name: At_100uM_ABA_Mutants_cDNA_P Parameter: Timepoint (hr) Value: 6
  misc_feature: MA Experiment 20000072 PARAMETER Experiment Name: At_100uM_ABA_Mutants_cDNA_P Parameter: Tissue Value: Aerial
  misc_feature: MA Experiment 20000072 PARAMETER Experiment Name: At_100uM_ABA_Mutants_cDNA_P Parameter: Treatment Value: 100uM ABA vs. No Treatment
  misc_feature: MA Experiment ID: 20000089 Result: Up-regulated in Transcription
  misc_feature: MA Experiment ID: 20000090 Result: Down-regulated in Transcription
  misc_feature: MA Experiment ID: 20000171 Result: Down-regulated in Transcription
  misc_feature: MA Experiment 20000171 PARAMETER Experiment Name: At_42deg_Heat_P Parameter: Age (day) Value: 14
  misc_feature: MA Experiment 20000171 PARAMETER Experiment Name: At_42deg_Heat_P Parameter: Organism Value: A. thaliana
  misc_feature: MA Experiment 20000171 PARAMETER Experiment Name: At_42deg_Heat_P Parameter: Plant Line Value: WS
  misc_feature: MA Experiment 20000171 PARAMETER Experiment Name: At_42deg_Heat_P Parameter: Temperature (deg C) Value: 42 vs. 22
  misc_feature: MA Experiment 20000171 PARAMETER Experiment Name: At_42deg_Heat_P Parameter: Timepoint (hr) Value: 1
  misc_feature: MA Experiment 20000171 PARAMETER Experiment Name: At_42deg_Heat_P Parameter: Tissue Value: Aerial
  misc_feature: MA Experiment ID: 20000179 Result: Down-regulated in Transcription
  misc_feature: MA Experiment 20000179 PARAMETER Experiment Name: At_Germinating_Seeds_P Parameter: Age (hr) Value: 6 vs. 0
  misc_feature: MA Experiment 20000179 PARAMETER Experiment Name: At_Germinating_Seeds_P Parameter: Tissue Value: Germinating Seeds
  misc_feature: MA Experiment ID: 20000184 Result: Down-regulated in Transcription
  misc_feature: MA Experiment 20000184 PARAMETER Experiment Name: At_Shoots__P Parameter: Age (day) Value: 7
  misc_feature: MA Experiment 20000184 PARAMETER Experiment Name: At_Shoots__P Parameter: Tissue Value: Shoots vs. Whole Plant
  misc_feature: MA Experiment ID: 20000185 Result: Down-regulated in Transcription
  misc_feature: MA Experiment 20000185 PARAMETER Experiment Name: At_Roots__P Parameter: Age (day) Value: 7 vs. 21
  misc_feature: MA Experiment 20000185 PARAMETER Experiment Name: At_Roots__P Parameter: Organism Value: A. thaliana
  misc_feature: MA Experiment 20000185 PARAMETER Experiment Name: At_Roots__P Parameter: Tissue Value: Roots vs. Whole Plant
  misc_feature: MA Experiment ID: 20000224 Result: Down-regulated in Transcription
  misc_feature: MA Experiment ID: 20000227 Result: Down-regulated in Transcription
  misc_feature: MA Experiment 20000227 PARAMETER Experiment Name: At_Root-Tips-vs-Tops_P Parameter: Tissue Value: Root Tips vs. Root Tops
  misc_feature: MA Experiment ID: 20000234 Result: Down-regulated in Transcription
  misc_feature: MA Experiment 20000234 PARAMETER Experiment Name: At_Siliques_P Parameter: Age (day) Value: 21
  misc_feature: MA Experiment 20000234 PARAMETER Experiment Name: At_Siliques_P Parameter: Organism Value: A. thaliana
  misc_feature: MA Experiment 20000234 PARAMETER Experiment Name: At_Siliques_P Parameter: Plant Line Value: WS
  misc_feature: MA Experiment 20000234 PARAMETER Experiment Name: At_Siliques_P Parameter: Tissue Value: Less Than 5mm Siliques vs. Whole Plant
  misc_feature: MA Experiment ID: 20000235 Result: Down-regulated in Transcription
  misc_feature: MA Experiment 20000235 PARAMETER Experiment Name: At_Siliques_P Parameter: Age (day) Value: 21
  misc_feature: MA Experiment 20000235 PARAMETER Experiment Name: At_Siliques_P Parameter: Organism Value: A. thaliana
  misc_feature: MA Experiment 20000235 PARAMETER Experiment Name: At_Siliques_P Parameter: Plant Line Value: WS
  misc_feature: MA Experiment 20000235 PARAMETER Experiment Name: At_Siliques_P Parameter: Tissue Value: 5-10mm Siliques vs. Whole Plant
  misc_feature: MA Experiment ID: 20000264 Result: Down-regulated in Transcription
  misc_feature: MA Experiment 20000264 PARAMETER Experiment Name: At_Open_Flower_P Parameter: Age (day) Value: 21
  misc_feature: MA Experiment 20000264 PARAMETER Experiment Name: At_Open_Flower_P Parameter: Plant Line Value: WS
  misc_feature: MA Experiment 20000264 PARAMETER Experiment Name: At_Open_Flower_P Parameter: Tissue Value: Open Flower vs. Whole Plant
  misc_feature: MA Experiment ID: 20000265 Result: Down-regulated in Transcription
  misc_feature: MA Experiment 20000265 PARAMETER Experiment Name: At_Open_Flower_P Parameter: Age (day) Value: 21
  misc_feature: MA Experiment 20000265 PARAMETER Experiment Name: At_Open_Flower_P Parameter: Plant Line Value: WS
  misc_feature: MA Experiment 20000265 PARAMETER Experiment Name: At_Open_Flower_P Parameter: Tissue Value: Closed Flower vs. Whole Plant
  misc_feature: MA Experiment ID: 20000267 Result: Up-regulated in Transcription
  misc_feature: MA Experiment 20000267 PARAMETER Experiment Name: At_Drought_P Parameter: Age (day) Value: 7
  misc_feature: MA Experiment 20000267 PARAMETER Experiment Name: At_Drought_P Parameter: Organism Value: A. thaliana
  misc_feature: MA Experiment 20000267 PARAMETER Experiment Name: At_Drought_P Parameter: Plant Line Value: WS
  misc_feature: MA Experiment 20000267 PARAMETER Experiment Name: At_Drought_P Parameter: Timepoint (hr) Value: 6
  misc_feature: MA Experiment 20000267 PARAMETER Experiment Name: At_Drought_P Parameter: Tissue Value: Whole Plant
  misc_feature: MA Experiment 20000267 PARAMETER Experiment Name: At_Drought_P Parameter: Treatment Value: Drought vs. No Drought
  misc_feature: MA Experiment ID: 20000286 Result: Down-regulated in Transcription
  misc_feature: MA Experiment 20000286 PARAMETER Experiment Name: At_Open_Flower_P Parameter: Age (day) Value: 21
  misc_feature: MA Experiment 20000286 PARAMETER Experiment Name: At_Open_Flower_P Parameter: Plant Line Value: WS
  misc_feature: MA Experiment 20000286 PARAMETER Experiment Name: At_Open_Flower_P Parameter: Tissue Value: Half Open vs. Whole Plant
  misc_feature: MA Experiment ID: 20000308 Result: Down-regulated in Transcription
  misc_feature: MA Experiment 20000308 PARAMETER Experiment Name: At_100mM_NaCl__P Parameter: Age (day) Value: 17
  misc_feature: MA Experiment 20000308 PARAMETER Experiment Name: At_100mM_NaCl__P Parameter: Organism Value: A. thaliana
  misc_feature: MA Experiment 20000308 PARAMETER Experiment Name: At_100mM_NaCl__P Parameter: Plant Line Value: WS
  misc_feature: MA Experiment 20000308 PARAMETER Experiment Name: At_100mM_NaCl__P Parameter: Timepoint (hr) Value: 72
  misc_feature: MA Experiment 20000308 PARAMETER Experiment Name: At_100mM_NaCl__P Parameter: Tissue Value: Whole Plant
  misc_feature: MA Experiment 20000308 PARAMETER Experiment Name: At_100mM_NaCl__P Parameter: Treatment Value: 100mM NaCl vs. No Treatment
  misc_feature: MA Experiment ID: 20000436 Result: Up-regulated in Transcription
  misc_feature: MA Experiment 20000436 PARAMETER Experiment Name: At_Drought_P Parameter: Age (day) Value: 7
  misc_feature: MA Experiment 20000436 PARAMETER Experiment Name: At_Drought_P Parameter: Organism Value: A. thaliana
  misc_feature: MA Experiment 20000436 PARAMETER Experiment Name: At_Drought_P Parameter: Plant Line Value: WS
  misc_feature: MA Experiment 20000436 PARAMETER Experiment Name: At_Drought_P Parameter: Timepoint (hr) Value: 12
  misc_feature: MA Experiment 20000436 PARAMETER Experiment Name: At_Drought_P Parameter: Tissue Value: Whole Plant
  misc_feature: MA Experiment 20000436 PARAMETER Experiment Name: At_Drought_P Parameter: Treatment Value: Drought vs. No Drought
  misc_feature: MA Experiment ID: 20000437 Result: Up-regulated in Transcription
  misc_feature: MA Experiment 20000437 PARAMETER Experiment Name: At_Drought_P Parameter: Age (day) Value: 8
  misc_feature: MA Experiment 20000437 PARAMETER Experiment Name: At_Drought_P Parameter: Organism Value: A. thaliana
  misc_feature: MA Experiment 20000437 PARAMETER Experiment Name: At_Drought_P Parameter: Plant Line Value: WS
  misc_feature: MA Experiment 20000437 PARAMETER Experiment Name: At_Drought_P Parameter: Timepoint (hr) Value: 24
  misc_feature: MA Experiment 20000437 PARAMETER Experiment Name: At_Drought_P Parameter: Tissue Value: Whole Plant
  misc_feature: MA Experiment 20000437 PARAMETER Experiment Name: At_Drought_P Parameter: Treatment Value: Drought vs. No Drought
  misc_feature: MA Experiment ID: 20000438 Result: Down-regulated in Transcription
  misc_feature: MA Experiment 20000438 PARAMETER Experiment Name: At_Shoots__P Parameter: Age (day) Value: 14
  misc_feature: MA Experiment 20000438 PARAMETER Experiment Name: At_Shoots__P Parameter: Tissue Value: Shoots vs. Whole Plant
  misc_feature: MA Experiment ID: 20000439 Result: Down-regulated in Transcription
  misc_feature: MA Experiment 20000439 PARAMETER Experiment Name: At_Roots__P Parameter: Age (day) Value: 14 vs. 21
  misc_feature: MA Experiment 20000439 PARAMETER Experiment Name: At_Roots__P Parameter: Organism Value: A. thaliana
  misc_feature: MA Experiment 20000439 PARAMETER Experiment Name: At_Roots__P Parameter: Tissue Value: Roots vs. Whole Plant
  misc_feature: MA Experiment ID: 20000441 Result: Up-regulated in Transcription
  misc_feature: MA Experiment 20000441 PARAMETER Experiment Name: At_1uM_BR-BRZ__P Parameter: Tissue Value: Shoot Apices
  misc_feature: MA Experiment 20000441 PARAMETER Experiment Name: At_1uM_BR-BRZ__P Parameter: Treatment Value: 1uM BR vs. No Treatment
  misc_feature: MA Experiment ID: 20000451 Result: Down-regulated in Transcription
  misc_feature: MA Experiment 20000451 PARAMETER Experiment Name: At_CS6879_Shoots-Roots_P Parameter: Age (day) Value: 14
  misc_feature: MA Experiment 20000451 PARAMETER Experiment Name: At_CS6879_Shoots-Roots_P Parameter: Organism Value: A. thaliana
  misc_feature: MA Experiment 20000451 PARAMETER Experiment Name: At_CS6879_Shoots-Roots_P Parameter: Plant Line Value: CS6879 vs. WS
  misc_feature: MA Experiment 20000451 PARAMETER Experiment Name: At_CS6879_Shoots-Roots_P Parameter: Tissue Value: Roots
  misc_feature: MA Experiment ID: 20000575 Result: Down-regulated in Transcription
  misc_feature: MA Experiment 20000575 PARAMETER Experiment Name: At_100uM_ABA_Mutants__P Parameter: Organism Value: A. thaliana
  misc_feature: MA Experiment 20000575 PARAMETER Experiment Name: At_100uM_ABA_Mutants__P Parameter: Plant Line Value: CS22
  misc_feature: MA Experiment 20000575 PARAMETER Experiment Name: At_100uM_ABA_Mutants__P Parameter: Timepoint (hr) Value: 6
  misc_feature: MA Experiment 20000575 PARAMETER Experiment Name: At_100uM_ABA_Mutants__P Parameter: Tissue Value: Whole Plant
  misc_feature: MA Experiment 20000575 PARAMETER Experiment Name: At_100uM_ABA_Mutants__P Parameter: Treatment Value: 1uM ABA vs. No Treatment
  misc_feature: MA Experiment ID: 20000794 Result: Down-regulated in Transcription
  misc_feature: MA Experiment 20000794 PARAMETER Experiment Name: At_Petals_P Parameter: Age (day) Value: 23-25 days
  misc_feature: MA Experiment 20000794 PARAMETER Experiment Name: At_Petals_P Parameter: Plant Line Value: WS
  misc_feature: MA Experiment 20000794 PARAMETER Experiment Name: At_Petals_P Parameter: Tissue Value: Petals vs. Whole plant
  misc_feature: MA Experiment ID: 20001247 Result: Up-regulated in Transcription
  misc_feature: MA Experiment 20001247 PARAMETER Experiment Name: At_Far-red-induction_P Parameter: Age (day) Value: 7
  misc_feature: MA Experiment 20001247 PARAMETER Experiment Name: At_Far-red-induction_P Parameter: Light Value: Far-red vs. White
  misc_feature: MA Experiment 20001247 PARAMETER Experiment Name: At_Far-red-induction_P Parameter: Organism Value: A. thaliana
  misc_feature: MA Experiment 20001247 PARAMETER Experiment Name: At_Far-red-induction_P Parameter: Plant Line Value: Columbia
  misc_feature: MA Experiment 20001247 PARAMETER Experiment Name: At_Far-red-induction_P Parameter: Timepoint (hr) Value: 1
  misc_feature: MA Experiment 20001247 PARAMETER Experiment Name: At_Far-red-induction_P Parameter: Tissue Value: Whole Plant
  misc_feature: MA Experiment ID: 20001248 Result: Up-regulated in Transcription
  misc_feature: MA Experiment 20001248 PARAMETER Experiment Name: At_Far-red-induction_P Parameter: Age (day) Value: 7
  misc_feature: MA Experiment 20001248 PARAMETER Experiment Name: At_Far-red-induction_P Parameter: Light Value: Far-red vs. White
  misc_feature: MA Experiment 20001248 PARAMETER Experiment Name: At_Far-red-induction_P Parameter: Organism Value: A. thaliana
  misc_feature: MA Experiment 20001248 PARAMETER Experiment Name: At_Far-red-induction_P Parameter: Plant Line Value: Columbia
  misc_feature: MA Experiment 20001248 PARAMETER Experiment Name: At_Far-red-induction_P Parameter: Timepoint (hr) Value: 4
  misc_feature: MA Experiment 20001248 PARAMETER Experiment Name: At_Far-red-induction_P Parameter: Tissue Value: Whole Plant
  misc_feature: MA Experiment ID: 20001450 Result: Up-regulated in Transcription
  misc_feature: MA Experiment 20001450 PARAMETER Experiment Name: At_Far-red-induction_P Parameter: Age (day) Value: 7
  misc_feature: MA Experiment 20001450 PARAMETER Experiment Name: At_Far-red-induction_P Parameter: Light Value: Far-red vs. White
  misc_feature: MA Experiment 20001450 PARAMETER Experiment Name: At_Far-red-induction_P Parameter: Organism Value: A. thaliana
  misc_feature: MA Experiment 20001450 PARAMETER Experiment Name: At_Far-red-induction_P Parameter: Plant Line Value: Columbia
  misc_feature: MA Experiment 20001450 PARAMETER Experiment Name: At_Far-red-induction_P Parameter: Timepoint (hr) Value: 8
  misc_feature: MA Experiment 20001450 PARAMETER Experiment Name: At_Far-red-induction_P Parameter: Tissue Value: Whole Plant
  misc_feature: MA Experiment ID: 20001451 Result: Up-regulated in Transcription
  misc_feature: MA Experiment 20001451 PARAMETER Experiment Name: At_Far-red-induction_P Parameter: Age (day) Value: 7
  misc_feature: MA Experiment 20001451 PARAMETER Experiment Name: At_Far-red-induction_P Parameter: Light Value: Far-red vs. White
  misc_feature: MA Experiment 20001451 PARAMETER Experiment Name: At_Far-red-induction_P Parameter: Organism Value: A. thaliana
  misc_feature: MA Experiment 20001451 PARAMETER Experiment Name: At_Far-red-induction_P Parameter: Plant Line Value: Columbia
  misc_feature: MA Experiment 20001451 PARAMETER Experiment Name: At_Far-red-induction_P Parameter: Timepoint (hr) Value: 24
  misc_feature: MA Experiment 20001451 PARAMETER Experiment Name: At_Far-red-induction_P Parameter: Tissue Value: Whole Plant
  misc_feature: MA Experiment ID: 20001555 Result: Down-regulated in Transcription
  misc_feature: MA Experiment 20001555 PARAMETER Experiment Name: At_Drought_Soil_Dry_P Parameter: Age (day) Value: 24
  misc_feature: MA Experiment 20001555 PARAMETER Experiment Name: At_Drought_Soil_Dry_P Parameter: Organism Value: A. thaliana
  misc_feature: MA Experiment 20001555 PARAMETER Experiment Name: At_Drought_Soil_Dry_P Parameter: Plant Line Value: WS
  misc_feature: MA Experiment 20001555 PARAMETER Experiment Name: At_Drought_Soil_Dry_P Parameter: Post Timepoint (hr) Value: None
  misc_feature: MA Experiment 20001555 PARAMETER Experiment Name: At_Drought_Soil_Dry_P Parameter: Post-Treatment Value: None
  misc_feature: MA Experiment 20001555 PARAMETER Experiment Name: At_Drought_Soil_Dry_P Parameter: Timepoint (day) Value: 10
  misc_feature: MA Experiment 20001555 PARAMETER Experiment Name: At_Drought_Soil_Dry_P Parameter: Treatment Value: Drought vs. No Drought
  misc_feature: MA Experiment ID: 20001556 Result: Down-regulated in Transcription
  misc_feature: MA Experiment 20001556 PARAMETER Experiment Name: At_Drought_Soil_Dry_P Parameter: Age (day) Value: 26
  misc_feature: MA Experiment 20001556 PARAMETER Experiment Name: At_Drought_Soil_Dry_P Parameter: Organism Value: A. thaliana
  misc_feature: MA Experiment 20001556 PARAMETER Experiment Name: At_Drought_Soil_Dry_P Parameter: Plant Line Value: WS
  misc_feature: MA Experiment 20001556 PARAMETER Experiment Name: At_Drought_Soil_Dry_P Parameter: Post Timepoint (hr) Value: None
  misc_feature: MA Experiment 20001556 PARAMETER Experiment Name: At_Drought_Soil_Dry_P Parameter: Post-Treatment Value: None
  misc_feature: MA Experiment 20001556 PARAMETER Experiment Name: At_Drought_Soil_Dry_P Parameter: Timepoint (day) Value: 12
  misc_feature: MA Experiment 20001556 PARAMETER Experiment Name: At_Drought_Soil_Dry_P Parameter: Treatment Value: Drought vs. No Drought
  misc_feature: MA Experiment ID: 20001557 Result: Down-regulated in Transcription
  misc_feature: MA Experiment 20001557 PARAMETER Experiment Name: At_Drought_Soil_Dry_P Parameter: Age (day) Value: 27
  misc_feature: MA Experiment 20001557 PARAMETER Experiment Name: At_Drought_Soil_Dry_P Parameter: Organism Value: A. thaliana
  misc_feature: MA Experiment 20001557 PARAMETER Experiment Name: At_Drought_Soil_Dry_P Parameter: Plant Line Value: WS
  misc_feature: MA Experiment 20001557 PARAMETER Experiment Name: At_Drought_Soil_Dry_P Parameter: Post Timepoint (hr) Value: 3
  misc_feature: MA Experiment 20001557 PARAMETER Experiment Name: At_Drought_Soil_Dry_P Parameter: Post-Treatment Value: Re-Water vs. No Drought
  misc_feature: MA Experiment 20001557 PARAMETER Experiment Name: At_Drought_Soil_Dry_P Parameter: Timepoint (day) Value: 13
  misc_feature: MA Experiment 20001557 PARAMETER Experiment Name: At_Drought_Soil_Dry_P Parameter: Treatment Value: Drought vs. No Drought
  misc_feature: MA Experiment ID: 20001558 Result: Down-regulated in Transcription
  misc_feature: MA Experiment 20001558 PARAMETER Experiment Name: At_Drought_Soil_Dry_P Parameter: Age (day) Value: 27
  misc_feature: MA Experiment 20001558 PARAMETER Experiment Name: At_Drought_Soil_Dry_P Parameter: Organism Value: A. thaliana
  misc_feature: MA Experiment 20001558 PARAMETER Experiment Name: At_Drought_Soil_Dry_P Parameter: Plant Line Value: WS
  misc_feature: MA Experiment 20001558 PARAMETER Experiment Name: At_Drought_Soil_Dry_P Parameter: Post Timepoint (hr) Value: 6
  misc_feature: MA Experiment 20001558 PARAMETER Experiment Name: At_Drought_Soil_Dry_P Parameter: Post-Treatment Value: Re-Water vs. No Drought
  misc_feature: MA Experiment 20001558 PARAMETER Experiment Name: At_Drought_Soil_Dry_P Parameter: Timepoint (day) Value: 13
  misc_feature: MA Experiment 20001558 PARAMETER Experiment Name: At_Drought_Soil_Dry_P Parameter: Treatment Value: Drought vs. No Drought
  misc_feature: MA Experiment ID: 20001559 Result: Down-regulated in Transcription
  misc_feature: MA Experiment 20001559 PARAMETER Experiment Name: At_Drought_Soil_Dry_P Parameter: Age (day) Value: 28
  misc_feature: MA Experiment 20001559 PARAMETER Experiment Name: At_Drought_Soil_Dry_P Parameter: Organism Value: A. thaliana
  misc_feature: MA Experiment 20001559 PARAMETER Experiment Name: At_Drought_Soil_Dry_P Parameter: Plant Line Value: WS
  misc_feature: MA Experiment 20001559 PARAMETER Experiment Name: At_Drought_Soil_Dry_P Parameter: Post Timepoint (hr) Value: 29
  misc_feature: MA Experiment 20001559 PARAMETER Experiment Name: At_Drought_Soil_Dry_P Parameter: Post-Treatment Value: Re-Water vs. No Drought
  misc_feature: MA Experiment 20001559 PARAMETER Experiment Name: At_Drought_Soil_Dry_P Parameter: Timepoint (day) Value: 14
  misc_feature: MA Experiment 20001559 PARAMETER Experiment Name: At_Drought_Soil_Dry_P Parameter: Treatment Value: Drought vs. No Drought
  misc_feature: MA Experiment ID: 20001560 Result: Down-regulated in Transcription
  misc_feature: MA Experiment 20001560 PARAMETER Experiment Name: At_Drought_Soil_Dry_P Parameter: Age (day) Value: 28
  misc_feature: MA Experiment 20001560 PARAMETER Experiment Name: At_Drought_Soil_Dry_P Parameter: Organism Value: A. thaliana
  misc_feature: MA Experiment 20001560 PARAMETER Experiment Name: At_Drought_Soil_Dry_P Parameter: Plant Line Value: WS
  misc_feature: MA Experiment 20001560 PARAMETER Experiment Name: At_Drought_Soil_Dry_P Parameter: Post Timepoint (hr) Value: None
  misc_feature: MA Experiment 20001560 PARAMETER Experiment Name: At_Drought_Soil_Dry_P Parameter: Post-Treatment Value: None
  misc_feature: MA Experiment 20001560 PARAMETER Experiment Name: At_Drought_Soil_Dry_P Parameter: Timepoint (day) Value: 14
  misc_feature: MA Experiment 20001560 PARAMETER Experiment Name: At_Drought_Soil_Dry_P Parameter: Treatment Value: Drought vs. No Drought
  misc_feature: MA Experiment ID: 20001904 Result: Down-regulated in Transcription
  misc_feature: MA Experiment 20001904 PARAMETER Experiment Name: At_Drought_Reproduction_P Parameter: Age (day) Value: 37
  misc_feature: MA Experiment 20001904 PARAMETER Experiment Name: At_Drought_Reproduction_P Parameter: Organism Value: A. thaliana
  misc_feature: MA Experiment 20001904 PARAMETER Experiment Name: At_Drought_Reproduction_P Parameter: Plant Line Value: WS
  misc_feature: MA Experiment 20001904 PARAMETER Experiment Name: At_Drought_Reproduction_P Parameter: Timepoint (day) Value: 7
  misc_feature: MA Experiment 20001904 PARAMETER Experiment Name: At_Drought_Reproduction_P Parameter: Tissue Value: Rosettes
  misc_feature: MA Experiment 20001904 PARAMETER Experiment Name: At_Drought_Reproduction_P Parameter: Treatment Value: Drought vs. No Drought
  misc_feature: MA Experiment ID: 20001911 Result: Up-regulated in Transcription
  misc_feature: MA Experiment 20001911 PARAMETER Experiment Name: At_Drought_Reproduction_P Parameter: Age (day) Value: 40
  misc_feature: MA Experiment 20001911 PARAMETER Experiment Name: At_Drought_Reproduction_P Parameter: Organism Value: A. thaliana
  misc_feature: MA Experiment 20001911 PARAMETER Experiment Name: At_Drought_Reproduction_P Parameter: Plant Line Value: WS
  misc_feature: MA Experiment 20001911 PARAMETER Experiment Name: At_Drought_Reproduction_P Parameter: Timepoint (day) Value: 10
  misc_feature: MA Experiment 20001911 PARAMETER Experiment Name: At_Drought_Reproduction_P Parameter: Tissue Value: Flowers
  misc_feature: MA Experiment 20001911 PARAMETER Experiment Name: At_Drought_Reproduction_P Parameter: Treatment Value: Drought vs. No Drought
atgttcaaaaccgtttaacaataacaacaacaaaaagcttccttttttgttttttgagttttcgtcgatcgattggtttaaatcctgtcgtatcaatttgttctcgattctccgcgaccatgcaaatttagggtcttcgttttgtttgatgggcgcgaatatctcgggaggttcaccggagtttgaccggaacgatgacgtttactcgaggaaactcagattggtggatttacctgagaattgtgtagcgttgattatgacacggcttgatccacctgagatttgccggcttgctcgtctcaacaggatgttccgtcgcgcttcctcagctgatttcatttgggaatcaaagttgcctgcgaattatcgtgttattgcacacaaggtgttcgatgaaattactctgacgaaattaataaagaaagatctttatgcaaagcttagccagcctaatctcttcgacgatggcacaaaggaattgtggatagataagaacacgggtcgtctttgtttatctatttcttcaaaggcactaaggattactggaattgatgatcggagatactggagtcatatcccaactgatgaatccaggttccagtcagctgcttatgttcaacagatatggtggtttgaagtaggaggagagtttgagatccagtttccatctggaacatatagtctcttcttccgtatccagctcggtaaaacatcaaagaggcttggaaggaggatctgcaactctgaacacattcatggatgggacataaaacctgtaaggttccagctcgccacttcggacaaccaacaagctgtatcattgtgttatctgaacaacaaccctgggagctggagtcactatcacgttggagatttcaaagtgacaaatccagatgtatcaacaggaatcaaattctccatgactcaaatcgattgcactcacacgaaaggtgggctatgcatagactctgttcttatattacctaaagaatgtgcaaaagaagtcattggatcacaatagttttgtagatatagagtgagattgtttgtaaagggtgagagattatttttcagtgaaacattcactatactgtttttttttcttgatctgggctgcattctcaagatgaatctcagatctggaactgtgtacacatggttgggttgtctctagttttgtctgtagttacaaggtggtcgtgattgtaaatactacttctccattcagagattattacacttgcttgctt

SEQ ID NO: 24205 - protein, 339 aa, Arabidopsis thaliana
  peptide (1)..(339): Ceres Seq. ID no. 12385313
  misc_feature (151)..(331): Homolog of NCBI NO: 27754673 NR Description: unknown protein [Arabidopsis thaliana]
  misc_feature (74)..(334): Homolog of NCBI NO: 15231726 NR Description: putative protein; protein id: At3g53000.1
  misc_feature (54)..(330): Homolog of NCBI NO: 15242282 NR Description: putative protein
  misc_feature (77)..(329): Homolog of NCBI NO: 38567911 NR Description: OSJNBa0088I22.7 [Oryza sativa (japonica
  misc_feature (50)..(339): Homolog of NCBI NO: 37536186 NR Description: unknown protein [Oryza sativa (japonica
  misc_feature (43)..(331): Homolog of NCBI NO: 15221677 NR Description: unknown protein; protein id: At1g63090.1
  misc_feature (74)..(335): Homolog of NCBI NO: 15222051 NR Description: hypothetical protein; protein id: At1g12710.1
  misc_feature (71)..(339): Homolog of NCBI NO: 23397334 NR Description: unknown protein [Arabidopsis thaliana]
  misc_feature (50)..(339): Homolog of NCBI NO: 30695337 NR Description: F-box protein (lectin-related) [Arabidopsis
  misc_feature (52)..(237): Homolog of NCBI NO: 15226908 NR Description: putative phloem-specific lectin; protein id:
CSKPFNNNNNKKLPFLFFEFSSIDWFKSCRINLFSILRDHANLGSSFCLMGANISGGSPEFDRNDDVYSRKLRLVDLPENCVALIMTRLDPPEICRLARLNRMFRRASSADFIWESKLPANYRVIAHKVFDEITLTKLIKKDLYAKLSQPNLFDDGTKELWIDKNTGRLCLSISSKALRITGIDDRRYWSHIPTDESRFQSAAYVQQIWWFEVGGEFEIQFPSGTYSLFFRIQLGKTSKRLGRRICNSEHIHGWDIKPVRFQLATSDNQQAVSLCYLNNNPGSWSHYHVGDFKVTNPDVSTGIKFSMTQIDCTHTKGGLCIDSVLILPKECAKEVIGSQ

SEQ ID NO: 24206 - protein, 290 aa, Arabidopsis thaliana
  peptide (1)..(290): Ceres Seq. ID no. 12385314
  misc_feature (3)..(188): Homolog of NCBI NO: 15226908 NR Description: putative phloem-specific lectin; protein id:
  misc_feature (102)..(282): Homolog of NCBI NO: 27754673 NR Description: unknown protein [Arabidopsis thaliana]
  misc_feature (25)..(285): Homolog of NCBI NO: 15231726 NR Description: putative protein; protein id: At3g53000.1
  misc_feature (5)..(281): Homolog of NCBI NO: 15242282 NR Description: putative protein
  misc_feature (28)..(280): Homolog of NCBI NO: 38567911 NR Description: OSJNBa0088I22.7 [Oryza sativa (japonica
  misc_feature (1)..(290): Homolog of NCBI NO: 37536186 NR Description: unknown protein [Oryza sativa (japonica
  misc_feature (1)..(282): Homolog of NCBI NO: 15221677 NR Description: unknown protein; protein id: At1g63090.1
  misc_feature (25)..(286): Homolog of NCBI NO: 15222051 NR Description: hypothetical protein; protein id: At1g12710.1
  misc_feature (22)..(290): Homolog of NCBI NO: 23397334 NR Description: unknown protein [Arabidopsis thaliana]
  misc_feature (1)..(290): Homolog of NCBI NO: 30695337 NR Description: F-box protein (lectin-related) [Arabidopsis
MGANISGGSPEFDRNDDVYSRKLRLVDLPENCVALIMTRLDPPEICRLARLNRMFRRASSADFIWESKLPANYRVIAHKVFDEITLTKLIKKDLYAKLSQPNLFDDGTKELWIDKNTGRLCLSISSKALRITGIDDRRYWSHIPTDESRFQSAAYVQQIWWFEVGGEFEIQFPSGTYSLFFRIQLGKTSKRLGRRICNSEHIHGWDIKPVRFQLATSDNQQAVSLCYLNNNPGSWSHYHVGDFKVTNPDVSTGIKFSMTQIDCTHTKGGLCIDSVLILPKECAKEVIGSQ

SEQ ID NO: 24207 - protein, 254 aa, Arabidopsis thaliana
  peptide (1)..(254): Ceres Seq. ID no. 12385315
  misc_feature (1)..(152): Homolog of NCBI NO: 15226908 NR Description: putative phloem-specific lectin; protein id:
  misc_feature (66)..(246): Homolog of NCBI NO: 27754673 NR Description: unknown protein [Arabidopsis thaliana]
  misc_feature (1)..(249): Homolog of NCBI NO: 15231726 NR Description: putative protein; protein id: At3g53000.1
  misc_feature (1)..(245): Homolog of NCBI NO: 15242282 NR Description: putative protein
  misc_feature (1)..(244): Homolog of NCBI NO: 38567911 NR Description: OSJNBa0088I22.7 [Oryza sativa (japonica
  misc_feature (1)..(254): Homolog of NCBI NO: 37536186 NR Description: unknown protein [Oryza sativa (japonica
  misc_feature (1)..(246): Homolog of NCBI NO: 15221677 NR Description: unknown protein; protein id: At1g63090.1
  misc_feature (1)..(250): Homolog of NCBI NO: 15222051 NR Description: hypothetical protein; protein id: At1g12710.1
  misc_feature (1)..(254): Homolog of NCBI NO: 23397334 NR Description: unknown protein [Arabidopsis thaliana]
  misc_feature (1)..(254): Homolog of NCBI NO: 30695337 NR Description: F-box protein (lectin-related) [Arabidopsis
MTRLDPPEICRLARLNRMFRRASSADFIWESKLPANYRVIAHKVFDEITLTKLIKKDLYAKLSQPNLFDDGTKELWIDKNTGRLCLSISSKALRITGIDDRRYWSHIPTDESRFQSAAYVQQIWWFEVGGEFEIQFPSGTYSLFFRIQLGKTSKRLGRRICNSEHIHGWDIKPVRFQLATSDNQQAVSLCYLNNNPGSWSHYHVGDFKVTNPDVSTGIKFSMTQIDCTHTKGGLCIDSVLILPKECAKEVIGSQ

SEQ ID NO: 24208 - DNA, 1394 bp, Arabidopsis thaliana
  misc_feature (1)..(1394): Ceres Seq. ID no. 12394405
  misc_feature: MA Experiment ID: 108434 Result: Up-regulated in Transcription
  misc_feature: MA Experiment 108434 PARAMETER Experiment Name: At_Root_Tips_cDNA_P Parameter: Tissue Value: Root Tips
  misc_feature: MA Experiment ID: 108595 Result: Up-regulated in Transcription
  misc_feature: MA Experiment 108595 PARAMETER Experiment Name: At_Ler-pi_Ovule_cDNA_P Parameter: Plant Line Value: null
  misc_feature: MA Experiment ID: 20000069 Result: Down-regulated in Transcription
  misc_feature: MA Experiment 20000069 PARAMETER Experiment Name: At_100uM_ABA_Mutants_cDNA_P Parameter: Plant Line Value: CS23
  misc_feature: MA Experiment 20000069 PARAMETER Experiment Name: At_100uM_ABA_Mutants_cDNA_P Parameter: Timepoint (hr) Value: 6
  misc_feature: MA Experiment 20000069 PARAMETER Experiment Name: At_100uM_ABA_Mutants_cDNA_P Parameter: Tissue Value: Aerial
  misc_feature: MA Experiment 20000069 PARAMETER Experiment Name: At_100uM_ABA_Mutants_cDNA_P Parameter: Treatment Value: 100uM ABA vs. No Treatment
  misc_feature: MA Experiment ID: 20000071 Result: Down-regulated in Transcription
  misc_feature: MA Experiment 20000071 PARAMETER Experiment Name: At_100uM_ABA_Mutants_cDNA_P Parameter: Plant Line Value: CS8104
  misc_feature: MA Experiment 20000071 PARAMETER Experiment Name: At_100uM_ABA_Mutants_cDNA_P Parameter: Timepoint (hr) Value: 6
  misc_feature: MA Experiment 20000071 PARAMETER Experiment Name: At_100uM_ABA_Mutants_cDNA_P Parameter: Tissue Value: Aerial
  misc_feature: MA Experiment 20000071 PARAMETER Experiment Name: At_100uM_ABA_Mutants_cDNA_P Parameter: Treatment Value: 100uM ABA vs. No Treatment
  misc_feature: MA Experiment ID: 20000072 Result: Down-regulated in Transcription
  misc_feature: MA Experiment 20000072 PARAMETER Experiment Name: At_100uM_ABA_Mutants_cDNA_P Parameter: Plant Line Value: CS8105
  misc_feature: MA Experiment 20000072 PARAMETER Experiment Name: At_100uM_ABA_Mutants_cDNA_P Parameter: Timepoint (hr) Value: 6
  misc_feature: MA Experiment 20000072 PARAMETER Experiment Name: At_100uM_ABA_Mutants_cDNA_P Parameter: Tissue Value: Aerial
  misc_feature: MA Experiment 20000072 PARAMETER Experiment Name: At_100uM_ABA_Mutants_cDNA_P Parameter: Treatment Value: 100uM ABA vs. No Treatment
  misc_feature: MA Experiment ID: 20000089 Result: Down-regulated in Transcription
  misc_feature: MA Experiment ID: 20000264 Result: Up-regulated in Transcription
  misc_feature: MA Experiment 20000264 PARAMETER Experiment Name: At_Open_Flower_P Parameter: Age (day) Value: 21
  misc_feature: MA Experiment 20000264 PARAMETER Experiment Name: At_Open_Flower_P Parameter: Plant Line Value: WS
  misc_feature: MA Experiment 20000264 PARAMETER Experiment Name: At_Open_Flower_P Parameter: Tissue Value: Open Flower vs. Whole Plant
  misc_feature: MA Experiment ID: 20000286 Result: Up-regulated in Transcription
  misc_feature: MA Experiment 20000286 PARAMETER Experiment Name: At_Open_Flower_P Parameter: Age (day) Value: 21
  misc_feature: MA Experiment 20000286 PARAMETER Experiment Name: At_Open_Flower_P Parameter: Plant Line Value: WS
  misc_feature: MA Experiment 20000286 PARAMETER Experiment Name: At_Open_Flower_P Parameter: Tissue Value: Half Open vs. Whole Plant
aaagatgaaaagtaatacccttcctctcttgccctttttgctggtctgggtgaaacatagaaaagtttctcttgctcaagttaatgataaaaggttgttgtaggatttgttgctctggctctggtggtaggtctatgaaatcaacccatatcgtgaatggactgcaacatggtatcttcgtcccagtgggattgggagcatttgatcatgtccaatccgtcaaggactgaagatgacagcaaacagctacctactgagtgggaaattgaaaaaggtgaaggaattgaatctatagttccacatttctcaggccttgagagagtcagtagtggctctgccaccagcttctggcacactgctgtatcgaaaagctcacagtcgacctctatcaactcatcatctcccgaagccaaacgatgcaagcttgcatcagaaagttcccctggagattcttgcagcaacatagactttgtccaggtgaaggctcccacagctctcgaggtatccgttgcctcagctgaatcagatctttgtttaaaactaggaaagcggacatactctgaagaatactggggtagaaacaataatgaaatttcagcggtttctatgaagttgttaactccatctgttgtcgctgggaaatccaaattgtgtggtcagagcatgccagtcccgcgttgccaaattgatggctgtgaactggatctctcatctgctaagggttatcatcgtaagcacaaagtctgcgaaaagcattcaaagtgcccaaaagttagcgtgagtggcctggaacgtcggttctgccaacagtgtagcaggttccatgctgtctctgaatttgatgagaagaaacgaagctgccgaaaacgtctttctcatcataatgcgaggcgtcgtaagccacaaggagtattttcaatgaatcccgagagggtgtatgatcgaagacagcatacaaatatgttgtggaatggggtgtcccttaacgcgagatctgaagaaatgtatgaatggggtaataacacttatgatacaaagcctagacaaacggaaaaaagctttactctgagcttccagagaggtaatggctctgaggaccagctggttgctagtagcagccgtatgttctctacatctcaaacctcaggtgggttcccagcaggaaagtccaagtttcaacttcatggcgaagatgtgggagaatactcaggagtcctccatgaatctcaagatatccaccgtgctctctctcttctgtcaacctcttcggatcccctggcccaaccacatgtgcagccattttctctactctgttcatatgatgttgtaccaaaatagatgagtaagtaatgtgtaatttgtaaacctgttactcagttggtggatacttttcc

SEQ ID NO: 24209 - protein, 393 aa, Arabidopsis thaliana
  peptide (1)..(393): Ceres Seq. ID no. 12394406
  misc_feature (174)..(252): Pfam Name: SBP domain Pfam Description: SBP domain
  misc_feature (174)..(252): Pfam Name: SBP domain Pfam Description: SBP domain
  misc_feature (127)..(373): Homolog of NCBI NO: 15227896 NR Description: putative squamosa-promoter binding protein
  misc_feature (117)..(381): Homolog of NCBI NO: 21536841 NR Description: unknown [Arabidopsis thaliana]
  misc_feature (117)..(381): Homolog of NCBI NO: 18423163 NR Description: putative protein
  misc_feature (1)..(291): Homolog of NCBI NO: 15239820 NR Description: squamosa promoter binding protein-like 2
  misc_feature (1)..(371): Homolog of NCBI NO: 25456646 NR Description: squamosa promoter binding protein 2
  misc_feature (127)..(373): Homolog of NCBI NO: 15227896 NR Description: putative squamosa-promoter binding protein
  misc_feature (117)..(381): Homolog of NCBI NO: 18423163 NR Description: putative protein
  misc_feature (1)..(371): Homolog of NCBI NO: 25456646 NR Description: squamosa promoter binding protein 2
  misc_feature (1)..(393): Homolog of NCBI NO: 18396302 NR Description: putative squamosa-promoter binding protein 2
  misc_feature (5)..(393): Homolog of NCBI NO: 25403307 NR Description: protein F17L21.14 [imported] - Arabidopsis
  misc_feature (1)..(378): Homolog of NCBI NO: 22329813 NR Description: putative squamosa-promoter binding protein 2
  misc_feature (1)..(378): Homolog of NCBI NO: 18650611 NR Description: At1g27370/F17L21_16 [Arabidopsis thaliana]
  misc_feature (5)..(378): Homolog of NCBI NO: 9802546 NR Description: F17L21.15 [Arabidopsis thaliana]
  misc_feature (1)..(291): Homolog of NCBI NO: 15239820 NR Description: squamosa promoter binding protein-like 2
  misc_feature (117)..(381): Homolog of NCBI NO: 21536841 NR Description: unknown [Arabidopsis thaliana]
  misc_feature (5)..(378): Homolog of NCBI NO: 9802546 NR Description: F17L21.15 [Arabidopsis thaliana]
  misc_feature (1)..(378): Homolog of NCBI NO: 18650611 NR Description: At1g27370/F17L21_16 [Arabidopsis thaliana]
  misc_feature (1)..(378): Homolog of NCBI NO: 22329813 NR Description: putative squamosa-promoter binding protein 2
  misc_feature (5)..(393): Homolog of NCBI NO: 25403307 NR Description: protein F17L21.14 [imported] - Arabidopsis
  misc_feature (1)..(393): Homolog of NCBI NO: 18396302 NR Description: putative squamosa-promoter binding protein 2
MDCNMVSSSQWDWEHLIMSNPSRTEDDSKQLPTEWEIEKGEGIESIVPHFSGLERVSSGSATSFWHTAVSKSSQSTSINSSSPEAKRCKLASESSPGDSCSNIDFVQVKAPTALEVSVASAESDLCLKLGKRTYSEEYWGRNNNEISAVSMKLLTPSVVAGKSKLCGQSMPVPRCQIDGCELDLSSAKGYHRKHKVCEKHSKCPKVSVSGLERRFCQQCSRFHAVSEFDEKKRSCRKRLSHHNARRRKPQGVFSMNPERVYDRRQHTNMLWNGVSLNARSEEMYEWGNNTYDTKPRQTEKSFTLSFQRGNGSEDQLVASSSRMFSTSQTSGGFPAGKSKFQLHGEDVGEYSGVLHESQDIHRALSLLSTSSDPLAQPHVQPFSLLCSYDVVPK

SEQ ID NO: 24210 - protein, 389 aa, Arabidopsis thaliana
  peptide (1)..(389): Ceres Seq. ID no. 12394407
  misc_feature (170)..(248): Pfam Name: SBP domain Pfam Description: SBP domain
  misc_feature (170)..(248): Pfam Name: SBP domain Pfam Description: SBP domain
  misc_feature (123)..(369): Homolog of NCBI NO: 15227896 NR Description: putative squamosa-promoter binding protein
  misc_feature (113)..(377): Homolog of NCBI NO: 21536841 NR Description: unknown [Arabidopsis thaliana]
  misc_feature (113)..(377): Homolog of NCBI NO: 18423163 NR Description: putative protein
  misc_feature (1)..(287): Homolog of NCBI NO: 15239820 NR Description: squamosa promoter binding protein-like 2
  misc_feature (1)..(367): Homolog of NCBI NO: 25456646 NR Description: squamosa promoter binding protein 2
  misc_feature (123)..(369): Homolog of NCBI NO: 15227896 NR Description: putative squamosa-promoter binding protein
  misc_feature (113)..(377): Homolog of NCBI NO: 18423163 NR Description: putative protein
  misc_feature (1)..(367): Homolog of NCBI NO: 25456646 NR Description: squamosa promoter binding protein 2
  misc_feature (1)..(389): Homolog of NCBI NO: 18396302 NR Description: putative squamosa-promoter binding protein 2
  misc_feature (1)..(389): Homolog of NCBI NO: 25403307 NR Description: protein F17L21.14 [imported] - Arabidopsis
  misc_feature (1)..(374): Homolog of NCBI NO: 22329813 NR Description: putative squamosa-promoter binding protein 2
  misc_feature (1)..(374): Homolog of NCBI NO: 18650611 NR Description: At1g27370/F17L21_16 [Arabidopsis thaliana]
  misc_feature (1)..(374): Homolog of NCBI NO: 9802546 NR Description: F17L21.15 [Arabidopsis thaliana]
  misc_feature (1)..(287): Homolog of NCBI NO: 15239820 NR Description: squamosa promoter binding protein-like 2
  misc_feature (113)..(377): Homolog of NCBI NO: 21536841 NR Description: unknown [Arabidopsis thaliana]
  misc_feature (1)..(374): Homolog of NCBI NO: 9802546 NR Description: F17L21.15 [Arabidopsis thaliana]
  misc_feature (1)..(374): Homolog of NCBI NO: 18650611 NR Description: At1g27370/F17L21_16 [Arabidopsis thaliana]
  misc_feature (1)..(374): Homolog of NCBI NO: 22329813 NR Description: putative squamosa-promoter binding protein 2
  misc_feature (1)..(389): Homolog of NCBI NO: 25403307 NR Description: protein F17L21.14 [imported] - Arabidopsis
  misc_feature (1)..(389): Homolog of NCBI NO: 18396302 NR Description: putative squamosa-promoter binding protein 2
MVSSSQWDWEHLIMSNPSRTEDDSKQLPTEWEIEKGEGIESIVPHFSGLERVSSGSATSFWHTAVSKSSQSTSINSSSPEAKRCKLASESSPGDSCSNIDFVQVKAPTALEVSVASAESDLCLKLGKRTYSEEYWGRNNNEISAVSMKLLTPSVVAGKSKLCGQSMPVPRCQIDGCELDLSSAKGYHRKHKVCEKHSKCPKVSVSGLERRFCQQCSRFHAVSEFDEKKRSCRKRLSHHNARRRKPQGVFSMNPERVYDRRQHTNMLWNGVSLNARSEEMYEWGNNTYDTKPRQTEKSFTLSFQRGNGSEDQLVASSSRMFSTSQTSGGFPAGKSKFQLHGEDVGEYSGVLHESQDIHRALSLLSTSSDPLAQPHVQPFSLLCSYDVVPK

SEQ ID NO: 24211 - protein, 376 aa, Arabidopsis thaliana
  peptide (1)..(376): Ceres Seq. ID no. 12394408
  misc_feature (157)..(235): Pfam Name: SBP domain Pfam Description: SBP domain
  misc_feature (157)..(235): Pfam Name: SBP domain Pfam Description: SBP domain
  misc_feature (110)..(356): Homolog of NCBI NO: 15227896 NR Description: putative squamosa-promoter binding protein
  misc_feature (100)..(364): Homolog of NCBI NO: 21536841 NR Description: unknown [Arabidopsis thaliana]
  misc_feature (100)..(364): Homolog of NCBI NO: 18423163 NR Description: putative protein
  misc_feature (1)..(274): Homolog of NCBI NO: 15239820 NR Description: squamosa promoter binding protein-like 2
  misc_feature (1)..(354): Homolog of NCBI NO: 25456646 NR Description: squamosa promoter binding protein 2
  misc_feature (110)..(356): Homolog of NCBI NO: 15227896 NR Description: putative squamosa-promoter binding protein
  misc_feature (100)..(364): Homolog of NCBI NO: 18423163 NR Description: putative protein
  misc_feature (1)..(354): Homolog of NCBI NO: 25456646 NR Description: squamosa promoter binding protein 2
  misc_feature (1)..(376): Homolog of NCBI NO: 18396302 NR Description: putative squamosa-promoter binding protein 2
  misc_feature (1)..(376): Homolog of NCBI NO: 25403307 NR Description: protein F17L21.14 [imported] - Arabidopsis
  misc_feature (1)..(361): Homolog of NCBI NO: 22329813 NR Description: putative squamosa-promoter binding protein 2
  misc_feature (1)..(361): Homolog of NCBI NO: 18650611 NR Description: At1g27370/F17L21_16 [Arabidopsis thaliana]
  misc_feature (1)..(361): Homolog of NCBI NO: 9802546 NR Description: F17L21.15 [Arabidopsis thaliana]
  misc_feature (1)..(274): Homolog of NCBI NO: 15239820 NR Description: squamosa promoter binding protein-like 2
  misc_feature (100)..(364): Homolog of NCBI NO: 21536841 NR Description: unknown [Arabidopsis thaliana]
  misc_feature (1)..(361): Homolog of NCBI NO: 9802546 NR Description: F17L21.15 [Arabidopsis thaliana]
  misc_feature (1)..(361): Homolog of NCBI NO: 18650611 NR Description: At1g27370/F17L21_16 [Arabidopsis thaliana]
  misc_feature (1)..(361): Homolog of NCBI NO: 22329813 NR Description: putative squamosa-promoter binding protein 2
  misc_feature (1)..(376): Homolog of NCBI NO: 25403307 NR Description: protein F17L21.14 [imported] - Arabidopsis
  misc_feature (1)..(376): Homolog of NCBI NO: 18396302 NR Description: putative squamosa-promoter binding protein 2
MSNPSRTEDDSKQLPTEWEIEKGEGIESIVPHFSGLERVSSGSATSFWHTAVSKSSQSTSINSSSPEAKRCKLASESSPGDSCSNIDFVQVKAPTALEVSVASAESDLCLKLGKRTYSEEYWGRNNNEISAVSMKLLTPSVVAGKSKLCGQSMPVPRCQIDGCELDLSSAKGYHRKHKVCEKHSKCPKVSVSGLERRFCQQCSRFHAVSEFDEKKRSCRKRLSHHNARRRKPQGVFSMNPERVYDRRQHTNMLWNGVSLNARSEEMYEWGNNTYDTKPRQTEKSFTLSFQRGNGSEDQLVASSSRMFSTSQTSGGFPAGKSKFQLHGEDVGEYSGVLHESQDIHRALSLLSTSSDPLAQPHVQPFSLLCSYDVVPK

SEQ ID NO: 24212 - DNA, 1218 bp, Arabidopsis thaliana
  misc_feature (1)..(1218): Ceres Seq. ID no. 12370378
  misc_feature: MA Experiment ID: 108434 Result: Down-regulated in Transcription
  misc_feature: MA Experiment 108434 PARAMETER Experiment Name: At_Root_Tips_cDNA_P Parameter: Tissue Value: Root Tips
  misc_feature: MA Experiment ID: 108573 Result: Up-regulated in Transcription
  misc_feature: MA Experiment 108573 PARAMETER Experiment Name: At_Drought_cDNA_P Parameter: Timepoint (hr) Value: 6
  misc_feature: MA Experiment 108573 PARAMETER Experiment Name: At_Drought_cDNA_P Parameter: Tissue Value: Aerial
  misc_feature: MA Experiment 108573 PARAMETER Experiment Name: At_Drought_cDNA_P Parameter: Treatment Value: Drought vs. No Drought
  misc_feature: MA Experiment ID: 108585 Result: Up-regulated in Transcription
  misc_feature: MA Experiment 108585 PARAMETER Experiment Name: At_5mM_NaNP_cDNA_P Parameter: Timepoint (hr) Value: 6
  misc_feature: MA Experiment 108585 PARAMETER Experiment Name: At_5mM_NaNP_cDNA_P Parameter: Tissue Value: Aerial
  misc_feature: MA Experiment 108585 PARAMETER Experiment Name: At_5mM_NaNP_cDNA_P Parameter: Treatment Value: null
  misc_feature: MA Experiment ID: 108668 Result: Up-regulated in Transcription
  misc_feature: MA Experiment 108668 PARAMETER Experiment Name: At_2mM_SA_cDNA_P Parameter: Plant Line Value: WS
  misc_feature: MA Experiment 108668 PARAMETER Experiment Name: At_2mM_SA_cDNA_P Parameter: Timepoint (hr) Value: 6
  misc_feature: MA Experiment 108668 PARAMETER Experiment Name: At_2mM_SA_cDNA_P Parameter: Treatment Value: 2mM SA vs. No Treatment
  misc_feature: MA Experiment ID: 20000112 Result: Up-regulated in Transcription
  misc_feature: MA Experiment 20000112 PARAMETER Experiment Name: At_42deg_Heat_cDNA_P Parameter: Temperature (deg C) Value: 42 vs. 22
  misc_feature: MA Experiment 20000112 PARAMETER Experiment Name: At_42deg_Heat_cDNA_P Parameter: Timepoint (hr) Value: 2
  misc_feature: MA Experiment 20000112 PARAMETER Experiment Name: At_42deg_Heat_cDNA_P Parameter: Tissue Value: Aerial
  misc_feature: MA Experiment ID: 20000182 Result: Up-regulated in Transcription
  misc_feature: MA Experiment 20000182 PARAMETER Experiment Name: At_2mM_SA_P Parameter: Age (day) Value: 14
  misc_feature: MA Experiment 20000182 PARAMETER Experiment Name: At_2mM_SA_P Parameter: Organism Value: A. thaliana
  misc_feature: MA Experiment 20000182 PARAMETER Experiment Name: At_2mM_SA_P Parameter: Plant Line Value: WS
  misc_feature: MA Experiment 20000182 PARAMETER Experiment Name: At_2mM_SA_P Parameter: Timepoint (hr) Value: 6
  misc_feature: MA Experiment 20000182 PARAMETER Experiment Name: At_2mM_SA_P Parameter: Tissue Value: Aerial
  misc_feature: MA Experiment 20000182 PARAMETER Experiment Name: At_2mM_SA_P Parameter: Treatment Value: 2mM SA vs. No Treatment
  misc_feature: MA Experiment ID: 20000224 Result: Down-regulated in Transcription
  misc_feature: MA Experiment ID: 20001911 Result: Up-regulated in Transcription
  misc_feature: MA Experiment 20001911 PARAMETER Experiment Name: At_Drought_Reproduction_P Parameter: Age (day) Value: 40
  misc_feature: MA Experiment 20001911 PARAMETER Experiment Name: At_Drought_Reproduction_P Parameter: Organism Value: A. thaliana
  misc_feature: MA Experiment 20001911 PARAMETER Experiment Name: At_Drought_Reproduction_P Parameter: Plant Line Value: WS
  misc_feature: MA Experiment 20001911 PARAMETER Experiment Name: At_Drought_Reproduction_P Parameter: Timepoint (day) Value: 10
  misc_feature: MA Experiment 20001911 PARAMETER Experiment Name: At_Drought_Reproduction_P Parameter: Tissue Value: Flowers
  misc_feature: MA Experiment 20001911 PARAMETER Experiment Name: At_Drought_Reproduction_P Parameter: Treatment Value: Drought vs. No Drought
gtataaaaaagttgtttctttcttctctgtttttttttgctttcgtcttcaagagagagagagagagagatacaaagagagaaatttggttgtttgttgacggaagcttcttcggtctctcttctccgtcttacgattgtcaacgcgtggttccatcttcaattttgtttctattttagcagaagtttctcgagcttcaaatactgtttcagatcaatcaatcagtcaatcatggctagctctggaaacaagaacatcaacgccaaattggtattactaggagatgttggagctggaaaatcaagtcttgtgctacggtttgtgaaagatcagtttgttgaatttcaggaatcaaccattggtgcagcttttttctctcaaacattggctgtgaatgatgcgactgtgaagtttgagatatgggatacagctggtcaggaacgataccacagtttggctccaatgtactacaggggtgcagctgctgctattattgtctttgacattactaatcaagcctcatttgagagggcgaagaaatgggttcaggaactgcaggcacaaggtaaccctaatatggtgatggctcttgctggaaacaaagctgatttattagacgcaaggaaggtgtctgcagaggaggcagagatatatgctcaagagaacagccttttctttatggaaacctcagcgaagaccgcaacaaatgtcaaagacatattctacgaaatagcgaaaaggctaccacgtgtacagccagctgaaaacccgacaggaatggttctcccaaacgggccaggggctacggcagtgagttcatcgtgttgtgcttagattcgtacctgaagagagatctcatttggttagtcacatagtagagaacatctgaactttcatgtgtttgcttcttcttcgtctttgttactttactttgcttgcattgacaacaacaacagtgtatatcatgatgatacttattctgcctttgtgaaatctgaagatatttgtatttggagagatttatatatatatatctcttttgtaattagaaaacaaaacttagtccgaaaaaaatgtgcttatctttcgtttatgttttaagtgaatgctcagatttataggcttattatcttttgtattacttaaatctccaaaatgttttttccattgttggaatgctgtaatatgaaagtatatatcaataaaagaagcaccttc

SEQ ID NO: 24213 - protein, 200 aa, Arabidopsis thaliana
  peptide (1)..(200): Ceres Seq. ID no. 12370379
  misc_feature (12)..(173): Pfam Name: Ras family Pfam Description: Ras family
  misc_feature (1)..(199): Homolog of NCBI NO: 266879 NR Description: RAS-RELATED PROTEIN RAB5
  misc_feature (1)..(200): Homolog of NCBI NO: 6010031 NR Description: GTP binding protein [Cichorium intybus x
  misc_feature (1)..(200): Homolog of NCBI NO: 6010033 NR Description: GTP binding protein [Cichorium intybus x
  misc_feature (1)..(200): Homolog of NCBI NO: 1076545 NR Description: guanine nucleotide regulatory protein - fava bean
  misc_feature (1)..(200): Homolog of NCBI NO: 12311682 NR Description: GTP binding protein [Cichorium intybus x
  misc_feature (1)..(200): Homolog of NCBI NO: 12311684 NR Description: GTP binding protein [Cichorium intybus x
  misc_feature (1)..(200): Homolog of NCBI NO: 1370178 NR Description: RAB5A [Lotus japonicus]
  misc_feature (1)..(200): Homolog of NCBI NO: 421941 NR Description: GTP-binding protein, ras-related - common tobacco
  misc_feature (1)..(200): Homolog of NCBI NO: 15235113 NR Description: GTP-binding protein, putative
  misc_feature (1)..(200): Homolog of NCBI NO: 15242309 NR Description: ras-related GTP-binding protein RHA1 (sp|P31582)
MASSGNKNINAKLVLLGDVGAGKSSLVLRFVKDQFVEFQESTIGAAFFSQTLAVNDATVKFEIWDTAGQERYHSLAPMYYRGAAAAIIVFDITNQASFERAKKWVQELQAQGNPNMVMALAGNKADLLDARKVSAEEAEIYAQENSLFFMETSAKTATNVKDIFYEIAKRLPRVQPAENPTGMVLPNGPGATAVSSSCCA

SEQ ID NO: 24214 - protein, 123 aa, Arabidopsis thaliana
  peptide (1)..(123): Ceres Seq. ID no. 12370380
  misc_feature (1)..(96): Pfam Name: Ras family Pfam Description: Ras family
  misc_feature (1)..(122): Homolog of NCBI NO: 266879 NR Description: RAS-RELATED PROTEIN RAB5
  misc_feature (1)..(123): Homolog of NCBI NO: 6010031 NR Description: GTP binding protein [Cichorium intybus x
  misc_feature (1)..(123): Homolog of NCBI NO: 6010033 NR Description: GTP binding protein [Cichorium intybus x
  misc_feature (1)..(123): Homolog of NCBI NO: 1076545 NR Description: guanine nucleotide regulatory protein - fava bean
  misc_feature (1)..(123): Homolog of NCBI NO: 12311682 NR Description: GTP binding protein [Cichorium intybus x
  misc_feature (1)..(123): Homolog of NCBI NO: 12311684 NR Description: GTP binding protein [Cichorium intybus x
  misc_feature (1)..(123): Homolog of NCBI NO: 1370178 NR Description: RAB5A [Lotus japonicus]
  misc_feature (1)..(123): Homolog of NCBI NO: 421941 NR Description: GTP-binding protein, ras-related - common tobacco
  misc_feature (1)..(123): Homolog of NCBI NO: 15235113 NR Description: GTP-binding protein, putative
  misc_feature (1)..(123): Homolog of NCBI NO: 15242309 NR Description: ras-related GTP-binding protein RHA1 (sp|P31582)
MYYRGAAAAIIVFDITNQASFERAKKWVQELQAQGNPNMVMALAGNKADLLDARKVSAEEAEIYAQENSLFFMETSAKTATNVKDIFYEIAKRLPRVQPAENPTGMVLPNGPGATAVSSSCCA

SEQ ID NO: 24215 - DNA, 1344 bp, Arabidopsis thaliana
  misc_feature (1)..(1344): Ceres Seq. ID no. 12482514
  misc_feature: MA Experiment ID: 108434 Result: Up-regulated in Transcription
  misc_feature: MA Experiment 108434 PARAMETER Experiment Name: At_Root_Tips_cDNA_P Parameter: Tissue Value: Root Tips
  misc_feature: MA Experiment ID: 20000179 Result: Up-regulated in Transcription
  misc_feature: MA Experiment 20000179 PARAMETER Experiment Name: At_Germinating_Seeds_P Parameter: Age (hr) Value: 6 vs. 0
  misc_feature: MA Experiment 20000179 PARAMETER Experiment Name: At_Germinating_Seeds_P Parameter: Tissue Value: Germinating Seeds
aatttttttgaccaaaagcaaaaacttaaaactggtttcagatctgaagtaaaagggttttgcttcggattctccggcgtcgtttaaatgatctctgacccatcttccttggcttaataattctggtccctccttttatctctttttactgttgatttatctgaatatgccacgctctttcttccacatgtttattctctcttcctttcttcaacacaagcgtctggactaaggaaagccaacaacaaaatctggtttcaagacggttggcaggagtttgtcaaccgtttctccattcggattggtttcagatacaaagttacagtctacattttcaatttatcctccacactctgagatcaaccaccattctagtagtgaagctcttatgcaaatggattccgcacagaatcagttcaacaaacgtgctcgattgtttgaagatcctgaactcaaagatgctaaggtcatttatccatcgaaccctgaatttactgaaccagtgaataaaggttatggcggttctacagccatccaaagctttttcaaagaatctaaagctgaagaaacgcccaaggtacttaagaagagaggaaggaagaagaagaatcctaatcccgaggaagtaaactcttcaactcccggtggagatgactcagagaaccgctcaaagttctacgagagtgcttctgctagaaagagaactgtaactgcagaggaaagagagagagccgtcaatgcagccaaaacattcgaaccaacaaatccttactttagagttgttctgcgaccatcatatctatacagaggttgcatcatgtacttgccatctgggtttgctgagaaatacctaagtgggatatctggtttcatcaagctccagctcggtgagaaacaatggccagtgaggtgcctctacaaagcagggagagctaagtttagccaaggatggtatgagttcacactcgagaacaatataggcgaaggagatgtatgtgtgtttgagctactcagaactcgggatttcgttctcgaagtcaccgcctttcgtgtcaatgagtatgtgtgaccaaaaaagatttccctttcatcagcgatcttgcaggtagctttccaaagttaaaattttatgtaggggtctcttaaccattctctctcttgcattggttgtctctgttctagtagtgttttgagtgaaatttcaggttcctatgtttggatgtggataagtatttgacgattataataacctctgagtgggaaactctttgtttgagtggtagctaggttcaaaagtagagttgtatatacttttatcttcatcaggataattatgtttatttg

SEQ ID NO: 24216 - protein, 226 aa, Arabidopsis thaliana
  peptide (1)..(226): Ceres Seq. ID no. 12482515
  misc_feature (128)..(225): Pfam Name: B3 DNA binding domain Pfam Description: B3 DNA binding domain
  misc_feature (97)..(224): Homolog of NCBI NO: 34910734 NR Description: P0022F10.13 [Oryza sativa (japonica
  misc_feature (3)..(226): Homolog of NCBI NO: 9280316 NR Description: gb|AAD43153.1~gene_id:K13E13.10~similar to
  misc_feature (1)..(226): Homolog of NCBI NO: 33943517 NR Description: reduced vernalization response 1 [Brassica rapa]
  misc_feature (1)..(226): Homolog of NCBI NO: 40806799 NR Description: reduced vernalization response 1 [Brassica rapa]
  misc_feature (1)..(226): Homolog of NCBI NO: 30685150 NR Description: transcriptional factor B3 family [Arabidopsis
  misc_feature (1)..(226): Homolog of NCBI NO: 14596161 NR Description: Unknown protein [Arabidopsis thaliana]
  misc_feature (1)..(226): Homolog of NCBI NO: 18402653 NR Description: expressed protein
MQMDSAQNQFNKRARLFEDPELKDAKVIYPSNPEFTEPVNKGYGGSTAIQSFFKESKAEETPKVLKKRGRKKKNPNPEEVNSSTPGGDDSENRSKFYESASARKRTVTAEERERAVNAAKTFEPTNPYFRVVLRPSYLYRGCIMYLPSGFAEKYLSGISGFIKLQLGEKQWPVRCLYKAGRAKFSQGWYEFTLENNIGEGDVCVFELLRTRDFVLEVTAFRVNEYV

SEQ ID NO: 24217 - protein, 224 aa, Arabidopsis thaliana
  peptide (1)..(224): Ceres Seq. ID no. 12482516
  misc_feature (126)..(223): Pfam Name: B3 DNA binding domain Pfam Description: B3 DNA binding domain
  misc_feature (95)..(222): Homolog of NCBI NO: 34910734 NR Description: P0022F10.13 [Oryza sativa (japonica
  misc_feature (1)..(224): Homolog of NCBI NO: 9280316 NR Description: gb|AAD43153.1~gene_id:K13E13.10~similar to
  misc_feature (1)..(224): Homolog of NCBI NO: 33943517 NR Description: reduced vernalization response 1 [Brassica rapa]
  misc_feature (1)..(224): Homolog of NCBI NO: 40806799 NR Description: reduced vernalization response 1 [Brassica rapa]
  misc_feature (1)..(224): Homolog of NCBI NO: 30685150 NR Description: transcriptional factor B3 family [Arabidopsis
  misc_feature (1)..(224): Homolog of NCBI NO: 14596161 NR Description: Unknown protein [Arabidopsis thaliana]
  misc_feature (1)..(224): Homolog of NCBI NO: 18402653 NR Description: expressed protein
MDSAQNQFNKRARLFEDPELKDAKVIYPSNPEFTEPVNKGYGGSTAIQSFFKESKAEETPKVLKKRGRKKKNPNPEEVNSSTPGGDDSENRSKFYESASARKRTVTAEERERAVNAAKTFEPTNPYFRVVLRPSYLYRGCIMYLPSGFAEKYLSGISGFIKLQLGEKQWPVRCLYKAGRAKFSQGWYEFTLENNIGEGDVCVFELLRTRDFVLEVTAFRVNEYV

SEQ ID NO: 24218 - DNA, 1833 bp, Arabidopsis thaliana
  misc_feature (1)..(1833): Ceres Seq. ID no. 13580705
  misc_feature: MA Experiment ID: 108434 Result: Down-regulated in Transcription
  misc_feature: MA Experiment 108434 PARAMETER Experiment Name: At_Root_Tips_cDNA_P Parameter: Tissue Value: Root Tips
  misc_feature: MA Experiment ID: 108435 Result: Up-regulated in Transcription
  misc_feature: MA Experiment 108435 PARAMETER Experiment Name: At_stm_Mutants_cDNA_P Parameter: Plant Line Value: wt Landsburg vs stm
  misc_feature: MA Experiment 108435 PARAMETER Experiment Name: At_stm_Mutants_cDNA_P Parameter: Tissue Value: Shoot Apical Meristem Region
  misc_feature: MA Experiment ID: 108561 Result: Up-regulated in Transcription
  misc_feature: MA Experiment 108561 PARAMETER Experiment Name: At_100uM_ABA_cDNA_P Parameter: Timepoint (hr) Value: 6
  misc_feature: MA Experiment 108561 PARAMETER Experiment Name: At_100uM_ABA_cDNA_P Parameter: Tissue Value: Aerial
  misc_feature: MA Experiment 108561 PARAMETER Experiment Name: At_100uM_ABA_cDNA_P Parameter: Treatment Value: 100uM ABA vs. No Treatment
  misc_feature: MA Experiment ID: 108573 Result: Up-regulated in Transcription
  misc_feature: MA Experiment 108573 PARAMETER Experiment Name: At_Drought_cDNA_P Parameter: Timepoint (hr) Value: 6
  misc_feature: MA Experiment 108573 PARAMETER Experiment Name: At_Drought_cDNA_P Parameter: Tissue Value: Aerial
  misc_feature: MA Experiment 108573 PARAMETER Experiment Name: At_Drought_cDNA_P Parameter: Treatment Value: Drought vs. No Drought
  misc_feature: MA Experiment ID: 108577 Result: Up-regulated in Transcription
  misc_feature: MA Experiment 108577 PARAMETER Experiment Name: At_42deg_Heat_cDNA_P Parameter: Temperature (deg C) Value: 42 vs. 22
  misc_feature: MA Experiment 108577 PARAMETER Experiment Name: At_42deg_Heat_cDNA_P Parameter: Timepoint (hr) Value: 6
  misc_feature: MA Experiment 108577 PARAMETER Experiment Name: At_42deg_Heat_cDNA_P Parameter: Tissue Value: Aerial
  misc_feature: MA Experiment ID: 108579 Result: Up-regulated in Transcription
  misc_feature: MA Experiment 108579 PARAMETER Experiment Name: At_4deg_Cold_cDNA_P Parameter: Temperature (deg C) Value: 4 vs. 22
  misc_feature: MA Experiment 108579 PARAMETER Experiment Name: At_4deg_Cold_cDNA_P Parameter: Timepoint (hr) Value: 6
  misc_feature: MA Experiment 108579 PARAMETER Experiment Name: At_4deg_Cold_cDNA_P Parameter: Tissue Value: Aerial
  misc_feature: MA Experiment ID: 108585 Result: Up-regulated in Transcription
  misc_feature: MA Experiment 108585 PARAMETER Experiment Name: At_5mM_NaNP_cDNA_P Parameter: Timepoint (hr) Value: 6
  misc_feature: MA Experiment 108585 PARAMETER Experiment Name: At_5mM_NaNP_cDNA_P Parameter: Tissue Value: Aerial
  misc_feature: MA Experiment 108585 PARAMETER Experiment Name: At_5mM_NaNP_cDNA_P Parameter: Treatment Value: null
  misc_feature: MA Experiment ID: 108595 Result: Down-regulated in Transcription
  misc_feature: MA Experiment 108595 PARAMETER Experiment Name: At_Ler-pi_Ovule_cDNA_P Parameter: Plant Line Value: null
  misc_feature: MA Experiment ID: 108668 Result: Up-regulated in Transcription
  misc_feature: MA Experiment 108668 PARAMETER Experiment Name: At_2mM_SA_cDNA_P Parameter: Plant Line Value: WS
  misc_feature: MA Experiment 108668 PARAMETER Experiment Name: At_2mM_SA_cDNA_P Parameter: Timepoint (hr) Value: 6
  misc_feature: MA Experiment 108668 PARAMETER Experiment Name: At_2mM_SA_cDNA_P Parameter: Treatment Value: 2mM SA vs. No Treatment
  misc_feature: MA Experiment ID: 20000089 Result: Down-regulated in Transcription
  misc_feature: MA Experiment ID: 20000090 Result: Down-regulated in Transcription
  misc_feature: MA Experiment ID: 20000182 Result: Up-regulated in Transcription
  misc_feature: MA Experiment 20000182 PARAMETER Experiment Name: At_2mM_SA_P Parameter: Age (day) Value: 14
  misc_feature: MA Experiment 20000182 PARAMETER Experiment Name: At_2mM_SA_P Parameter: Organism Value: A. thaliana
  misc_feature: MA Experiment 20000182 PARAMETER Experiment Name: At_2mM_SA_P Parameter: Plant Line Value: WS
  misc_feature: MA Experiment 20000182 PARAMETER Experiment Name: At_2mM_SA_P Parameter: Timepoint (hr) Value: 6
  misc_feature: MA Experiment 20000182 PARAMETER Experiment Name: At_2mM_SA_P Parameter: Tissue Value: Aerial
  misc_feature: MA Experiment 20000182 PARAMETER Experiment Name: At_2mM_SA_P Parameter: Treatment Value: 2mM SA vs. No Treatment
  misc_feature: MA Experiment ID: 20000184 Result: Up-regulated in Transcription
  misc_feature: MA Experiment 20000184 PARAMETER Experiment Name: At_Shoots__P Parameter: Age (day) Value: 7
  misc_feature: MA Experiment 20000184 PARAMETER Experiment Name: At_Shoots__P Parameter: Tissue Value: Shoots vs. Whole Plant
  misc_feature: MA Experiment ID: 20000185 Result: Up-regulated in Transcription
  misc_feature: MA Experiment 20000185 PARAMETER Experiment Name: At_Roots__P Parameter: Age (day) Value: 7 vs. 21
  misc_feature: MA Experiment 20000185 PARAMETER Experiment Name: At_Roots__P Parameter: Organism Value: A. thaliana
  misc_feature: MA Experiment 20000185 PARAMETER Experiment Name: At_Roots__P Parameter: Tissue Value: Roots vs. Whole Plant
  misc_feature: MA Experiment ID: 20000224 Result: Up-regulated in Transcription
  misc_feature: MA Experiment ID: 20000235 Result: Up-regulated in Transcription
  misc_feature: MA Experiment 20000235 PARAMETER Experiment Name: At_Siliques_P Parameter: Age (day) Value: 21
  misc_feature: MA Experiment 20000235 PARAMETER Experiment Name: At_Siliques_P Parameter: Organism Value: A. thaliana
  misc_feature: MA Experiment 20000235 PARAMETER Experiment Name: At_Siliques_P Parameter: Plant Line Value: WS
  misc_feature: MA Experiment 20000235 PARAMETER Experiment Name: At_Siliques_P Parameter: Tissue Value: 5-10mm Siliques vs. Whole Plant
  misc_feature: MA Experiment ID: 20000264 Result: Up-regulated in Transcription
  misc_feature: MA Experiment 20000264 PARAMETER Experiment Name: At_Open_Flower_P Parameter: Age (day) Value: 21
  misc_feature: MA Experiment 20000264 PARAMETER Experiment Name: At_Open_Flower_P Parameter: Plant Line Value: WS
  misc_feature: MA Experiment 20000264 PARAMETER Experiment Name: At_Open_Flower_P Parameter: Tissue Value: Open Flower vs. Whole Plant
  misc_feature: MA Experiment ID: 20000286 Result: Up-regulated in Transcription
  misc_feature: MA Experiment 20000286 PARAMETER Experiment Name: At_Open_Flower_P Parameter: Age (day) Value: 21
  misc_feature: MA Experiment 20000286 PARAMETER Experiment Name: At_Open_Flower_P Parameter: Plant Line Value: WS
  misc_feature: MA Experiment 20000286 PARAMETER Experiment Name: At_Open_Flower_P Parameter: Tissue Value: Half Open vs. Whole Plant
  misc_feature: MA Experiment ID: 20000439 Result: Up-regulated in Transcription
  misc_feature: MA Experiment 20000439 PARAMETER Experiment Name: At_Roots__P Parameter: Age (day) Value: 14 vs. 21
  misc_feature: MA Experiment 20000439 PARAMETER Experiment Name: At_Roots__P Parameter: Organism Value: A. thaliana
  misc_feature: MA Experiment 20000439 PARAMETER Experiment Name: At_Roots__P Parameter: Tissue Value: Roots vs. Whole Plant
  misc_feature: MA Experiment ID: 20000794 Result: Up-regulated in Transcription
  misc_feature: MA Experiment 20000794 PARAMETER Experiment Name: At_Petals_P Parameter: Age (day) Value: 23-25 days
  misc_feature: MA Experiment 20000794 PARAMETER Experiment Name: At_Petals_P Parameter: Plant Line Value: WS
  misc_feature: MA Experiment 20000794 PARAMETER Experiment Name: At_Petals_P Parameter: Tissue Value: Petals vs. Whole plant
  misc_feature: MA Experiment ID: 20001248 Result: Down-regulated in Transcription
  misc_feature: MA Experiment 20001248 PARAMETER Experiment Name: At_Far-red-induction_P Parameter: Age (day) Value: 7
  misc_feature: MA Experiment 20001248 PARAMETER Experiment Name: At_Far-red-induction_P Parameter: Light Value: Far-red vs. White
  misc_feature: MA Experiment 20001248 PARAMETER Experiment Name: At_Far-red-induction_P Parameter: Organism Value: A. thaliana
  misc_feature: MA Experiment 20001248 PARAMETER Experiment Name: At_Far-red-induction_P Parameter: Plant Line Value: Columbia
  misc_feature: MA Experiment 20001248 PARAMETER Experiment Name: At_Far-red-induction_P Parameter: Timepoint (hr) Value: 4
  misc_feature: MA Experiment 20001248 PARAMETER Experiment Name: At_Far-red-induction_P Parameter: Tissue Value: Whole Plant
  misc_feature: MA Experiment ID: 20001757 Result: Down-regulated in Transcription
  misc_feature: MA Experiment 20001757 PARAMETER Experiment Name: At_50mM_NH4NO3_L-to-H_P Parameter: Timepoint (hr) Value: 6
  misc_feature: MA Experiment 20001757 PARAMETER Experiment Name: At_50mM_NH4NO3_L-to-H_P Parameter: Tissue Value: Leaf
  misc_feature: MA Experiment 20001757 PARAMETER Experiment Name: At_50mM_NH4NO3_L-to-H_P Parameter: Treatment Value: 50mM NH4NO3 vs 100mM Mannitol
acaatcatttgattatttcctcctctccgtatctgtgtctctcttctcttgatcttttagtgttcttgctttgtcgcttcaacgcttaagtttggatttgtgtgagtctgcataatcatggcgaggaagatgcttgttgatggtgagattgataaggtggcggctgatgaagccaacgcgacgcactatgattttgatttgtttgtcatcggtgccgggagtggcggtgttcgtgctgctaggttttcggctaatcatggcgctaaggttggtatttgtgagcttccatttcaccctattagctctgaggagattggaggcgttggtggaacctgtgttatccgtggttgtgttcctaaaaagattctcgtctatggagctacttacggtggtgaacttgaggatgctaaaaattatgggtgggaaataaatgagaaagtcgacttcacatggaagaagcttttgcaaaagaagactgatgagatactaagactgaataatatctacaagcggttattggcaaatgctgcggtgaaattgtatgaaggtgaaggaagagtagttggtcccaacgaagtggaggtgagacaaatagatggcacaaaaataagttataccgcaaagcacatattgattgccactggcagtcgggcgcaaaagcctaatattcctggacatgagctggctattacatctgatgaagctttgagcttggaagaatttcccaagcgtgctatagtgcttggaggagggtatattgctgtggagtttgcatcaatatggcgtggaatgggtgctactgtagatttattcttcaggaaggaacttccgctaaggggttttgatgacgaaatgagggcactagttgctagaaatcttgaaggaaggggcgttaatctgcatccacaaacaagtttgactcagttgacaaaaacagaccaggggatcaaagtcatatcgtcccatggggaggaattcgtggcagatgtcgtcctatttgctactggcagaagtcctaataccaaaagattgaatttagaagctgttggtgttgaacttgatcaggctggagctgtgaaggttgacgagtattcacgaactaatatacctagcatatgggctgtaggagatgccacaaaccgaattaaccttacacctgttgcgttaatggaggccacctgttttgcgaacactgcttttggtggaaagcctactaaagcagaatacagcaatgtcgcctgtgctgtattttgcataccaccactagctgtagtgggtctcagcgaagaagaagcagtagaacaagcaaccggtgatattctggtcttcacctcaggctttaatccaatgaagaacaccatttctggacgccaggaaaagacattgatgaagctaatagttgatgagaagagtgataaggttattggagcatccatgtgcggtcctgatgcagctgagatcatgcaggggattgcaattgcgctcaagtgtggagcaaccaaagcacaatttgatagcacggttgggatacatccatcttctgcagaggaatttgtgacaatgcgcagtgtgaccagacgcattgcccacaaacccaaacctaagacaaatctatgaaccgcaaaatataaagagctatatagcatgaaaactcggtacacttaatttgatcaaagagtcagacaacgatgagtttaatcatactcgtgtcccaataaaggatttgtaatttttgtttgtttgtatgatgcttctcttcttacttacttgagaaaacatcaaggtttcttctcttattgcttagtggaactttattacaaagaattattctct

SEQ ID NO: 24219 - protein, 499 aa, Arabidopsis thaliana
  peptide (1)..(499): Ceres Seq. ID no. 13580706
  misc_feature (27)..(348): Pfam Name: Pyridine nucleotide-disulphide oxidoreductase Pfam Description: Pyridine nucleotide-disulphide oxidoreductase
  misc_feature (1)..(499): Homolog of NCBI NO: 34334010 NR Description: cytosolic glutathione reductase [Triticum
  misc_feature (1)..(499): Homolog of NCBI NO: 7431855 NR Description: probable glutathione-disulfide reductase (EC
  misc_feature (1)..(499): Homolog of NCBI NO: 19860133 NR Description: Glutathione reductase, cytosolic (GR) (GRase)
  misc_feature (17)..(469): Homolog of NCBI NO: 10862871 NR Description: glutathione reductase [Mesembryanthemum
  misc_feature (1)..(499): Homolog of NCBI NO: 2500116 NR Description: Glutathione reductase, cytosolic (GR) (GRase)
  misc_feature (12)..(499): Homolog of NCBI NO: 2500115 NR Description: Glutathione reductase, chloroplast precursor (GR)
  misc_feature (1)..(499): Homolog of NCBI NO: 7431864 NR Description: glutathione-disulfide reductase (EC 1.8.1.7) -
  misc_feature (1)..(499): Homolog of NCBI NO: 21263645 NR Description: Glutathione reductase, cytosolic (GR) (GRase)
  misc_feature (1)..(499): Homolog of NCBI NO: 13430632 NR Description: putative glutathione reductase [Arabidopsis
  misc_feature (1)..(499): Homolog of NCBI NO: 15230074 NR Description: glutathione reductase, putative [Arabidopsis
MARKMLVDGEIDKVAADEANATHYDFDLFVIGAGSGGVRAARFSANHGAKVGICELPFHPISSEEIGGVGGTCVIRGCVPKKILVYGATYGGELEDAKNYGWEINEKVDFTWKKLLQKKTDEILRLNNIYKRLLANAAVKLYEGEGRVVGPNEVEVRQIDGTKISYTAKHILIATGSRAQKPNIPGHELAITSDEALSLEEFPKRAIVLGGGYIAVEFASIWRGMGATVDLFFRKELPLRGFDDEMRALVARNLEGRGVNLHPQTSLTQLTKTDQGIKVISSHGEEFVADVVLFATGRSPNTKRLNLEAVGVELDQAGAVKVDEYSRTNIPSIWAVGDATNRINLTPVALMEATCFANTAFGGKPTKAEYSNVACAVFCIPPLAVVGLSEEEAVEQATGDILVFTSGFNPMKNTISGRQEKTLMKLIVDEKSDKVIGASMCGPDAAEIMQGIAIALKCGATKAQFDSTVGIHPSSAEEFVTMRSVTRRIAHKPKPKTNL

SEQ ID NO: 24220 - protein, 495 aa, Arabidopsis thaliana
  peptide (1)..(495): Ceres Seq. ID no. 13580707
  misc_feature (23)..(344): Pfam Name: Pyridine nucleotide-disulphide oxidoreductase Pfam Description: Pyridine nucleotide-disulphide oxidoreductase
  misc_feature (1)..(495): Homolog of NCBI NO: 34334010 NR Description: cytosolic glutathione reductase [Triticum
  misc_feature (1)..(495): Homolog of NCBI NO: 7431855 NR Description: probable glutathione-disulfide reductase (EC
  misc_feature (1)..(495): Homolog of NCBI NO: 19860133 NR Description: Glutathione reductase, cytosolic (GR) (GRase)
  misc_feature (13)..(465): Homolog of NCBI NO: 10862871 NR Description: glutathione reductase [Mesembryanthemum
  misc_feature (1)..(495): Homolog of NCBI NO: 2500116 NR Description: Glutathione reductase, cytosolic (GR) (GRase)
  misc_feature (8)..(495): Homolog of NCBI NO: 2500115 NR Description: Glutathione reductase, chloroplast precursor (GR)
  misc_feature (1)..(495): Homolog of NCBI NO: 7431864 NR Description: glutathione-disulfide reductase (EC 1.8.1.7) -
  misc_feature (1)..(495): Homolog of NCBI NO: 21263645 NR Description: Glutathione reductase, cytosolic (GR) (GRase)
  misc_feature (1)..(495): Homolog of NCBI NO: 13430632 NR Description: putative glutathione reductase [Arabidopsis
  misc_feature (1)..(495): Homolog of NCBI NO: 15230074 NR Description: glutathione reductase, putative [Arabidopsis
MLVDGEIDKVAADEANATHYDFDLFVIGAGSGGVRAARFSANHGAKVGICELPFHPISSEEIGGVGGTCVIRGCVPKKILVYGATYGGELEDAKNYGWEINEKVDFTWKKLLQKKTDEILRLNNIYKRLLANAAVKLYEGEGRVVGPNEVEVRQIDGTKISYTAKHILIATGSRAQKPNIPGHELAITSDEALSLEEFPKRAIVLGGGYIAVEFASIWRGMGATVDLFFRKELPLRGFDDEMRALVARNLEGRGVNLHPQTSLTQLTKTDQGIKVISSHGEEFVADVVLFATGRSPNTKRLNLEAVGVELDQAGAVKVDEYSRTNIPSIWAVGDATNRINLTPVALMEATCFANTAFGGKPTKAEYSNVACAVFCIPPLAVVGLSEEEAVEQATGDILVFTSGFNPMKNTISGRQEKTLMKLIVDEKSDKVIGASMCGPDAAEIMQGIAIALKCGATKAQFDSTVGIHPSSAEEFVTMRSVTRRIAHKPKPKTNL

SEQ ID NO: 24221 - protein, 275 aa, Arabidopsis thaliana
  peptide (1)..(275): Ceres Seq. ID no. 13580708
  misc_feature (1)..(124): Pfam Name: Pyridine nucleotide-disulphide oxidoreductase Pfam Description: Pyridine nucleotide-disulphide oxidoreductase
  misc_feature (1)..(275): Homolog of NCBI NO: 34334010 NR Description: cytosolic glutathione reductase [Triticum
  misc_feature (1)..(275): Homolog of NCBI NO: 7431855 NR Description: probable glutathione-disulfide reductase (EC
  misc_feature (1)..(275): Homolog of NCBI NO: 19860133 NR Description: Glutathione reductase, cytosolic (GR) (GRase)
  misc_feature (1)..(245): Homolog of NCBI NO: 10862871 NR Description: glutathione reductase [Mesembryanthemum
  misc_feature (1)..(275): Homolog of NCBI NO: 2500116 NR Description: Glutathione reductase, cytosolic (GR) (GRase)
  misc_feature (1)..(275): Homolog of NCBI NO: 2500115 NR Description: Glutathione reductase, chloroplast precursor (GR)
  misc_feature (1)..(275): Homolog of NCBI NO: 7431864 NR Description: glutathione-disulfide reductase (EC 1.8.1.7) -
  misc_feature (1)..(275): Homolog of NCBI NO: 21263645 NR Description: Glutathione reductase, cytosolic (GR) (GRase)
  misc_feature (1)..(275): Homolog of NCBI NO: 13430632 NR Description: putative glutathione reductase [Arabidopsis
  misc_feature (1)..(275): Homolog of NCBI NO: 15230074 NR Description: glutathione reductase, putative [Arabidopsis
MGATVDLFFRKELPLRGFDDEMRALVARNLEGRGVNLHPQTSLTQLTKTDQGIKVISSHGEEFVADVVLFATGRSPNTKRLNLEAVGVELDQAGAVKVDEYSRTNIPSIWAVGDATNRINLTPVALMEATCFANTAFGGKPTKAEYSNVACAVFCIPPLAVVGLSEEEAVEQATGDILVFTSGFNPMKNTISGRQEKTLMKLIVDEKSDKVIGASMCGPDAAEIMQGIAIALKCGATKAQFDSTVGIHPSSAEEFVTMRSVTRRIAHKPKPKTNL

SEQ ID NO: 24222 - DNA, 1198 bp, Arabidopsis thaliana
  misc_feature (1)..(1198): Ceres Seq. ID no. 12728802
  misc_feature: MA Experiment ID: 108434 Result: Up-regulated in Transcription
  misc_feature: MA Experiment 108434 PARAMETER Experiment Name: At_Root_Tips_cDNA_P Parameter: Tissue Value: Root Tips
  misc_feature: MA Experiment ID: 108435 Result: Up-regulated in Transcription
  misc_feature: MA Experiment 108435 PARAMETER Experiment Name: At_stm_Mutants_cDNA_P Parameter: Plant Line Value: wt Landsburg vs stm
  misc_feature: MA Experiment 108435 PARAMETER Experiment Name: At_stm_Mutants_cDNA_P Parameter: Tissue Value: Shoot Apical Meristem Region
  misc_feature: MA Experiment ID: 108462 Result: Down-regulated in Transcription
  misc_feature: MA Experiment 108462 PARAMETER Experiment Name: At_Germinating_Seeds_cDNA_P Parameter: Age (day) Value: 2 vs. 0
  misc_feature: MA Experiment 108462 PARAMETER Experiment Name: At_Germinating_Seeds_cDNA_P Parameter: Tissue Value: Germinating Seeds
  misc_feature: MA Experiment ID: 108463 Result: Down-regulated in Transcription
  misc_feature: MA Experiment 108463 PARAMETER Experiment Name: At_Germinating_Seeds_cDNA_P Parameter: Age (day) Value: 3 vs. 0
  misc_feature: MA Experiment 108463 PARAMETER Experiment Name: At_Germinating_Seeds_cDNA_P Parameter: Tissue Value: Germinating Seeds
  misc_feature: MA Experiment ID: 108561 Result: Down-regulated in Transcription
  misc_feature: MA Experiment 108561 PARAMETER Experiment Name: At_100uM_ABA_cDNA_P Parameter: Timepoint (hr) Value: 6
  misc_feature: MA Experiment 108561 PARAMETER Experiment Name: At_100uM_ABA_cDNA_P Parameter: Tissue Value: Aerial
  misc_feature: MA Experiment 108561 PARAMETER Experiment Name: At_100uM_ABA_cDNA_P Parameter: Treatment Value: 100uM ABA vs. No Treatment
  misc_feature: MA Experiment ID: 108569 Result: Up-regulated in Transcription
  misc_feature: MA Experiment 108569 PARAMETER Experiment Name: At_0.001%_MeJA__cDNA_P Parameter: Timepoint (hr) Value: 6
  misc_feature: MA Experiment 108569 PARAMETER Experiment Name: At_0.001%_MeJA__cDNA_P Parameter: Tissue Value: Aerial
  misc_feature: MA Experiment 108569 PARAMETER Experiment Name: At_0.001%_MeJA__cDNA_P Parameter: Treatment Value: 0.001% MeJA vs. No Treatment
  misc_feature: MA Experiment ID: 108572 Result: Up-regulated in Transcription
  misc_feature: MA Experiment 108572 PARAMETER Experiment Name: At_Drought_cDNA_P Parameter: Timepoint (hr) Value: 1
  misc_feature: MA Experiment 108572 PARAMETER Experiment Name: At_Drought_cDNA_P Parameter: Tissue Value: Aerial
  misc_feature: MA Experiment 108572 PARAMETER Experiment Name: At_Drought_cDNA_P Parameter: Treatment Value: Drought vs. No Drought
  misc_feature: MA Experiment ID: 108573 Result: Up-regulated in Transcription
  misc_feature: MA Experiment 108573 PARAMETER Experiment Name: At_Drought_cDNA_P Parameter: Timepoint (hr) Value: 6
  misc_feature: MA Experiment 108573 PARAMETER Experiment Name: At_Drought_cDNA_P Parameter: Tissue Value: Aerial
  misc_feature: MA Experiment 108573 PARAMETER Experiment Name: At_Drought_cDNA_P Parameter: Treatment Value: Drought vs. No Drought
  misc_feature: MA Experiment ID: 108574 Result: Up-regulated in Transcription
  misc_feature: MA Experiment 108574 PARAMETER Experiment Name: At_Wounding__cDNA_P Parameter: Timepoint (hr) Value: 1
  misc_feature: MA Experiment 108574 PARAMETER Experiment Name: At_Wounding__cDNA_P Parameter: Tissue Value: Aerial
  misc_feature: MA Experiment 108574 PARAMETER Experiment Name: At_Wounding__cDNA_P Parameter: Treatment Value: Wounding vs. No Wounding
  misc_feature: MA Experiment ID: 108577 Result: Down-regulated in Transcription
  misc_feature: MA Experiment 108577 PARAMETER Experiment Name: At_42deg_Heat_cDNA_P Parameter: Temperature (deg C) Value: 42 vs. 22
  misc_feature: MA Experiment 108577 PARAMETER Experiment Name: At_42deg_Heat_cDNA_P Parameter: Timepoint (hr) Value: 6
  misc_feature: MA Experiment 108577 PARAMETER Experiment Name: At_42deg_Heat_cDNA_P Parameter: Tissue Value: Aerial
  misc_feature: MA Experiment ID: 108594 Result: Down-regulated in Transcription
  misc_feature: MA Experiment 108594 PARAMETER Experiment Name: At_Ler-rhl_Root_cDNA_P Parameter: Plant Line Value: null
  misc_feature: MA Experiment ID: 108595 Result: Down-regulated in Transcription
  misc_feature: MA Experiment 108595 PARAMETER Experiment Name: At_Ler-pi_Ovule_cDNA_P Parameter: Plant Line Value: null
  misc_feature: MA Experiment ID: 108668 Result: Up-regulated in Transcription
  misc_feature: MA Experiment 108668 PARAMETER Experiment Name: At_2mM_SA_cDNA_P Parameter: Plant Line Value: WS
  misc_feature: MA Experiment 108668 PARAMETER Experiment Name: At_2mM_SA_cDNA_P Parameter: Timepoint (hr) Value: 6
  misc_feature: MA Experiment 108668 PARAMETER Experiment Name: At_2mM_SA_cDNA_P Parameter: Treatment Value: 2mM SA vs. No Treatment
  misc_feature: MA Experiment ID: 20000087 Result: Down-regulated in Transcription
  misc_feature: MA Experiment 20000087 PARAMETER Experiment Name: At_100uM_ABA_Mutants_cDNA_P Parameter: Plant Line Value: WS
  misc_feature: MA Experiment 20000087 PARAMETER Experiment Name: At_100uM_ABA_Mutants_cDNA_P Parameter: Timepoint (hr) Value: 6
  misc_feature: MA Experiment 20000087 PARAMETER Experiment Name: At_100uM_ABA_Mutants_cDNA_P Parameter: Tissue Value: Aerial
  misc_feature: MA Experiment 20000087 PARAMETER Experiment Name: At_100uM_ABA_Mutants_cDNA_P Parameter: Treatment Value: 100uM ABA vs. No Treatment
  misc_feature: MA Experiment ID: 20000117 Result: Down-regulated in Transcription
  misc_feature: MA Experiment 20000117 PARAMETER Experiment Name: At_100uM_ABA_Mutants_cDNA_P Parameter: Plant Line Value: Columbia
  misc_feature: MA Experiment 20000117 PARAMETER Experiment Name: At_100uM_ABA_Mutants_cDNA_P Parameter: Timepoint (hr) Value: 6
  misc_feature: MA Experiment 20000117 PARAMETER Experiment Name: At_100uM_ABA_Mutants_cDNA_P Parameter: Tissue Value: Aerial
  misc_feature: MA Experiment 20000117 PARAMETER Experiment Name: At_100uM_ABA_Mutants_cDNA_P Parameter: Treatment Value: 100uM ABA vs. No Treatment
  misc_feature: MA Experiment ID: 20000171 Result: Down-regulated in Transcription
  misc_feature: MA Experiment 20000171 PARAMETER Experiment Name: At_42deg_Heat_P Parameter: Age (day) Value: 14
  misc_feature: MA Experiment 20000171 PARAMETER Experiment Name: At_42deg_Heat_P Parameter: Organism Value: A. thaliana
  misc_feature: MA Experiment 20000171 PARAMETER Experiment Name: At_42deg_Heat_P Parameter: Plant Line Value: WS
  misc_feature: MA Experiment 20000171 PARAMETER Experiment Name: At_42deg_Heat_P Parameter: Temperature (deg C) Value: 42 vs. 22
  misc_feature: MA Experiment 20000171 PARAMETER Experiment Name: At_42deg_Heat_P Parameter: Timepoint (hr) Value: 1
  misc_feature: MA Experiment 20000171 PARAMETER Experiment Name: At_42deg_Heat_P Parameter: Tissue Value: Aerial
  misc_feature: MA Experiment ID: 20000179 Result: Down-regulated in Transcription
  misc_feature: MA Experiment 20000179 PARAMETER Experiment Name: At_Germinating_Seeds_P Parameter: Age (hr) Value: 6 vs. 0
  misc_feature: MA Experiment 20000179 PARAMETER Experiment Name: At_Germinating_Seeds_P Parameter: Tissue Value: Germinating Seeds
  misc_feature: MA Experiment ID: 20000180 Result: Down-regulated in Transcription
  misc_feature: MA Experiment 20000180 PARAMETER Experiment Name: At_Germinating_Seeds_P Parameter: Age (hr) Value: 24 vs. 0
  misc_feature: MA Experiment 20000180 PARAMETER Experiment Name: At_Germinating_Seeds_P Parameter: Tissue Value: Germinating Seeds
  misc_feature: MA Experiment ID: 20000184 Result: Up-regulated in Transcription
  misc_feature: MA Experiment 20000184 PARAMETER Experiment Name: At_Shoots__P Parameter: Age (day) Value: 7
  misc_feature: MA Experiment 20000184 PARAMETER Experiment Name: At_Shoots__P Parameter: Tissue Value: Shoots vs. Whole Plant
  misc_feature: MA Experiment ID: 20000185 Result: Down-regulated in Transcription
  misc_feature: MA Experiment 20000185 PARAMETER Experiment Name: At_Roots__P Parameter: Age (day) Value: 7 vs. 21
  misc_feature: MA Experiment 20000185 PARAMETER Experiment Name: At_Roots__P Parameter: Organism Value: A. thaliana
  misc_feature: MA Experiment 20000185 PARAMETER Experiment Name: At_Roots__P Parameter: Tissue Value: Roots vs. Whole Plant
  misc_feature: MA Experiment ID: 20000213 Result: Up-regulated in Transcription
  misc_feature: MA Experiment 20000213 PARAMETER Experiment Name: At_4deg_Cold_P Parameter: Timepoint (hr) Value: 2
  misc_feature: MA Experiment ID: 20000268 Result: Up-regulated in Transcription
  misc_feature: MA Experiment 20000268 PARAMETER Experiment Name: At_100mM_NaCl__P Parameter: Age (day) Value: 14
  misc_feature: MA Experiment 20000268 PARAMETER Experiment Name: At_100mM_NaCl__P Parameter: Organism Value: A. thaliana
  misc_feature: MA Experiment 20000268 PARAMETER Experiment Name: At_100mM_NaCl__P Parameter: Plant Line Value: WS
  misc_feature: MA Experiment 20000268 PARAMETER Experiment Name: At_100mM_NaCl__P Parameter: Timepoint (hr) Value: 6
  misc_feature: MA Experiment 20000268 PARAMETER Experiment Name: At_100mM_NaCl__P Parameter: Tissue Value: Whole Plant
  misc_feature: MA Experiment 20000268 PARAMETER Experiment Name: At_100mM_NaCl__P Parameter: Treatment Value: 100mM NaCl vs. No Treatment
  misc_feature: MA Experiment ID: 20000436 Result: Down-regulated in Transcription
  misc_feature: MA Experiment 20000436 PARAMETER Experiment Name: At_Drought_P Parameter: Age (day) Value: 7
  misc_feature: MA Experiment 20000436 PARAMETER Experiment Name: At_Drought_P Parameter: Organism Value: A. thaliana
  misc_feature: MA Experiment 20000436 PARAMETER Experiment Name: At_Drought_P Parameter: Plant Line Value: WS
  misc_feature: MA Experiment 20000436 PARAMETER Experiment Name: At_Drought_P Parameter: Timepoint (hr) Value: 12
  misc_feature: MA Experiment 20000436 PARAMETER Experiment Name: At_Drought_P Parameter: Tissue Value: Whole Plant
  misc_feature: MA Experiment 20000436 PARAMETER Experiment Name: At_Drought_P Parameter: Treatment Value: Drought vs. No Drought
  misc_feature: MA Experiment ID: 20000437 Result: Down-regulated in Transcription
  misc_feature: MA Experiment 20000437 PARAMETER Experiment Name: At_Drought_P Parameter: Age (day) Value: 8
  misc_feature: MA Experiment 20000437 PARAMETER Experiment Name: At_Drought_P Parameter: Organism Value: A. thaliana
  misc_feature: MA Experiment 20000437 PARAMETER Experiment Name: At_Drought_P Parameter: Plant Line Value: WS
  misc_feature: MA Experiment 20000437 PARAMETER Experiment Name: At_Drought_P Parameter: Timepoint (hr) Value: 24
  misc_feature: MA Experiment 20000437 PARAMETER Experiment Name: At_Drought_P Parameter: Tissue Value: Whole Plant
  misc_feature: MA Experiment 20000437 PARAMETER Experiment Name: At_Drought_P Parameter: Treatment Value: Drought vs. No Drought
  misc_feature: MA Experiment ID: 20000439 Result: Down-regulated in Transcription
  misc_feature: MA Experiment 20000439 PARAMETER Experiment Name: At_Roots__P Parameter: Age (day) Value: 14 vs. 21
  misc_feature: MA Experiment 20000439 PARAMETER Experiment Name: At_Roots__P Parameter: Organism Value: A. thaliana
  misc_feature: MA Experiment 20000439 PARAMETER Experiment Name: At_Roots__P Parameter: Tissue Value: Roots vs. Whole Plant
  misc_feature: MA Experiment ID: 20000453 Result: Down-regulated in Transcription
  misc_feature: MA Experiment 20000453 PARAMETER Experiment Name: At_100uM_ABA_P Parameter: Age (day) Value: 15
  misc_feature: MA Experiment 20000453 PARAMETER Experiment Name: At_100uM_ABA_P Parameter: Organism Value: A. thaliana
  misc_feature: MA Experiment 20000453 PARAMETER Experiment Name: At_100uM_ABA_P Parameter: Plant Line Value: WS
  misc_feature: MA Experiment 20000453 PARAMETER Experiment Name: At_100uM_ABA_P Parameter: Timepoint (hr) Value: 24
  misc_feature: MA Experiment 20000453 PARAMETER Experiment Name: At_100uM_ABA_P Parameter: Tissue Value: Aerial
  misc_feature: MA Experiment 20000453 PARAMETER Experiment Name: At_100uM_ABA_P Parameter: Treatment Value: 100uM ABA vs. No Treatment
  misc_feature: MA Experiment ID: 20000456 Result: Up-regulated in Transcription
  misc_feature: MA Experiment 20000456 PARAMETER Experiment Name: At_100uM_BA_P Parameter: Age (day) Value: 14
  misc_feature: MA Experiment 20000456 PARAMETER Experiment Name: At_100uM_BA_P Parameter: Organism Value: A. thaliana
  misc_feature: MA Experiment 20000456 PARAMETER Experiment Name: At_100uM_BA_P Parameter: Plant Line Value: WS
  misc_feature: MA Experiment 20000456 PARAMETER Experiment Name: At_100uM_BA_P Parameter: Timepoint (hr) Value: 6
  misc_feature: MA Experiment 20000456 PARAMETER Experiment Name: At_100uM_BA_P Parameter: Tissue Value: Aerial
  misc_feature: MA Experiment 20000456 PARAMETER Experiment Name: At_100uM_BA_P Parameter: Treatment Value: 100uM BA vs. No Treatment
  misc_feature: MA Experiment ID: 20000496 Result: Up-regulated in Transcription
  misc_feature: MA Experiment 20000496 PARAMETER Experiment Name: At_Guard_Cells_P Parameter: Harvest Date Value: 7/19/2002
  misc_feature: MA Experiment 20000496 PARAMETER Experiment Name: At_Guard_Cells_P Parameter: Organism Value: Canola
  misc_feature: MA Experiment 20000496 PARAMETER Experiment Name: At_Guard_Cells_P Parameter: Tissue Value: Guard Cells vs. Leaves
  misc_feature: MA Experiment ID: 20000794 Result: Down-regulated in Transcription
  misc_feature: MA Experiment 20000794 PARAMETER Experiment Name: At_Petals_P Parameter: Age (day) Value: 23-25 days
  misc_feature: MA Experiment 20000794 PARAMETER Experiment Name: At_Petals_P Parameter: Plant Line Value: WS
  misc_feature: MA Experiment 20000794 PARAMETER Experiment Name: At_Petals_P Parameter: Tissue Value: Petals vs. Whole plant
  misc_feature: MA Experiment ID: 20001247 Result: Down-regulated in Transcription
  misc_feature: MA Experiment 20001247 PARAMETER Experiment Name: At_Far-red-induction_P Parameter: Age (day) Value: 7
  misc_feature: MA Experiment 20001247 PARAMETER Experiment Name: At_Far-red-induction_P Parameter: Light Value: Far-red vs. White
  misc_feature: MA Experiment 20001247 PARAMETER Experiment Name: At_Far-red-induction_P Parameter: Organism Value: A. thaliana
  misc_feature: MA Experiment 20001247 PARAMETER Experiment Name: At_Far-red-induction_P Parameter: Plant Line Value: Columbia
  misc_feature: MA Experiment 20001247 PARAMETER Experiment Name: At_Far-red-induction_P Parameter: Timepoint (hr) Value: 1
  misc_feature: MA Experiment 20001247 PARAMETER Experiment Name: At_Far-red-induction_P Parameter: Tissue Value: Whole Plant
  misc_feature: MA Experiment ID: 20001248 Result: Down-regulated in Transcription
  misc_feature: MA Experiment 20001248 PARAMETER Experiment Name: At_Far-red-induction_P Parameter: Age (day) Value: 7
  misc_feature: MA Experiment 20001248 PARAMETER Experiment Name: At_Far-red-induction_P Parameter: Light Value: Far-red vs. White
  misc_feature: MA Experiment 20001248 PARAMETER Experiment Name: At_Far-red-induction_P Parameter: Organism Value: A. thaliana
  misc_feature: MA Experiment 20001248 PARAMETER Experiment Name: At_Far-red-induction_P Parameter: Plant Line Value: Columbia
  misc_feature: MA Experiment 20001248 PARAMETER Experiment Name: At_Far-red-induction_P Parameter: Timepoint (hr) Value: 4
  misc_feature: MA Experiment 20001248 PARAMETER Experiment Name: At_Far-red-induction_P Parameter: Tissue Value: Whole Plant
  misc_feature: MA Experiment ID: 20001450 Result: Down-regulated in Transcription
  misc_feature: MA Experiment 20001450 PARAMETER Experiment Name: At_Far-red-induction_P Parameter: Age (day) Value: 7
  misc_feature: MA Experiment 20001450 PARAMETER Experiment Name: At_Far-red-induction_P Parameter: Light Value: Far-red vs. White
  misc_feature: MA Experiment 20001450 PARAMETER Experiment Name: At_Far-red-induction_P Parameter: Organism Value: A. thaliana
  misc_feature: MA Experiment 20001450 PARAMETER Experiment Name: At_Far-red-induction_P Parameter: Plant Line Value: Columbia
  misc_feature: MA Experiment 20001450 PARAMETER Experiment Name: At_Far-red-induction_P Parameter: Timepoint (hr) Value: 8
  misc_feature: MA Experiment 20001450 PARAMETER Experiment Name: At_Far-red-induction_P Parameter: Tissue Value: Whole Plant
  misc_feature: MA Experiment ID: 20001451 Result: Down-regulated in Transcription
  misc_feature: MA Experiment 20001451 PARAMETER Experiment Name: At_Far-red-induction_P Parameter: Age (day) Value: 7
  misc_feature: MA Experiment 20001451 PARAMETER Experiment Name: At_Far-red-induction_P Parameter: Light Value: Far-red vs. White
  misc_feature: MA Experiment 20001451 PARAMETER Experiment Name: At_Far-red-induction_P Parameter: Organism Value: A. thaliana
  misc_feature: MA Experiment 20001451 PARAMETER Experiment Name: At_Far-red-induction_P Parameter: Plant Line Value: Columbia
  misc_feature: MA Experiment 20001451 PARAMETER Experiment Name: At_Far-red-induction_P Parameter: Timepoint (hr) Value: 24
  misc_feature: MA Experiment 20001451 PARAMETER Experiment Name: At_Far-red-induction_P Parameter: Tissue Value: Whole Plant
  misc_feature: MA Experiment ID: 20001458 Result: Up-regulated in Transcription
  misc_feature: MA Experiment 20001458 PARAMETER Experiment Name: At_50mM_NH4NO3_L-to-H_P Parameter: Age (day) Value: Undefined
  misc_feature: MA Experiment 20001458 PARAMETER Experiment Name: At_50mM_NH4NO3_L-to-H_P Parameter: Organism Value: Undefined
  misc_feature: MA Experiment 20001458 PARAMETER Experiment Name: At_50mM_NH4NO3_L-to-H_P Parameter: Plant Line Value: Undefined
  misc_feature: MA Experiment 20001458 PARAMETER Experiment Name: At_50mM_NH4NO3_L-to-H_P Parameter: Timepoint (hr) Value: 2
  misc_feature: MA Experiment 20001458 PARAMETER Experiment Name: At_50mM_NH4NO3_L-to-H_P Parameter: Tissue Value: Siliques
  misc_feature: MA Experiment 20001458 PARAMETER Experiment Name: At_50mM_NH4NO3_L-to-H_P Parameter: Treatment Value: 50mM NH4NO3 vs. 100mM Manitol
  misc_feature: MA Experiment ID: 20001554 Result: Down-regulated in Transcription
  misc_feature: MA Experiment 20001554 PARAMETER Experiment Name: At_Drought_Soil_Dry_P Parameter: Age (day) Value: 21
  misc_feature: MA Experiment 20001554 PARAMETER Experiment Name: At_Drought_Soil_Dry_P Parameter: Organism Value: A. thaliana
  misc_feature: MA Experiment 20001554 PARAMETER Experiment Name: At_Drought_Soil_Dry_P Parameter: Plant Line Value: WS
  misc_feature: MA Experiment 20001554 PARAMETER Experiment Name: At_Drought_Soil_Dry_P Parameter: Post Timepoint (hr) Value: None
  misc_feature: MA Experiment 20001554 PARAMETER Experiment Name: At_Drought_Soil_Dry_P Parameter: Post-Treatment Value: None
  misc_feature: MA Experiment 20001554 PARAMETER Experiment Name: At_Drought_Soil_Dry_P Parameter: Timepoint (day) Value: 7
  misc_feature: MA Experiment 20001554 PARAMETER Experiment Name: At_Drought_Soil_Dry_P Parameter: Treatment Value: Drought vs. No Drought
  misc_feature: MA Experiment ID: 20001555 Result: Down-regulated in Transcription
  misc_feature: MA Experiment 20001555 PARAMETER Experiment Name: At_Drought_Soil_Dry_P Parameter: Age (day) Value: 24
  misc_feature: MA Experiment 20001555 PARAMETER Experiment Name: At_Drought_Soil_Dry_P Parameter: Organism Value: A. thaliana
  misc_feature: MA Experiment 20001555 PARAMETER Experiment Name: At_Drought_Soil_Dry_P Parameter: Plant Line Value: WS
  misc_feature: MA Experiment 20001555 PARAMETER Experiment Name: At_Drought_Soil_Dry_P Parameter: Post Timepoint (hr) Value: None
  misc_feature: MA Experiment 20001555 PARAMETER Experiment Name: At_Drought_Soil_Dry_P Parameter: Post-Treatment Value: None
  misc_feature: MA Experiment 20001555 PARAMETER Experiment Name: At_Drought_Soil_Dry_P Parameter: Timepoint (day) Value: 10
  misc_feature: MA Experiment 20001555 PARAMETER Experiment Name: At_Drought_Soil_Dry_P Parameter: Treatment Value: Drought vs. No Drought
  misc_feature: MA Experiment ID: 20001556 Result: Down-regulated in Transcription
  misc_feature: MA Experiment 20001556 PARAMETER Experiment Name: At_Drought_Soil_Dry_P Parameter: Age (day) Value: 26
  misc_feature: MA Experiment 20001556 PARAMETER Experiment Name: At_Drought_Soil_Dry_P Parameter: Organism Value: A. thaliana
  misc_feature: MA Experiment 20001556 PARAMETER Experiment Name: At_Drought_Soil_Dry_P Parameter: Plant Line Value: WS
  misc_feature: MA Experiment 20001556 PARAMETER Experiment Name: At_Drought_Soil_Dry_P Parameter: Post Timepoint (hr) Value: None
  misc_feature: MA Experiment 20001556 PARAMETER Experiment Name: At_Drought_Soil_Dry_P Parameter: Post-Treatment Value: None
  misc_feature: MA Experiment 20001556 PARAMETER Experiment Name: At_Drought_Soil_Dry_P Parameter: Timepoint (day) Value: 12
  misc_feature: MA Experiment 20001556 PARAMETER Experiment Name: At_Drought_Soil_Dry_P Parameter: Treatment Value: Drought vs. No Drought
  misc_feature: MA Experiment ID: 20001557 Result: Up-regulated in Transcription
  misc_feature: MA Experiment 20001557 PARAMETER Experiment Name: At_Drought_Soil_Dry_P Parameter: Age (day) Value: 27
  misc_feature: MA Experiment 20001557 PARAMETER Experiment Name: At_Drought_Soil_Dry_P Parameter: Organism Value: A. thaliana
  misc_feature: MA Experiment 20001557 PARAMETER Experiment Name: At_Drought_Soil_Dry_P Parameter: Plant Line Value: WS
  misc_feature: MA Experiment 20001557 PARAMETER Experiment Name: At_Drought_Soil_Dry_P Parameter: Post Timepoint (hr) Value: 3
  misc_feature: MA Experiment 20001557 PARAMETER Experiment Name: At_Drought_Soil_Dry_P Parameter: Post-Treatment Value: Re-Water vs. No Drought
  misc_feature: MA Experiment 20001557 PARAMETER Experiment Name: At_Drought_Soil_Dry_P Parameter: Timepoint (day) Value: 13
  misc_feature: MA Experiment 20001557 PARAMETER Experiment Name: At_Drought_Soil_Dry_P Parameter: Treatment Value: Drought vs. No Drought
  misc_feature: MA Experiment ID: 20001558 Result: Up-regulated in Transcription
  misc_feature: MA Experiment 20001558 PARAMETER Experiment Name: At_Drought_Soil_Dry_P Parameter: Age (day) Value: 27
  misc_feature: MA Experiment 20001558 PARAMETER Experiment Name: At_Drought_Soil_Dry_P Parameter: Organism Value: A. thaliana
  misc_feature: MA Experiment 20001558 PARAMETER Experiment Name: At_Drought_Soil_Dry_P Parameter: Plant Line Value: WS
  misc_feature: MA Experiment 20001558 PARAMETER Experiment Name: At_Drought_Soil_Dry_P Parameter: Post Timepoint (hr) Value: 6
  misc_feature: MA Experiment 20001558 PARAMETER Experiment Name: At_Drought_Soil_Dry_P Parameter: Post-Treatment Value: Re-Water vs. No Drought
  misc_feature: MA Experiment 20001558 PARAMETER Experiment Name: At_Drought_Soil_Dry_P Parameter: Timepoint (day) Value: 13
  misc_feature: MA Experiment 20001558 PARAMETER Experiment Name: At_Drought_Soil_Dry_P Parameter: Treatment Value: Drought vs. No Drought
  misc_feature: MA Experiment ID: 20001559 Result: Down-regulated in Transcription
  misc_feature: MA Experiment 20001559 PARAMETER Experiment Name: At_Drought_Soil_Dry_P Parameter: Age (day) Value: 28
  misc_feature: MA Experiment 20001559 PARAMETER Experiment Name: At_Drought_Soil_Dry_P Parameter: Organism Value: A. thaliana
  misc_feature: MA Experiment 20001559 PARAMETER Experiment Name: At_Drought_Soil_Dry_P Parameter: Plant Line Value: WS
  misc_feature: MA Experiment 20001559 PARAMETER Experiment Name: At_Drought_Soil_Dry_P Parameter: Post Timepoint (hr) Value: 29
  misc_feature: MA Experiment 20001559 PARAMETER Experiment Name: At_Drought_Soil_Dry_P Parameter: Post-Treatment Value: Re-Water vs. No Drought
  misc_feature: MA Experiment 20001559 PARAMETER Experiment Name: At_Drought_Soil_Dry_P Parameter: Timepoint (day) Value: 14
  misc_feature: MA Experiment 20001559 PARAMETER Experiment Name: At_Drought_Soil_Dry_P Parameter: Treatment Value: Drought vs. No Drought
  misc_feature: MA Experiment ID: 20001560 Result: Up-regulated in Transcription
  misc_feature: MA Experiment 20001560 PARAMETER Experiment Name: At_Drought_Soil_Dry_P Parameter: Age (day) Value: 28
  misc_feature: MA Experiment 20001560 PARAMETER Experiment Name: At_Drought_Soil_Dry_P Parameter: Organism Value: A. thaliana
  misc_feature: MA Experiment 20001560 PARAMETER Experiment Name: At_Drought_Soil_Dry_P Parameter: Plant Line Value: WS
  misc_feature: MA Experiment 20001560 PARAMETER Experiment Name: At_Drought_Soil_Dry_P Parameter: Post Timepoint (hr) Value: None
  misc_feature: MA Experiment 20001560 PARAMETER Experiment Name: At_Drought_Soil_Dry_P Parameter: Post-Treatment Value: None
  misc_feature: MA Experiment 20001560 PARAMETER Experiment Name: At_Drought_Soil_Dry_P Parameter: Timepoint (day) Value: 14
  misc_feature: MA Experiment 20001560 PARAMETER Experiment Name: At_Drought_Soil_Dry_P Parameter: Treatment Value: Drought vs. No Drought
  misc_feature: MA Experiment ID: 20001757 Result: Up-regulated in Transcription
  misc_feature: MA Experiment 20001757 PARAMETER Experiment Name: At_50mM_NH4NO3_L-to-H_P Parameter: Timepoint (hr) Value: 6
  misc_feature: MA Experiment 20001757 PARAMETER Experiment Name: At_50mM_NH4NO3_L-to-H_P Parameter: Tissue Value: Leaf
  misc_feature: MA Experiment 20001757 PARAMETER Experiment Name: At_50mM_NH4NO3_L-to-H_P Parameter: Treatment Value: 50mM NH4NO3 vs 100mM Mannitol
  misc_feature: MA Experiment ID: 20001906 Result: Down-regulated in Transcription
  misc_feature: MA Experiment 20001906 PARAMETER Experiment Name: At_Drought_Reproduction_P Parameter: Age (day) Value: 35
  misc_feature: MA Experiment 20001906 PARAMETER Experiment Name: At_Drought_Reproduction_P Parameter: Organism Value: A. thaliana
  misc_feature: MA Experiment 20001906 PARAMETER Experiment Name: At_Drought_Reproduction_P Parameter: Plant Line Value: WS
  misc_feature: MA Experiment 20001906 PARAMETER Experiment Name: At_Drought_Reproduction_P Parameter: Timepoint (day) Value: 5
  misc_feature: MA Experiment 20001906 PARAMETER Experiment Name: At_Drought_Reproduction_P Parameter: Tissue Value: Siliques
  misc_feature: MA Experiment 20001906 PARAMETER Experiment Name: At_Drought_Reproduction_P Parameter: Treatment Value: Drought vs. No Drought
  misc_feature: MA Experiment ID: 20001908 Result: Down-regulated in Transcription
  misc_feature: MA Experiment 20001908 PARAMETER Experiment Name: At_Drought_Reproduction_P Parameter: Age (day) Value: 40
  misc_feature: MA Experiment 20001908 PARAMETER Experiment Name: At_Drought_Reproduction_P Parameter: Organism Value: A. thaliana
  misc_feature: MA Experiment 20001908 PARAMETER Experiment Name: At_Drought_Reproduction_P Parameter: Plant Line Value: WS
  misc_feature: MA Experiment 20001908 PARAMETER Experiment Name: At_Drought_Reproduction_P Parameter: Timepoint (day) Value: 10
  misc_feature: MA Experiment 20001908 PARAMETER Experiment Name: At_Drought_Reproduction_P Parameter: Tissue Value: Siliques
  misc_feature: MA Experiment 20001908 PARAMETER Experiment Name: At_Drought_Reproduction_P Parameter: Treatment Value: Drought vs. No Drought
  misc_feature: MA Experiment ID: 20001911 Result: Down-regulated in Transcription
  misc_feature: MA Experiment 20001911 PARAMETER Experiment Name: At_Drought_Reproduction_P Parameter: Age (day) Value: 40
  misc_feature: MA Experiment 20001911 PARAMETER Experiment Name: At_Drought_Reproduction_P Parameter: Organism Value: A. thaliana
  misc_feature: MA Experiment 20001911 PARAMETER Experiment Name: At_Drought_Reproduction_P Parameter: Plant Line Value: WS
  misc_feature: MA Experiment 20001911 PARAMETER Experiment Name: At_Drought_Reproduction_P Parameter: Timepoint (day) Value: 10
  misc_feature: MA Experiment 20001911 PARAMETER Experiment Name: At_Drought_Reproduction_P Parameter: Tissue Value: Flowers
  misc_feature: MA Experiment 20001911 PARAMETER Experiment Name: At_Drought_Reproduction_P Parameter: Treatment Value: Drought vs. No Drought
ataagtaattgattttatatcacccatgtgcaggttgttaacacaagacgtaaacatgggtcatcttgggttcttagttatgattatggtaggagtcatggcttcttctgtgagcggctacggtggcggttggatcaacgctcacgccactttttacggtggtggtgatgcttccggcacaatgggtggtgcttgtggatatggtaatctatatagccaaggctacgggacgagcacggcggctctaagcacagctctcttcaacaatggacttagctgtggttcttgctttgagataagatgtgaaaacgatggtaaatggtgtttacctggctcaatcgttgtaaccgctacaaacttctgcccgccaaataacgcgttagcgaacaataatggcggttggtgtaatcctcctcttgaacactttgaccttgctcagcctgtttttcaacgcattgctcagtacagagctggaatcgtccctgtttcctacagaagggttccttgcaggagaagaggaggaataagattcacgataaacggccactcatacttcaaccttgtgctgatcacaaacgtcggtggtgccggagacgttcactcggcggcgatcaagggttcaagaacagtgtggcaagctatgtcaaggaactgggggcaaaattggcaaagcaactcttacctcaacggtcaagcactttcctttaaggtcaccaccagcgacggccgcacagttgtctccttcaacgccgctcctgccggctggtcttatggccagacttttgccggtggacagttccgttaaaaagggcaagttggttaatctctcttccatttatctaaagtaaactcatttgtgtggttatattggtctcttgaaaaaactcggttattgagagagtgatgcgtcgagggctcggttttgcagaaggccttgatgacgtctaatctttttttggacctctttatttttctttcttgaaactagtttttgttaagaaagaaaaaacaagttatagtagttaatgtattactgatgcagaggtggagttttaactaccacccgctagtagtagttatgagttttttattttaaggtgtgagagagagatggattatcaagatttgtcaattttattatgtttgtttgtaataatacaattctttactccagttaatgaaaattgggggattgatc

SEQ ID NO: 24223 - protein, 259 aa, Arabidopsis thaliana
  peptide (1)..(259): Ceres Seq. ID no. 12728803
  misc_feature (167)..(244): Pfam Name: Pollen allergen Pfam Description: Pollen allergen
  misc_feature (19)..(259): Homolog of NCBI NO: 29421118 NR Description: expansin [Vitis labrusca x Vitis vinifera]
  misc_feature (15)..(259): Homolog of NCBI NO: 29467507 NR Description: expansin [Pyrus communis]
  misc_feature (26)..(259): Homolog of NCBI NO: 11281293 NR Description: expansin EXP1 [imported] - Arabidopsis thaliana
  misc_feature (19)..(259): Homolog of NCBI NO: 38046730 NR Description: alpha-expansin 3 [Populus tremula x Populus
  misc_feature (11)..(259): Homolog of NCBI NO: 21615407 NR Description: alpha-expansin 3 [Cicer arietinum]
  misc_feature (11)..(259): Homolog of NCBI NO: 30697882 NR Description: expansin, putative (EXP1) [Arabidopsis thaliana]
  misc_feature (15)..(259): Homolog of NCBI NO: 29467505 NR Description: expansin [Pyrus communis]
  misc_feature (11)..(259): Homolog of NCBI NO: 15222356 NR Description: expansin (At-EXP1)
  misc_feature (11)..(259): Homolog of NCBI NO: 21553381 NR Description: alpha-expansin 10 precursor (At-EXP10) (AtEx10)
  misc_feature (11)..(259): Homolog of NCBI NO: 15223347 NR Description: expansin, putative
MCRLLTQDVNMGHLGFLVMIMVGVMASSVSGYGGGWINAHATFYGGGDASGTMGGACGYGNLYSQGYGTSTAALSTALFNNGLSCGSCFEIRCENDGKWCLPGSIVVTATNFCPPNNALANNNGGWCNPPLEHFDLAQPVFQRIAQYRAGIVPVSYRRVPCRRRGGIRFTINGHSYFNLVLITNVGGAGDVHSAAIKGSRTVWQAMSRNWGQNWQSNSYLNGQALSFKVTTSDGRTVVSFNAAPAGWSYGQTFAGGQFR

SEQ ID NO: 24224 - protein, 249 aa, Arabidopsis thaliana
  peptide (1)..(249): Ceres Seq. ID no. 12728804
  misc_feature (157)..(234): Pfam Name: Pollen allergen Pfam Description: Pollen allergen
  misc_feature (9)..(249): Homolog of NCBI NO: 29421118 NR Description: expansin [Vitis labrusca x Vitis vinifera]
  misc_feature (5)..(249): Homolog of NCBI NO: 29467507 NR Description: expansin [Pyrus communis]
  misc_feature (16)..(249): Homolog of NCBI NO: 11281293 NR Description: expansin EXP1 [imported] - Arabidopsis thaliana
  misc_feature (9)..(249): Homolog of NCBI NO: 38046730 NR Description: alpha-expansin 3 [Populus tremula x Populus
  misc_feature (1)..(249): Homolog of NCBI NO: 21615407 NR Description: alpha-expansin 3 [Cicer arietinum]
  misc_feature (1)..(249): Homolog of NCBI NO: 30697882 NR Description: expansin, putative (EXP1) [Arabidopsis thaliana]
  misc_feature (5)..(249): Homolog of NCBI NO: 29467505 NR Description: expansin [Pyrus communis]
  misc_feature (1)..(249): Homolog of NCBI NO: 15222356 NR Description: expansin (At-EXP1)
  misc_feature (1)..(249): Homolog of NCBI NO: 21553381 NR Description: alpha-expansin 10 precursor (At-EXP10) (AtEx10)
  misc_feature (1)..(249): Homolog of NCBI NO: 15223347 NR Description: expansin, putative
MGHLGFLVMIMVGVMASSVSGYGGGWINAHATFYGGGDASGTMGGACGYGNLYSQGYGTSTAALSTALFNNGLSCGSCFEIRCENDGKWCLPGSIVVTATNFCPPNNALANNNGGWCNPPLEHFDLAQPVFQRIAQYRAGIVPVSYRRVPCRRRGGIRFTINGHSYFNLVLITNVGGAGDVHSAAIKGSRTVWQAMSRNWGQNWQSNSYLNGQALSFKVTTSDGRTVVSFNAAPAGWSYGQTFAGGQFR

SEQ ID NO: 24225 - protein, 241 aa, Arabidopsis thaliana
  peptide (1)..(241): Ceres Seq. ID no. 12728805
  misc_feature (149)..(226): Pfam Name: Pollen allergen Pfam Description: Pollen allergen
  misc_feature (1)..(241): Homolog of NCBI NO: 29421118 NR Description: expansin [Vitis labrusca x Vitis vinifera]
  misc_feature (1)..(241): Homolog of NCBI NO: 29467507 NR Description: expansin [Pyrus communis]
  misc_feature (8)..(241): Homolog of NCBI NO: 11281293 NR Description: expansin EXP1 [imported] - Arabidopsis thaliana
  misc_feature (1)..(241): Homolog of NCBI NO: 38046730 NR Description: alpha-expansin 3 [Populus tremula x Populus
  misc_feature (1)..(241): Homolog of NCBI NO: 21615407 NR Description: alpha-expansin 3 [Cicer arietinum]
  misc_feature (1)..(241): Homolog of NCBI NO: 30697882 NR Description: expansin, putative (EXP1) [Arabidopsis thaliana]
  misc_feature (1)..(241): Homolog of NCBI NO: 29467505 NR Description: expansin [Pyrus communis]
  misc_feature (1)..(241): Homolog of NCBI NO: 15222356 NR Description: expansin (At-EXP1)
  misc_feature (1)..(241): Homolog of NCBI NO: 21553381 NR Description: alpha-expansin 10 precursor (At-EXP10) (AtEx10)
  misc_feature (1)..(241): Homolog of NCBI NO: 15223347 NR Description: expansin, putative
MIMVGVMASSVSGYGGGWINAHATFYGGGDASGTMGGACGYGNLYSQGYGTSTAALSTALFNNGLSCGSCFEIRCENDGKWCLPGSIVVTATNFCPPNNALANNNGGWCNPPLEHFDLAQPVFQRIAQYRAGIVPVSYRRVPCRRRGGIRFTINGHSYFNLVLITNVGGAGDVHSAAIKGSRTVWQAMSRNWGQNWQSNSYLNGQALSFKVTTSDGRTVVSFNAAPAGWSYGQTFAGGQFR

SEQ ID NO: 24226 - DNA, 1161 bp, Arabidopsis thaliana
  misc_feature (1)..(1161): Ceres Seq. ID no. 13491884
  misc_feature: MA Experiment ID: 108501 Result: Up-regulated in Transcription
  misc_feature: MA Experiment 108501 PARAMETER Experiment Name: At_ap2_floral_buds_cDNA_P Parameter: Plant Line Value: ap2 (Ler.)
  misc_feature: MA Experiment 108501 PARAMETER Experiment Name: At_ap2_floral_buds_cDNA_P Parameter: Tissue Value: Closed Flower
  misc_feature: MA Experiment ID: 108576 Result: Up-regulated in Transcription
  misc_feature: MA Experiment 108576 PARAMETER Experiment Name: At_42deg_Heat_cDNA_P Parameter: Temperature (deg C) Value: 42 vs. 22
  misc_feature: MA Experiment 108576 PARAMETER Experiment Name: At_42deg_Heat_cDNA_P Parameter: Timepoint (hr) Value: 1
  misc_feature: MA Experiment 108576 PARAMETER Experiment Name: At_42deg_Heat_cDNA_P Parameter: Tissue Value: Aerial
  misc_feature: MA Experiment ID: 20000069 Result: Down-regulated in Transcription
  misc_feature: MA Experiment 20000069 PARAMETER Experiment Name: At_100uM_ABA_Mutants_cDNA_P Parameter: Plant Line Value: CS23
  misc_feature: MA Experiment 20000069 PARAMETER Experiment Name: At_100uM_ABA_Mutants_cDNA_P Parameter: Timepoint (hr) Value: 6
  misc_feature: MA Experiment 20000069 PARAMETER Experiment Name: At_100uM_ABA_Mutants_cDNA_P Parameter: Tissue Value: Aerial
  misc_feature: MA Experiment 20000069 PARAMETER Experiment Name: At_100uM_ABA_Mutants_cDNA_P Parameter: Treatment Value: 100uM ABA vs. No Treatment
  misc_feature: MA Experiment ID: 20000071 Result: Down-regulated in Transcription
  misc_feature: MA Experiment 20000071 PARAMETER Experiment Name: At_100uM_ABA_Mutants_cDNA_P Parameter: Plant Line Value: CS8104
  misc_feature: MA Experiment 20000071 PARAMETER Experiment Name: At_100uM_ABA_Mutants_cDNA_P Parameter: Timepoint (hr) Value: 6
  misc_feature: MA Experiment 20000071 PARAMETER Experiment Name: At_100uM_ABA_Mutants_cDNA_P Parameter: Tissue Value: Aerial
  misc_feature: MA Experiment 20000071 PARAMETER Experiment Name: At_100uM_ABA_Mutants_cDNA_P Parameter: Treatment Value: 100uM ABA vs. No Treatment
  misc_feature: MA Experiment ID: 20000111 Result: Up-regulated in Transcription
  misc_feature: MA Experiment 20000111 PARAMETER Experiment Name: At_42deg_Heat_cDNA_P Parameter: Temperature (deg C) Value: 42 vs. 22
  misc_feature: MA Experiment 20000111 PARAMETER Experiment Name: At_42deg_Heat_cDNA_P Parameter: Timepoint (hr) Value: 6
  misc_feature: MA Experiment 20000111 PARAMETER Experiment Name: At_42deg_Heat_cDNA_P Parameter: Tissue Value: Aerial
  misc_feature: MA Experiment ID: 20000113 Result: Up-regulated in Transcription
  misc_feature: MA Experiment 20000113 PARAMETER Experiment Name: At_42deg_Heat_cDNA_P Parameter: Temperature (deg C) Value: 42 vs. 22
  misc_feature: MA Experiment 20000113 PARAMETER Experiment Name: At_42deg_Heat_cDNA_P Parameter: Timepoint (hr) Value: 8
  misc_feature: MA Experiment 20000113 PARAMETER Experiment Name: At_42deg_Heat_cDNA_P Parameter: Tissue Value: Aerial
  misc_feature: MA Experiment ID: 20000234 Result: Up-regulated in Transcription
  misc_feature: MA Experiment 20000234 PARAMETER Experiment Name: At_Siliques_P Parameter: Age (day) Value: 21
  misc_feature: MA Experiment 20000234 PARAMETER Experiment Name: At_Siliques_P Parameter: Organism Value: A. thaliana
  misc_feature: MA Experiment 20000234 PARAMETER Experiment Name: At_Siliques_P Parameter: Plant Line Value: WS
  misc_feature: MA Experiment 20000234 PARAMETER Experiment Name: At_Siliques_P Parameter: Tissue Value: Less Than 5mm Siliques vs. Whole Plant
  misc_feature: MA Experiment ID: 20000235 Result: Up-regulated in Transcription
  misc_feature: MA Experiment 20000235 PARAMETER Experiment Name: At_Siliques_P Parameter: Age (day) Value: 21
  misc_feature: MA Experiment 20000235 PARAMETER Experiment Name: At_Siliques_P Parameter: Organism Value: A. thaliana
  misc_feature: MA Experiment 20000235 PARAMETER Experiment Name: At_Siliques_P Parameter: Plant Line Value: WS
  misc_feature: MA Experiment 20000235 PARAMETER Experiment Name: At_Siliques_P Parameter: Tissue Value: 5-10mm Siliques vs. Whole Plant
  misc_feature: MA Experiment ID: 20000264 Result: Up-regulated in Transcription
  misc_feature: MA Experiment 20000264 PARAMETER Experiment Name: At_Open_Flower_P Parameter: Age (day) Value: 21
  misc_feature: MA Experiment 20000264 PARAMETER Experiment Name: At_Open_Flower_P Parameter: Plant Line Value: WS
  misc_feature: MA Experiment 20000264 PARAMETER Experiment Name: At_Open_Flower_P Parameter: Tissue Value: Open Flower vs. Whole Plant
  misc_feature: MA Experiment ID: 20000286 Result: Up-regulated in Transcription
  misc_feature: MA Experiment 20000286 PARAMETER Experiment Name: At_Open_Flower_P Parameter: Age (day) Value: 21
  misc_feature: MA Experiment 20000286 PARAMETER Experiment Name: At_Open_Flower_P Parameter: Plant Line Value: WS
  misc_feature: MA Experiment 20000286 PARAMETER Experiment Name: At_Open_Flower_P Parameter: Tissue Value: Half Open vs. Whole Plant
  misc_feature: MA Experiment ID: 20000437 Result: Down-regulated in Transcription
  misc_feature: MA Experiment 20000437 PARAMETER Experiment Name: At_Drought_P Parameter: Age (day) Value: 8
  misc_feature: MA Experiment 20000437 PARAMETER Experiment Name: At_Drought_P Parameter: Organism Value: A. thaliana
  misc_feature: MA Experiment 20000437 PARAMETER Experiment Name: At_Drought_P Parameter: Plant Line Value: WS
  misc_feature: MA Experiment 20000437 PARAMETER Experiment Name: At_Drought_P Parameter: Timepoint (hr) Value: 24
  misc_feature: MA Experiment 20000437 PARAMETER Experiment Name: At_Drought_P Parameter: Tissue Value: Whole Plant
  misc_feature: MA Experiment 20000437 PARAMETER Experiment Name: At_Drought_P Parameter: Treatment Value: Drought vs. No Drought
  misc_feature: MA Experiment ID: 20000438 Result: Down-regulated in Transcription
  misc_feature: MA Experiment 20000438 PARAMETER Experiment Name: At_Shoots__P Parameter: Age (day) Value: 14
  misc_feature: MA Experiment 20000438 PARAMETER Experiment Name: At_Shoots__P Parameter: Tissue Value: Shoots vs. Whole Plant
  misc_feature: MA Experiment ID: 20000527 Result: Down-regulated in Transcription
  misc_feature: MA Experiment 20000527 PARAMETER Experiment Name: At_10percent_PEG_P Parameter: Age (day) Value: 20
  misc_feature: MA Experiment 20000527 PARAMETER Experiment Name: At_10percent_PEG_P Parameter: Organism Value: A. thaliana
  misc_feature: MA Experiment 20000527 PARAMETER Experiment Name: At_10percent_PEG_P Parameter: Plant Line Value: WS
  misc_feature: MA Experiment 20000527 PARAMETER Experiment Name: At_10percent_PEG_P Parameter: Timepoint (day) Value: 20
  misc_feature: MA Experiment 20000527 PARAMETER Experiment Name: At_10percent_PEG_P Parameter: Tissue Value: Whole Plant
  misc_feature: MA Experiment 20000527 PARAMETER Experiment Name: At_10percent_PEG_P Parameter: Treatment Value: 10percent PEG vs. No Treatment
  misc_feature: MA Experiment ID: 20001556 Result: Down-regulated in Transcription
  misc_feature: MA Experiment 20001556 PARAMETER Experiment Name: At_Drought_Soil_Dry_P Parameter: Age (day) Value: 26
  misc_feature: MA Experiment 20001556 PARAMETER Experiment Name: At_Drought_Soil_Dry_P Parameter: Organism Value: A. thaliana
  misc_feature: MA Experiment 20001556 PARAMETER Experiment Name: At_Drought_Soil_Dry_P Parameter: Plant Line Value: WS
  misc_feature: MA Experiment 20001556 PARAMETER Experiment Name: At_Drought_Soil_Dry_P Parameter: Post Timepoint (hr) Value: None
  misc_feature: MA Experiment 20001556 PARAMETER Experiment Name: At_Drought_Soil_Dry_P Parameter: Post-Treatment Value: None
  misc_feature: MA Experiment 20001556 PARAMETER Experiment Name: At_Drought_Soil_Dry_P Parameter: Timepoint (day) Value: 12
  misc_feature: MA Experiment 20001556 PARAMETER Experiment Name: At_Drought_Soil_Dry_P Parameter: Treatment Value: Drought vs. No Drought
  misc_feature: MA Experiment ID: 20001907 Result: Down-regulated in Transcription
  misc_feature: MA Experiment 20001907 PARAMETER Experiment Name: At_Drought_Reproduction_P Parameter: Age (day) Value: 37
  misc_feature: MA Experiment 20001907 PARAMETER Experiment Name: At_Drought_Reproduction_P Parameter: Organism Value: A. thaliana
  misc_feature: MA Experiment 20001907 PARAMETER Experiment Name: At_Drought_Reproduction_P Parameter: Plant Line Value: WS
  misc_feature: MA Experiment 20001907 PARAMETER Experiment Name: At_Drought_Reproduction_P Parameter: Timepoint (day) Value: 7
  misc_feature: MA Experiment 20001907 PARAMETER Experiment Name: At_Drought_Reproduction_P Parameter: Tissue Value: Siliques
  misc_feature: MA Experiment 20001907 PARAMETER Experiment Name: At_Drought_Reproduction_P Parameter: Treatment Value: Drought vs. No Drought
  misc_feature: MA Experiment ID: 20001911 Result: Down-regulated in Transcription
  misc_feature: MA Experiment 20001911 PARAMETER Experiment Name: At_Drought_Reproduction_P Parameter: Age (day) Value: 40
  misc_feature: MA Experiment 20001911 PARAMETER Experiment Name: At_Drought_Reproduction_P Parameter: Organism Value: A. thaliana
  misc_feature: MA Experiment 20001911 PARAMETER Experiment Name: At_Drought_Reproduction_P Parameter: Plant Line Value: WS
  misc_feature: MA Experiment 20001911 PARAMETER Experiment Name: At_Drought_Reproduction_P Parameter: Timepoint (day) Value: 10
  misc_feature: MA Experiment 20001911 PARAMETER Experiment Name: At_Drought_Reproduction_P Parameter: Tissue Value: Flowers
  misc_feature: MA Experiment 20001911 PARAMETER Experiment Name: At_Drought_Reproduction_P Parameter: Treatment Value: Drought vs. No Drought
atcataaacccaccgagacgatgtctctcatcatcgtcttcttcttcttctcactcttgctcacatccaatggacagttcttcgacgagagcaagaactatgaaggctcctccgatctcgttgaccttcaataccacttgggtccggtcatatcctcgccggtgacgagtctctacatcatttggtacggccgatggaacccaactcaccaatctataatccgagactttctctactctgtctctgcaccggcaccggctcagtacccgtcagtatccaactggtggaagacagtgaggctatacagagaccagacaggttccaacatcaccgacactcttgtcttatccggagagttccacgactcaacgtactctcatggatctcatctcactcgcttctctgttcagtctgtgatcagaactgccttgacttccaagttaccactaaacgctgtaaacggcttgtacttagtcttgacctcggatgatgtagagatgcaagagttctgcagagcgatttgcgggtttcattacttcactttcccaagcgttgtgggtgcaaccgtaccgtatgcttgggtgggcaacagtgagagacagtgtccagaaatgtgtgcgtacccatttgcacagcctaagccatttccggggagcgggtttgtagccagagagaagatgaaaccgccaaatggagaggtaggaatcgatgggatgatcagtgtgatagctcatgagctggcagaagtgtcgagtaacccgatgttaaacggatggtatggaggagaggacgcgacagcaccgacagagatagcggatttatgtttgggagtgtatgggtcaggaggaggaggaggctatatgggaagtgtgtataaggataggtggaggaatgtgtataatgtgaagggcgttaaaggaagaaagtatctaattcaatgggtttgggatcttaataggaacagatgctttggaccaaacgctatgaattagagactatcatgtttgttacctcttttcaccaaagccttgagcttgaagcttggggaaacctgtatatggtttatcttttccttgcctagtcgattctatgcatttgattgtttaagactacgaaatctaggtattactagctgtcaagattcacttgacaaagtttctg

SEQ ID NO: 24227 - protein, 329 aa, Arabidopsis thaliana
  peptide (1)..(329): Ceres Seq. ID no. 13491885
  misc_feature (42)..(326): Pfam Name: Phosphate-induced protein 1 conserved region Pfam Description: Phosphate-induced protein 1 conserved region
  misc_feature (36)..(322): Homolog of NCBI NO: 15219504 NR Description: phosphate-induced (phi-1) protein -related
  misc_feature (30)..(329): Homolog of NCBI NO: 11875173 NR Description: contains ESTs
  misc_feature (37)..(327): Homolog of NCBI NO: 34901824 NR Description: putative phi-1(phosphate-induced protein 1)
  misc_feature (22)..(329): Homolog of NCBI NO: 21592873 NR Description: unknown [Arabidopsis thaliana]
  misc_feature (22)..(329): Homolog of NCBI NO: 16604527 NR Description: AT5g51550/K17N15_10 [Arabidopsis thaliana]
  misc_feature (22)..(329): Homolog of NCBI NO: 15242118 NR Description: expressed protein [Arabidopsis thaliana]
  misc_feature (30)..(329): Homolog of NCBI NO: 21594010 NR Description: unknown [Arabidopsis thaliana]
  misc_feature (30)..(329): Homolog of NCBI NO: 18398352 NR Description: expressed protein [Arabidopsis thaliana]
  misc_feature (7)..(329): Homolog of NCBI NO: 18403760 NR Description: expressed protein [Arabidopsis thaliana]
  misc_feature (1)..(329): Homolog of NCBI NO: 25408357 NR Description: hypothetical protein At2g35150 [imported] -
HKPTETMSLIIVFFFFSLLLTSNGQFFDESKNYEGSSDLVDLQYHLGPVISSPVTSLYIIWYGRWNPTHQSIIRDFLYSVSAPAPAQYPSVSNWWKTVRLYRDQTGSNITDTLVLSGEFHDSTYSHGSHLTRFSVQSVIRTALTSKLPLNAVNGLYLVLTSDDVEMQEFCRAICGFHYFTFPSVVGATVPYAWVGNSERQCPEMCAYPFAQPKPFPGSGFVAREKMKPPNGEVGIDGMISVIAHELAEVSSNPMLNGWYGGEDATAPTEIADLCLGVYGSGGGGGYMGSVYKDRWRNVYNVKGVKGRKYLIQWVWDLNRNRCFGPNAMN

SEQ ID NO: 24228 - protein, 323 aa, Arabidopsis thaliana
  peptide (1)..(323): Ceres Seq. ID no. 13491886
  misc_feature (36)..(320): Pfam Name: Phosphate-induced protein 1 conserved region Pfam Description: Phosphate-induced protein 1 conserved region
  misc_feature (16)..(323): Homolog of NCBI NO: 15242118 NR Description: expressed protein [Arabidopsis thaliana]
  misc_feature (24)..(323): Homolog of NCBI NO: 21594010 NR Description: unknown [Arabidopsis thaliana]
  misc_feature (24)..(323): Homolog of NCBI NO: 18398352 NR Description: expressed protein [Arabidopsis thaliana]
  misc_feature (24)..(323): Homolog of NCBI NO: 11875173 NR Description: contains ESTs
  misc_feature (16)..(323): Homolog of NCBI NO: 21592873 NR Description: unknown [Arabidopsis thaliana]
  misc_feature (16)..(323): Homolog of NCBI NO: 16604527 NR Description: AT5g51550/K17N15_10 [Arabidopsis thaliana]
  misc_feature (31)..(321): Homolog of NCBI NO: 34901824 NR Description: putative phi-1(phosphate-induced protein 1)
  misc_feature (30)..(316): Homolog of NCBI NO: 15219504 NR Description: phosphate-induced (phi-1) protein -related
  misc_feature (1)..(323): Homolog of NCBI NO: 18403760 NR Description: expressed protein [Arabidopsis thaliana]
  misc_feature (1)..(323): Homolog of NCBI NO: 25408357 NR Description: hypothetical protein At2g35150 [imported] -
MSLIIVFFFFSLLLTSNGQFFDESKNYEGSSDLVDLQYHLGPVISSPVTSLYIIWYGRWNPTHQSIIRDFLYSVSAPAPAQYPSVSNWWKTVRLYRDQTGSNITDTLVLSGEFHDSTYSHGSHLTRFSVQSVIRTALTSKLPLNAVNGLYLVLTSDDVEMQEFCRAICGFHYFTFPSVVGATVPYAWVGNSERQCPEMCAYPFAQPKPFPGSGFVAREKMKPPNGEVGIDGMISVIAHELAEVSSNPMLNGWYGGEDATAPTEIADLCLGVYGSGGGGGYMGSVYKDRWRNVYNVKGVKGRKYLIQWVWDLNRNRCFGPNAMN

SEQ ID NO: 24229 - protein, 164 aa, Arabidopsis thaliana
  peptide (1)..(164): Ceres Seq. ID no. 13491887
  misc_feature (1)..(161): Pfam Name: Phosphate-induced protein 1 conserved region Pfam Description: Phosphate-induced protein 1 conserved region
  misc_feature (1)..(157): Homolog of NCBI NO: 15219504 NR Description: phosphate-induced (phi-1) protein -related
  misc_feature (1)..(164): Homolog of NCBI NO: 11875173 NR Description: contains ESTs
  misc_feature (1)..(162): Homolog of NCBI NO: 34901824 NR Description: putative phi-1(phosphate-induced protein 1)
  misc_feature (1)..(164): Homolog of NCBI NO: 21592873 NR Description: unknown [Arabidopsis thaliana]
  misc_feature (1)..(164): Homolog of NCBI NO: 16604527 NR Description: AT5g51550/K17N15_10 [Arabidopsis thaliana]
  misc_feature (1)..(164): Homolog of NCBI NO: 15242118 NR Description: expressed protein [Arabidopsis thaliana]
  misc_feature (1)..(164): Homolog of NCBI NO: 21594010 NR Description: unknown [Arabidopsis thaliana]
  misc_feature (1)..(164): Homolog of NCBI NO: 18398352 NR Description: expressed protein [Arabidopsis thaliana]
  misc_feature (1)..(164): Homolog of NCBI NO: 18403760 NR Description: expressed protein [Arabidopsis thaliana]
  misc_feature (1)..(164): Homolog of NCBI NO: 25408357 NR Description: hypothetical protein At2g35150 [imported] -
MQEFCRAICGFHYFTFPSVVGATVPYAWVGNSERQCPEMCAYPFAQPKPFPGSGFVAREKMKPPNGEVGIDGMISVIAHELAEVSSNPMLNGWYGGEDATAPTEIADLCLGVYGSGGGGGYMGSVYKDRWRNVYNVKGVKGRKYLIQWVWDLNRNRCFGPNAMN

SEQ ID NO: 24230 - DNA, 1208 bp, Arabidopsis thaliana
  misc_feature (1)..(1208): Ceres Seq. ID no. 12422761
  misc_feature: MA Experiment ID: 108577 Result: Up-regulated in Transcription
  misc_feature: MA Experiment 108577 PARAMETER Experiment Name: At_42deg_Heat_cDNA_P Parameter: Temperature (deg C) Value: 42 vs. 22
  misc_feature: MA Experiment 108577 PARAMETER Experiment Name: At_42deg_Heat_cDNA_P Parameter: Timepoint (hr) Value: 6
  misc_feature: MA Experiment 108577 PARAMETER Experiment Name: At_42deg_Heat_cDNA_P Parameter: Tissue Value: Aerial
  misc_feature: MA Experiment ID: 108595 Result: Down-regulated in Transcription
  misc_feature: MA Experiment 108595 PARAMETER Experiment Name: At_Ler-pi_Ovule_cDNA_P Parameter: Plant Line Value: null
  misc_feature: MA Experiment ID: 20000439 Result: Down-regulated in Transcription
  misc_feature: MA Experiment 20000439 PARAMETER Experiment Name: At_Roots__P Parameter: Age (day) Value: 14 vs. 21
  misc_feature: MA Experiment 20000439 PARAMETER Experiment Name: At_Roots__P Parameter: Organism Value: A. thaliana
  misc_feature: MA Experiment 20000439 PARAMETER Experiment Name: At_Roots__P Parameter: Tissue Value: Roots vs. Whole Plant
  misc_feature: MA Experiment ID: 20001451 Result: Down-regulated in Transcription
  misc_feature: MA Experiment 20001451 PARAMETER Experiment Name: At_Far-red-induction_P Parameter: Age (day) Value: 7
  misc_feature: MA Experiment 20001451 PARAMETER Experiment Name: At_Far-red-induction_P Parameter: Light Value: Far-red vs. White
  misc_feature: MA Experiment 20001451 PARAMETER Experiment Name: At_Far-red-induction_P Parameter: Organism Value: A. thaliana
  misc_feature: MA Experiment 20001451 PARAMETER Experiment Name: At_Far-red-induction_P Parameter: Plant Line Value: Columbia
  misc_feature: MA Experiment 20001451 PARAMETER Experiment Name: At_Far-red-induction_P Parameter: Timepoint (hr) Value: 24
  misc_feature: MA Experiment 20001451 PARAMETER Experiment Name: At_Far-red-induction_P Parameter: Tissue Value: Whole Plant
atcaaatccacatttccccaaatttctttcttcttcttcgcttcagccatgggaaccctatctctctcatcttctctcaaaccttcactcgtttcatcaagactcaattcatcttcctccgcatcttcttcttcgtttcctaaaccaaacaatctctacctcaaacccaccaaactcatttcaccacctctcagaacaacttcaccatcgccattgagattcgccaatgcttcaatcgagatgtcgcagacacaggaatcagctattcgcggagctgaatctgacgtcatgggtcttctccttagggaacgaatcgtctttctcggtagtagtatcgacgatttcgtcgctgatgctattatgagtcagttgcttctcttagatgctaaagatccaaagaaagatatcaaactctttatcaattctcctggtggttctctcagtgcaaccatggctatatacgatgtggttcagcttgtgagagctgatgtttcgacgattgctcttggcattgctgcatcaacagcttcgattattcttggtgcgggaactaaaggcaagcgctttgctatgcccaacacgaggataatgattcatcaacctcttggaggtgcaagcggtcaagctatagatgttgagattcaagctaaggaagttatgcataacaagaacaatgtcaccagcattatcgcgggatgtactagtcgatcgtttgagcaggttctgaaagatattgatagggaccggtacatgtctccaattgaagcagttgagtatggtttaattgatggagttattgatggagacagcattattcctcttgaacctgttcctgatagagtgaaaccgagagtaaactacgaggagattagcaaggatccgatgaaattcttgactcccgagatacctgatgatgagatctactaaagccaagctcgtctagaagcagggatcttcaaatgtgactaagactagcagtttcgaggaaaagctcaatttcttctgcggttactggtattggctttgcgaaaccgaagctggtagtacttggcttttgtatctcatatttcagttgttcagaaaataattgttctttaaatcactctgttttgaggaaaatgacttaaagaagctgtagttatctcgtttatgacaatcccttcaagtgtttaatggattcaagaagtatcagtcagtatttttgtggt

SEQ ID NO: 24231 - protein, 308 aa, Arabidopsis thaliana
  peptide (1)..(308): Ceres Seq. ID no. 12422762
  misc_feature (90)..(269): Pfam Name: Clp protease Pfam Description: Clp protease
  misc_feature (37)..(306): Homolog of NCBI NO: 34914540 NR Description: putative ATP-dependent Clp protease
  misc_feature (43)..(266): Homolog of NCBI NO: 25019682 NR Description: ClpP2 [Synechococcus sp. PCC 7942]
  misc_feature (86)..(267): Homolog of NCBI NO: 33241265 NR Description: Protease subunit of ATP-dependent Clp protease
  misc_feature (15)..(283): Homolog of NCBI NO: 25456012 NR Description: probable ATP-dependent clp proteinase (EC
  misc_feature (14)..(308): Homolog of NCBI NO: 37537218 NR Description: putative Clp protease [Oryza sativa (japonica
  misc_feature (81)..(308): Homolog of NCBI NO: 4454056 NR Description: ClpP [Arabidopsis thaliana]
  misc_feature (17)..(308): Homolog of NCBI NO: 9758729 NR Description: ATP-dependent Clp protease-like protein
  misc_feature (17)..(308): Homolog of NCBI NO: 21593305 NR Description: ATP-dependent Clp protease proteolytic subunit
  misc_feature (17)..(308): Homolog of NCBI NO: 18422548 NR Description: ATP-dependent Clp protease proteolytic subunit
  misc_feature (10)..(308): Homolog of NCBI NO: 25453516 NR Description: ATP-dependent Clp proteinase (EC 3.4.21.-)
IKSTFPQISFFFFASAMGTLSLSSSLKPSLVSSRLNSSSSASSSSFPKPNNLYLKPTKLISPPLRTTSPSPLRFANASIEMSQTQESAIRGAESDVMGLLLRERIVFLGSSIDDFVADAIMSQLLLLDAKDPKKDIKLFINSPGGSLSATMAIYDVVQLVRADVSTIALGIAASTASIILGAGTKGKRFAMPNTRIMIHQPLGGASGQAIDVEIQAKEVMHNKNNVTSIIAGCTSRSFEQVLKDIDRDRYMSPIEAVEYGLIDGVIDGDSIIPLEPVPDRVKPRVNYEEISKDPMKFLTPEIPDDEIY

SEQ ID NO: 24232 - protein, 292 aa, Arabidopsis thaliana
  peptide (1)..(292): Ceres Seq. ID no. 12422763
  misc_feature (74)..(253): Pfam Name: Clp protease Pfam Description: Clp protease
  misc_feature (21)..(290): Homolog of NCBI NO: 34914540 NR Description: putative ATP-dependent Clp protease
  misc_feature (27)..(250): Homolog of NCBI NO: 25019682 NR Description: ClpP2 [Synechococcus sp. PCC 7942]
  misc_feature (70)..(251): Homolog of NCBI NO: 33241265 NR Description: Protease subunit of ATP-dependent Clp protease
  misc_feature (1)..(267): Homolog of NCBI NO: 25456012 NR Description: probable ATP-dependent clp proteinase (EC
  misc_feature (1)..(292): Homolog of NCBI NO: 37537218 NR Description: putative Clp protease [Oryza sativa (japonica
  misc_feature (65)..(292): Homolog of NCBI NO: 4454056 NR Description: ClpP [Arabidopsis thaliana]
  misc_feature (1)..(292): Homolog of NCBI NO: 9758729 NR Description: ATP-dependent Clp protease-like protein
  misc_feature (1)..(292): Homolog of NCBI NO: 21593305 NR Description: ATP-dependent Clp protease proteolytic subunit
  misc_feature (1)..(292): Homolog of NCBI NO: 18422548 NR Description: ATP-dependent Clp protease proteolytic subunit
  misc_feature (1)..(292): Homolog of NCBI NO: 25453516 NR Description: ATP-dependent Clp proteinase (EC 3.4.21.-)
MGTLSLSSSLKPSLVSSRLNSSSSASSSSFPKPNNLYLKPTKLISPPLRTTSPSPLRFANASIEMSQTQESAIRGAESDVMGLLLRERIVFLGSSIDDFVADAIMSQLLLLDAKDPKKDIKLFINSPGGSLSATMAIYDVVQLVRADVSTIALGIAASTASIILGAGTKGKRFAMPNTRIMIHQPLGGASGQAIDVEIQAKEVMHNKNNVTSIIAGCTSRSFEQVLKDIDRDRYMSPIEAVEYGLIDGVIDGDSIIPLEPVPDRVKPRVNYEEISKDPMKFLTPEIPDDEIY

SEQ ID NO: 24233 - protein, 228 aa, Arabidopsis thaliana
  peptide (1)..(228): Ceres Seq. ID no. 12422764
  misc_feature (10)..(189): Pfam Name: Clp protease Pfam Description: Clp protease
  misc_feature (1)..(226): Homolog of NCBI NO: 34914540 NR Description: putative ATP-dependent Clp protease
  misc_feature (1)..(186): Homolog of NCBI NO: 25019682 NR Description: ClpP2 [Synechococcus sp. PCC 7942]
  misc_feature (6)..(187): Homolog of NCBI NO: 33241265 NR Description: Protease subunit of ATP-dependent Clp protease
  misc_feature (1)..(203): Homolog of NCBI NO: 25456012 NR Description: probable ATP-dependent clp proteinase (EC
  misc_feature (1)..(228): Homolog of NCBI NO: 37537218 NR Description: putative Clp protease [Oryza sativa (japonica
  misc_feature (1)..(228): Homolog of NCBI NO: 4454056 NR Description: ClpP [Arabidopsis thaliana]
  misc_feature (1)..(228): Homolog of NCBI NO: 9758729 NR Description: ATP-dependent Clp protease-like protein
  misc_feature (1)..(228): Homolog of NCBI NO: 21593305 NR Description: ATP-dependent Clp protease proteolytic subunit
  misc_feature (1)..(228): Homolog of NCBI NO: 18422548 NR Description: ATP-dependent Clp protease proteolytic subunit
  misc_feature (1)..(228): Homolog of NCBI NO: 25453516 NR Description: ATP-dependent Clp proteinase (EC 3.4.21.-)
MSQTQESAIRGAESDVMGLLLRERIVFLGSSIDDFVADAIMSQLLLLDAKDPKKDIKLFINSPGGSLSATMAIYDVVQLVRADVSTIALGIAASTASIILGAGTKGKRFAMPNTRIMIHQPLGGASGQAIDVEIQAKEVMHNKNNVTSIIAGCTSRSFEQVLKDIDRDRYMSPIEAVEYGLIDGVIDGDSIIPLEPVPDRVKPRVNYEEISKDPMKFLTPEIPDDEIY

SEQ ID NO: 24234 - DNA, 1475 bp, Arabidopsis thaliana
  misc_feature (1)..(1475): Ceres Seq. ID no. 12396427
  misc_feature: MA Experiment ID: 108434 Result: Up-regulated in Transcription
  misc_feature: MA Experiment 108434 PARAMETER Experiment Name: At_Root_Tips_cDNA_P Parameter: Tissue Value: Root Tips
  misc_feature: MA Experiment ID: 108462 Result: Down-regulated in Transcription
  misc_feature: MA Experiment 108462 PARAMETER Experiment Name: At_Germinating_Seeds_cDNA_P Parameter: Age (day) Value: 2 vs. 0
  misc_feature: MA Experiment 108462 PARAMETER Experiment Name: At_Germinating_Seeds_cDNA_P Parameter: Tissue Value: Germinating Seeds
  misc_feature: MA Experiment ID: 108463 Result: Down-regulated in Transcription
  misc_feature: MA Experiment 108463 PARAMETER Experiment Name: At_Germinating_Seeds_cDNA_P Parameter: Age (day) Value: 3 vs. 0
  misc_feature: MA Experiment 108463 PARAMETER Experiment Name: At_Germinating_Seeds_cDNA_P Parameter: Tissue Value: Germinating Seeds
atctttacaaaaccgattacttttgtcggaatctgacgtcagcatacctgctaccacttccagagttcaatcgatcttcgcctcgttgaaacgttttccctcttcgattatcaacagtgtctccactcgtatcatcaccgcctccaactaattttgccatctctctcgttgttccaatttgattctactagtgagctccgatttaatttagggttttgaaagatgtcagctttgaaaaattacggcttgatctccattgattctgccctccattttcctcgatcaaatcaattgcagagctataagagaaggaatgcaaaatgggtctctccaatagcagctgttgtacctaacttccatcttcctatgcgcagtctcgaggataaaaacaggacaaacacagacgacataaggtcccttagagtgatcacagccattaagacaccgtatttacctgatggaagattcgacctccaagcatacgatgacttagtcaacacgcagatagaaaacggtgctgaaggtgtgattgttggtggtacaactggtgaaggccaattgatgagctgggatgagcacataatgcttatcggccatactgtaaattgttttgggggaaggatcaaagtcattggaaacactggaagtaactcgactagggaagctattcatgccactgagcaaggattcgccatgggaatgcacggggcactgcacattaacccttactatggaaaaacatccattgaaggcatgaatgcgcattttcaaaccgttcttcatatgggaccgactattatatacaacgtgccaggtcgaacgtgccaggatatacctccccaggttatctttaaactctctcagaaccctaatatggctggggttaaggaatgcgttggtaataaccgagttgaagagtatactgagaagggaattgtcgtttggagtggaaatgatgatcagtgccatgattctagatgggatcacggtgccactggagtgatatcggttactagcaatttagttccgggtttgatgaggaagttgatgtttgaaggtagaaactcagcgttgaacgcaaagcttcttcctttaatggattggctattccaagaaccgaatcccattggtgtaaacactgctttggctcagttaggagttgcgaggccggtttttcggttaccttatgtgccattgcctctgtccaaaaggattgagttcgttaaactggtgaaggaaatcggaagggagcattttgtaggagacagagatgttcaggtacttgatgatgatgacttcatcttaatcggtcgatattagagtctcttccctgaagattggttgtgtttatactttcttcgttcagttgttagttatttagctgatgagaaactcacagatggatcaagacttctacttgttgtaatgtttggtctgttacttttggtgatgaatctaatggcttttgcttactc

SEQ ID NO: 24235 - protein, 365 aa, Arabidopsis thaliana
  peptide (1)..(365): Ceres Seq. ID no. 12396428
  misc_feature (64)..(341): Pfam Name: Dihydrodipicolinate synthetase family Pfam Description: Dihydrodipicolinate synthetase family
  misc_feature (40)..(365): Homolog of NCBI NO: 1084359 NR Description: dihydrodipicolinate synthase (EC 4.2.1.52)
  misc_feature (39)..(365): Homolog of NCBI NO: 6014907 NR Description: Dihydrodipicolinate synthase, chloroplast
  misc_feature (11)..(365): Homolog of NCBI NO: 6014908 NR Description: Dihydrodipicolinate synthase, chloroplast
  misc_feature (1)..(364): Homolog of NCBI NO: 1076280 NR Description: dihydrodipicolinate synthase (EC 4.2.1.52)
  misc_feature (1)..(364): Homolog of NCBI NO: 8648949 NR Description: dihydrodipicolinate synthase
  misc_feature (1)..(365): Homolog of NCBI NO: 11066382 NR Description: dihydrodipicolinate synthase 2 [Arabidopsis
  misc_feature (1)..(365): Homolog of NCBI NO: 15225477 NR Description: putative dihydrodipicolinate synthase
  misc_feature (1)..(365): Homolog of NCBI NO: 1076317 NR Description: dihydrodipicolinate synthase (EC 4.2.1.52)
  misc_feature (1)..(365): Homolog of NCBI NO: 15232971 NR Description: dihydrodipicolinate synthase precursor
  misc_feature (1)..(365): Homolog of NCBI NO: 30695296 NR Description: dihydrodipicolinate synthase precursor
MSALKNYGLISIDSALHFPRSNQLQSYKRRNAKWVSPIAAVVPNFHLPMRSLEDKNRTNTDDIRSLRVITAIKTPYLPDGRFDLQAYDDLVNTQIENGAEGVIVGGTTGEGQLMSWDEHIMLIGHTVNCFGGRIKVIGNTGSNSTREAIHATEQGFAMGMHGALHINPYYGKTSIEGMNAHFQTVLHMGPTIIYNVPGRTCQDIPPQVIFKLSQNPNMAGVKECVGNNRVEEYTEKGIVVWSGNDDQCHDSRWDHGATGVISVTSNLVPGLMRKLMFEGRNSALNAKLLPLMDWLFQEPNPIGVNTALAQLGVARPVFRLPYVPLPLSKRIEFVKLVKEIGREHFVGDRDVQVLDDDDFILIGRY

SEQ ID NO: 24236 - protein, 317 aa, Arabidopsis thaliana
  peptide (1)..(317): Ceres Seq. ID no. 12396429
  misc_feature (16)..(293): Pfam Name: Dihydrodipicolinate synthetase family Pfam Description: Dihydrodipicolinate synthetase family
  misc_feature (1)..(317): Homolog of NCBI NO: 1084359 NR Description: dihydrodipicolinate synthase (EC 4.2.1.52)
  misc_feature (1)..(317): Homolog of NCBI NO: 6014907 NR Description: Dihydrodipicolinate synthase, chloroplast
  misc_feature (1)..(317): Homolog of NCBI NO: 6014908 NR Description: Dihydrodipicolinate synthase, chloroplast
  misc_feature (1)..(316): Homolog of NCBI NO: 1076280 NR Description: dihydrodipicolinate synthase (EC 4.2.1.52)
  misc_feature (1)..(316): Homolog of NCBI NO: 8648949 NR Description: dihydrodipicolinate synthase
  misc_feature (1)..(317): Homolog of NCBI NO: 11066382 NR Description: dihydrodipicolinate synthase 2 [Arabidopsis
  misc_feature (1)..(317): Homolog of NCBI NO: 15225477 NR Description: putative dihydrodipicolinate synthase
  misc_feature (1)..(317): Homolog of NCBI NO: 1076317 NR Description: dihydrodipicolinate synthase (EC 4.2.1.52)
  misc_feature (1)..(317): Homolog of NCBI NO: 15232971 NR Description: dihydrodipicolinate synthase precursor
  misc_feature (1)..(317): Homolog of NCBI NO: 30695296 NR Description: dihydrodipicolinate synthase precursor
MRSLEDKNRTNTDDIRSLRVITAIKTPYLPDGRFDLQAYDDLVNTQIENGAEGVIVGGTTGEGQLMSWDEHIMLIGHTVNCFGGRIKVIGNTGSNSTREAIHATEQGFAMGMHGALHINPYYGKTSIEGMNAHFQTVLHMGPTIIYNVPGRTCQDIPPQVIFKLSQNPNMAGVKECVGNNRVEEYTEKGIVVWSGNDDQCHDSRWDHGATGVISVTSNLVPGLMRKLMFEGRNSALNAKLLPLMDWLFQEPNPIGVNTALAQLGVARPVFRLPYVPLPLSKRIEFVKLVKEIGREHFVGDRDVQVLDDDDFILIGRY

SEQ ID NO: 24237 - protein, 252 aa, Arabidopsis thaliana
  peptide (1)..(252): Ceres Seq. ID no. 12396430
  misc_feature (1)..(228): Pfam Name: Dihydrodipicolinate synthetase family Pfam Description: Dihydrodipicolinate synthetase family
  misc_feature (1)..(252): Homolog of NCBI NO: 1084359 NR Description: dihydrodipicolinate synthase (EC 4.2.1.52)
  misc_feature (1)..(252): Homolog of NCBI NO: 6014907 NR Description: Dihydrodipicolinate synthase, chloroplast
  misc_feature (1)..(252): Homolog of NCBI NO: 6014908 NR Description: Dihydrodipicolinate synthase, chloroplast
  misc_feature (1)..(251): Homolog of NCBI NO: 1076280 NR Description: dihydrodipicolinate synthase (EC 4.2.1.52)
  misc_feature (1)..(251): Homolog of NCBI NO: 8648949 NR Description: dihydrodipicolinate synthase
  misc_feature (1)..(252): Homolog of NCBI NO: 11066382 NR Description: dihydrodipicolinate synthase 2 [Arabidopsis
  misc_feature (1)..(252): Homolog of NCBI NO: 15225477 NR Description: putative dihydrodipicolinate synthase
  misc_feature (1)..(252): Homolog of NCBI NO: 1076317 NR Description: dihydrodipicolinate synthase (EC 4.2.1.52)
  misc_feature (1)..(252): Homolog of NCBI NO: 15232971 NR Description: dihydrodipicolinate synthase precursor
  misc_feature (1)..(252): Homolog of NCBI NO: 30695296 NR Description: dihydrodipicolinate synthase precursor
MSWDEHIMLIGHTVNCFGGRIKVIGNTGSNSTREAIHATEQGFAMGMHGALHINPYYGKTSIEGMNAHFQTVLHMGPTIIYNVPGRTCQDIPPQVIFKLSQNPNMAGVKECVGNNRVEEYTEKGIVVWSGNDDQCHDSRWDHGATGVISVTSNLVPGLMRKLMFEGRNSALNAKLLPLMDWLFQEPNPIGVNTALAQLGVARPVFRLPYVPLPLSKRIEFVKLVKEIGREHFVGDRDVQVLDDDDFILIGRY

SEQ ID NO: 24238 - DNA, 960 bp, Arabidopsis thaliana
  misc_feature (1)..(960): Ceres Seq. ID no. 12466073
  misc_feature: MA Experiment ID: 108434 Result: Up-regulated in Transcription
  misc_feature: MA Experiment 108434 PARAMETER Experiment Name: At_Root_Tips_cDNA_P Parameter: Tissue Value: Root Tips
  misc_feature: MA Experiment ID: 108462 Result: Down-regulated in Transcription
  misc_feature: MA Experiment 108462 PARAMETER Experiment Name: At_Germinating_Seeds_cDNA_P Parameter: Age (day) Value: 2 vs. 0
  misc_feature: MA Experiment 108462 PARAMETER Experiment Name: At_Germinating_Seeds_cDNA_P Parameter: Tissue Value: Germinating Seeds
  misc_feature: MA Experiment ID: 108463 Result: Down-regulated in Transcription
  misc_feature: MA Experiment 108463 PARAMETER Experiment Name: At_Germinating_Seeds_cDNA_P Parameter: Age (day) Value: 3 vs. 0
  misc_feature: MA Experiment 108463 PARAMETER Experiment Name: At_Germinating_Seeds_cDNA_P Parameter: Tissue Value: Germinating Seeds
  misc_feature: MA Experiment ID: 108464 Result: Down-regulated in Transcription
  misc_feature: MA Experiment 108464 PARAMETER Experiment Name: At_Germinating_Seeds_cDNA_P Parameter: Age (day) Value: 4 vs. 0
  misc_feature: MA Experiment 108464 PARAMETER Experiment Name: At_Germinating_Seeds_cDNA_P Parameter: Tissue Value: Germinating Seeds
  misc_feature: MA Experiment ID: 108488 Result: Up-regulated in Transcription
  misc_feature: MA Experiment ID: 108573 Result: Down-regulated in Transcription
  misc_feature: MA Experiment 108573 PARAMETER Experiment Name: At_Drought_cDNA_P Parameter: Timepoint (hr) Value: 6
  misc_feature: MA Experiment 108573 PARAMETER Experiment Name: At_Drought_cDNA_P Parameter: Tissue Value: Aerial
  misc_feature: MA Experiment 108573 PARAMETER Experiment Name: At_Drought_cDNA_P Parameter: Treatment Value: Drought vs. No Drought
  misc_feature: MA Experiment ID: 108577 Result: Up-regulated in Transcription
  misc_feature: MA Experiment 108577 PARAMETER Experiment Name: At_42deg_Heat_cDNA_P Parameter: Temperature (deg C) Value: 42 vs. 22
  misc_feature: MA Experiment 108577 PARAMETER Experiment Name: At_42deg_Heat_cDNA_P Parameter: Timepoint (hr) Value: 6
  misc_feature: MA Experiment 108577 PARAMETER Experiment Name: At_42deg_Heat_cDNA_P Parameter: Tissue Value: Aerial
  misc_feature: MA Experiment ID: 108595 Result: Down-regulated in Transcription
  misc_feature: MA Experiment 108595 PARAMETER Experiment Name: At_Ler-pi_Ovule_cDNA_P Parameter: Plant Line Value: null
  misc_feature: MA Experiment ID: 20000069 Result: Down-regulated in Transcription
  misc_feature: MA Experiment 20000069 PARAMETER Experiment Name: At_100uM_ABA_Mutants_cDNA_P Parameter: Plant Line Value: CS23
  misc_feature: MA Experiment 20000069 PARAMETER Experiment Name: At_100uM_ABA_Mutants_cDNA_P Parameter: Timepoint (hr) Value: 6
  misc_feature: MA Experiment 20000069 PARAMETER Experiment Name: At_100uM_ABA_Mutants_cDNA_P Parameter: Tissue Value: Aerial
  misc_feature: MA Experiment 20000069 PARAMETER Experiment Name: At_100uM_ABA_Mutants_cDNA_P Parameter: Treatment Value: 100uM ABA vs. No Treatment
  misc_feature: MA Experiment ID: 20000070 Result: Down-regulated in Transcription
  misc_feature: MA Experiment 20000070 PARAMETER Experiment Name: At_100uM_ABA_Mutants_cDNA_P Parameter: Plant Line Value: CS24
  misc_feature: MA Experiment 20000070 PARAMETER Experiment Name: At_100uM_ABA_Mutants_cDNA_P Parameter: Timepoint (hr) Value: 6
  misc_feature: MA Experiment 20000070 PARAMETER Experiment Name: At_100uM_ABA_Mutants_cDNA_P Parameter: Tissue Value: Aerial
  misc_feature: MA Experiment 20000070 PARAMETER Experiment Name: At_100uM_ABA_Mutants_cDNA_P Parameter: Treatment Value: 100uM ABA vs. No Treatment
  misc_feature: MA Experiment ID: 20000071 Result: Down-regulated in Transcription
  misc_feature: MA Experiment 20000071 PARAMETER Experiment Name: At_100uM_ABA_Mutants_cDNA_P Parameter: Plant Line Value: CS8104
  misc_feature: MA Experiment 20000071 PARAMETER Experiment Name: At_100uM_ABA_Mutants_cDNA_P Parameter: Timepoint (hr) Value: 6
  misc_feature: MA Experiment 20000071 PARAMETER Experiment Name: At_100uM_ABA_Mutants_cDNA_P Parameter: Tissue Value: Aerial
  misc_feature: MA Experiment 20000071 PARAMETER Experiment Name: At_100uM_ABA_Mutants_cDNA_P Parameter: Treatment Value: 100uM ABA vs. No Treatment
  misc_feature: MA Experiment ID: 20000072 Result: Down-regulated in Transcription
  misc_feature: MA Experiment 20000072 PARAMETER Experiment Name: At_100uM_ABA_Mutants_cDNA_P Parameter: Plant Line Value: CS8105
  misc_feature: MA Experiment 20000072 PARAMETER Experiment Name: At_100uM_ABA_Mutants_cDNA_P Parameter: Timepoint (hr) Value: 6
  misc_feature: MA Experiment 20000072 PARAMETER Experiment Name: At_100uM_ABA_Mutants_cDNA_P Parameter: Tissue Value: Aerial
  misc_feature: MA Experiment 20000072 PARAMETER Experiment Name: At_100uM_ABA_Mutants_cDNA_P Parameter: Treatment Value: 100uM ABA vs. No Treatment
  misc_feature: MA Experiment ID: 20000086 Result: Down-regulated in Transcription
  misc_feature: MA Experiment 20000086 PARAMETER Experiment Name: At_100uM_ABA_Mutants_cDNA_P Parameter: Plant Line Value: CS22
  misc_feature: MA Experiment 20000086 PARAMETER Experiment Name: At_100uM_ABA_Mutants_cDNA_P Parameter: Timepoint (hr) Value: 6
  misc_feature: MA Experiment 20000086 PARAMETER Experiment Name: At_100uM_ABA_Mutants_cDNA_P Parameter: Tissue Value: Aerial
  misc_feature: MA Experiment 20000086 PARAMETER Experiment Name: At_100uM_ABA_Mutants_cDNA_P Parameter: Treatment Value: 100uM ABA vs. No Treatment
  misc_feature: MA Experiment ID: 20000087 Result: Down-regulated in Transcription
  misc_feature: MA Experiment 20000087 PARAMETER Experiment Name: At_100uM_ABA_Mutants_cDNA_P Parameter: Plant Line Value: WS
  misc_feature: MA Experiment 20000087 PARAMETER Experiment Name: At_100uM_ABA_Mutants_cDNA_P Parameter: Timepoint (hr) Value: 6
  misc_feature: MA Experiment 20000087 PARAMETER Experiment Name: At_100uM_ABA_Mutants_cDNA_P Parameter: Tissue Value: Aerial
  misc_feature: MA Experiment 20000087 PARAMETER Experiment Name: At_100uM_ABA_Mutants_cDNA_P Parameter: Treatment Value: 100uM ABA vs. No Treatment
  misc_feature: MA Experiment ID: 20000093 Result: Up-regulated in Transcription
  misc_feature: MA Experiment 20000093 PARAMETER Experiment Name: At_42deg_Heat_cDNA_P Parameter: Temperature (deg C) Value: 42 vs. 22
  misc_feature: MA Experiment 20000093 PARAMETER Experiment Name: At_42deg_Heat_cDNA_P Parameter: Timepoint (hr) Value: 0.5
  misc_feature: MA Experiment 20000093 PARAMETER Experiment Name: At_42deg_Heat_cDNA_P Parameter: Tissue Value: Aerial
  misc_feature: MA Experiment ID: 20000111 Result: Up-regulated in Transcription
  misc_feature: MA Experiment 20000111 PARAMETER Experiment Name: At_42deg_Heat_cDNA_P Parameter: Temperature (deg C) Value: 42 vs. 22
  misc_feature: MA Experiment 20000111 PARAMETER Experiment Name: At_42deg_Heat_cDNA_P Parameter: Timepoint (hr) Value: 6
  misc_feature: MA Experiment 20000111 PARAMETER Experiment Name: At_42deg_Heat_cDNA_P Parameter: Tissue Value: Aerial
  misc_feature: MA Experiment ID: 20000112 Result: Up-regulated in Transcription
  misc_feature: MA Experiment 20000112 PARAMETER Experiment Name: At_42deg_Heat_cDNA_P Parameter: Temperature (deg C) Value: 42 vs. 22
  misc_feature: MA Experiment 20000112 PARAMETER Experiment Name: At_42deg_Heat_cDNA_P Parameter: Timepoint (hr) Value: 2
  misc_feature: MA Experiment 20000112 PARAMETER Experiment Name: At_42deg_Heat_cDNA_P Parameter: Tissue Value: Aerial
  misc_feature: MA Experiment ID: 20000113 Result: Up-regulated in Transcription
  misc_feature: MA Experiment 20000113 PARAMETER Experiment Name: At_42deg_Heat_cDNA_P Parameter: Temperature (deg C) Value: 42 vs. 22
  misc_feature: MA Experiment 20000113 PARAMETER Experiment Name: At_42deg_Heat_cDNA_P Parameter: Timepoint (hr) Value: 8
  misc_feature: MA Experiment 20000113 PARAMETER Experiment Name: At_42deg_Heat_cDNA_P Parameter: Tissue Value: Aerial
  misc_feature: MA Experiment ID: 20000117 Result: Down-regulated in Transcription
  misc_feature: MA Experiment 20000117 PARAMETER Experiment Name: At_100uM_ABA_Mutants_cDNA_P Parameter: Plant Line Value: Columbia
  misc_feature: MA Experiment 20000117 PARAMETER Experiment Name: At_100uM_ABA_Mutants_cDNA_P Parameter: Timepoint (hr) Value: 6
  misc_feature: MA Experiment 20000117 PARAMETER Experiment Name: At_100uM_ABA_Mutants_cDNA_P Parameter: Tissue Value: Aerial
  misc_feature: MA Experiment 20000117 PARAMETER Experiment Name: At_100uM_ABA_Mutants_cDNA_P Parameter: Treatment Value: 100uM ABA vs. No Treatment
  misc_feature: MA Experiment ID: 20000144 Result: Up-regulated in Transcription
  misc_feature: MA Experiment 20000144 PARAMETER Experiment Name: At_42deg_Heat_cDNA_P Parameter: Temperature (deg C) Value: 42 vs. 22
  misc_feature: MA Experiment 20000144 PARAMETER Experiment Name: At_42deg_Heat_cDNA_P Parameter: Timepoint (hr) Value: 1
  misc_feature: MA Experiment 20000144 PARAMETER Experiment Name: At_42deg_Heat_cDNA_P Parameter: Tissue Value: Aerial
  misc_feature: MA Experiment ID: 20000171 Result: Up-regulated in Transcription
  misc_feature: MA Experiment 20000171 PARAMETER Experiment Name: At_42deg_Heat_P Parameter: Age (day) Value: 14
  misc_feature: MA Experiment 20000171 PARAMETER Experiment Name: At_42deg_Heat_P Parameter: Organism Value: A. thaliana
  misc_feature: MA Experiment 20000171 PARAMETER Experiment Name: At_42deg_Heat_P Parameter: Plant Line Value: WS
  misc_feature: MA Experiment 20000171 PARAMETER Experiment Name: At_42deg_Heat_P Parameter: Temperature (deg C) Value: 42 vs. 22
  misc_feature: MA Experiment 20000171 PARAMETER Experiment Name: At_42deg_Heat_P Parameter: Timepoint (hr) Value: 1
  misc_feature: MA Experiment 20000171 PARAMETER Experiment Name: At_42deg_Heat_P Parameter: Tissue Value: Aerial
  misc_feature: MA Experiment ID: 20000173 Result: Up-regulated in Transcription
  misc_feature: MA Experiment 20000173 PARAMETER Experiment Name: At_42deg_Heat_P Parameter: Age (day) Value: 14
  misc_feature: MA Experiment 20000173 PARAMETER Experiment Name: At_42deg_Heat_P Parameter: Organism Value: A. thaliana
  misc_feature: MA Experiment 20000173 PARAMETER Experiment Name: At_42deg_Heat_P Parameter: Plant Line Value: WS
  misc_feature: MA Experiment 20000173 PARAMETER Experiment Name: At_42deg_Heat_P Parameter: Temperature (deg C) Value: 42 vs. 22
  misc_feature: MA Experiment 20000173 PARAMETER Experiment Name: At_42deg_Heat_P Parameter: Timepoint (hr) Value: 6
  misc_feature: MA Experiment 20000173 PARAMETER Experiment Name: At_42deg_Heat_P Parameter: Tissue Value: Aerial
  misc_feature: MA Experiment ID: 20000234 Result: Up-regulated in Transcription
  misc_feature: MA Experiment 20000234 PARAMETER Experiment Name: At_Siliques_P Parameter: Age (day) Value: 21
  misc_feature: MA Experiment 20000234 PARAMETER Experiment Name: At_Siliques_P Parameter: Organism Value: A. thaliana
  misc_feature: MA Experiment 20000234 PARAMETER Experiment Name: At_Siliques_P Parameter: Plant Line Value: WS
  misc_feature: MA Experiment 20000234 PARAMETER Experiment Name: At_Siliques_P Parameter: Tissue Value: Less Than 5mm Siliques vs. Whole Plant
  misc_feature: MA Experiment ID: 20000437 Result: Down-regulated in Transcription
  misc_feature: MA Experiment 20000437 PARAMETER Experiment Name: At_Drought_P Parameter: Age (day) Value: 8
  misc_feature: MA Experiment 20000437 PARAMETER Experiment Name: At_Drought_P Parameter: Organism Value: A. thaliana
  misc_feature: MA Experiment 20000437 PARAMETER Experiment Name: At_Drought_P Parameter: Plant Line Value: WS
  misc_feature: MA Experiment 20000437 PARAMETER Experiment Name: At_Drought_P Parameter: Timepoint (hr) Value: 24
  misc_feature: MA Experiment 20000437 PARAMETER Experiment Name: At_Drought_P Parameter: Tissue Value: Whole Plant
  misc_feature: MA Experiment 20000437 PARAMETER Experiment Name: At_Drought_P Parameter: Treatment Value: Drought vs. No Drought
  misc_feature: MA Experiment ID: 20000794 Result: Down-regulated in Transcription
  misc_feature: MA Experiment 20000794 PARAMETER Experiment Name: At_Petals_P Parameter: Age (day) Value: 23-25 days
  misc_feature: MA Experiment 20000794 PARAMETER Experiment Name: At_Petals_P Parameter: Plant Line Value: WS
  misc_feature: MA Experiment 20000794 PARAMETER Experiment Name: At_Petals_P Parameter: Tissue Value: Petals vs. Whole plant
  misc_feature: MA Experiment ID: 20001248 Result: Down-regulated in Transcription
  misc_feature: MA Experiment 20001248 PARAMETER Experiment Name: At_Far-red-induction_P Parameter: Age (day) Value: 7
  misc_feature: MA Experiment 20001248 PARAMETER Experiment Name: At_Far-red-induction_P Parameter: Light Value: Far-red vs. White
  misc_feature: MA Experiment 20001248 PARAMETER Experiment Name: At_Far-red-induction_P Parameter: Organism Value: A. thaliana
  misc_feature: MA Experiment 20001248 PARAMETER Experiment Name: At_Far-red-induction_P Parameter: Plant Line Value: Columbia
  misc_feature: MA Experiment 20001248 PARAMETER Experiment Name: At_Far-red-induction_P Parameter: Timepoint (hr) Value: 4
  misc_feature: MA Experiment 20001248 PARAMETER Experiment Name: At_Far-red-induction_P Parameter: Tissue Value: Whole Plant
  misc_feature: MA Experiment ID: 20001450 Result: Down-regulated in Transcription
  misc_feature: MA Experiment 20001450 PARAMETER Experiment Name: At_Far-red-induction_P Parameter: Age (day) Value: 7
  misc_feature: MA Experiment 20001450 PARAMETER Experiment Name: At_Far-red-induction_P Parameter: Light Value: Far-red vs. White
  misc_feature: MA Experiment 20001450 PARAMETER Experiment Name: At_Far-red-induction_P Parameter: Organism Value: A. thaliana
  misc_feature: MA Experiment 20001450 PARAMETER Experiment Name: At_Far-red-induction_P Parameter: Plant Line Value: Columbia
  misc_feature: MA Experiment 20001450 PARAMETER Experiment Name: At_Far-red-induction_P Parameter: Timepoint (hr) Value: 8
  misc_feature: MA Experiment 20001450 PARAMETER Experiment Name: At_Far-red-induction_P Parameter: Tissue Value: Whole Plant
  misc_feature: MA Experiment ID: 20001451 Result: Down-regulated in Transcription
  misc_feature: MA Experiment 20001451 PARAMETER Experiment Name: At_Far-red-induction_P Parameter: Age (day) Value: 7
  misc_feature: MA Experiment 20001451 PARAMETER Experiment Name: At_Far-red-induction_P Parameter: Light Value: Far-red vs. White
  misc_feature: MA Experiment 20001451 PARAMETER Experiment Name: At_Far-red-induction_P Parameter: Organism Value: A. thaliana
  misc_feature: MA Experiment 20001451 PARAMETER Experiment Name: At_Far-red-induction_P Parameter: Plant Line Value: Columbia
  misc_feature: MA Experiment 20001451 PARAMETER Experiment Name: At_Far-red-induction_P Parameter: Timepoint (hr) Value: 24
  misc_feature: MA Experiment 20001451 PARAMETER Experiment Name: At_Far-red-induction_P Parameter: Tissue Value: Whole Plant
  misc_feature: MA Experiment ID: 20001558 Result: Up-regulated in Transcription
  misc_feature: MA Experiment 20001558 PARAMETER Experiment Name: At_Drought_Soil_Dry_P Parameter: Age (day) Value: 27
  misc_feature: MA Experiment 20001558 PARAMETER Experiment Name: At_Drought_Soil_Dry_P Parameter: Organism Value: A. thaliana
  misc_feature: MA Experiment 20001558 PARAMETER Experiment Name: At_Drought_Soil_Dry_P Parameter: Plant Line Value: WS
  misc_feature: MA Experiment 20001558 PARAMETER Experiment Name: At_Drought_Soil_Dry_P Parameter: Post Timepoint (hr) Value: 6
  misc_feature: MA Experiment 20001558 PARAMETER Experiment Name: At_Drought_Soil_Dry_P Parameter: Post-Treatment Value: Re-Water vs. No Drought
  misc_feature: MA Experiment 20001558 PARAMETER Experiment Name: At_Drought_Soil_Dry_P Parameter: Timepoint (day) Value: 13
  misc_feature: MA Experiment 20001558 PARAMETER Experiment Name: At_Drought_Soil_Dry_P Parameter: Treatment Value: Drought vs. No Drought
  misc_feature: MA Experiment ID: 20001560 Result: Up-regulated in Transcription
  misc_feature: MA Experiment 20001560 PARAMETER Experiment Name: At_Drought_Soil_Dry_P Parameter: Age (day) Value: 28
  misc_feature: MA Experiment 20001560 PARAMETER Experiment Name: At_Drought_Soil_Dry_P Parameter: Organism Value: A. thaliana
  misc_feature: MA Experiment 20001560 PARAMETER Experiment Name: At_Drought_Soil_Dry_P Parameter: Plant Line Value: WS
  misc_feature: MA Experiment 20001560 PARAMETER Experiment Name: At_Drought_Soil_Dry_P Parameter: Post Timepoint (hr) Value: None
  misc_feature: MA Experiment 20001560 PARAMETER Experiment Name: At_Drought_Soil_Dry_P Parameter: Post-Treatment Value: None
  misc_feature: MA Experiment 20001560 PARAMETER Experiment Name: At_Drought_Soil_Dry_P Parameter: Timepoint (day) Value: 14
  misc_feature: MA Experiment 20001560 PARAMETER Experiment Name: At_Drought_Soil_Dry_P Parameter: Treatment Value: Drought vs. No Drought
  misc_feature: MA Experiment ID: 20001905 Result: Down-regulated in Transcription
  misc_feature: MA Experiment 20001905 PARAMETER Experiment Name: At_Drought_Reproduction_P Parameter: Age (day) Value: 40
  misc_feature: MA Experiment 20001905 PARAMETER Experiment Name: At_Drought_Reproduction_P Parameter: Organism Value: A. thaliana
  misc_feature: MA Experiment 20001905 PARAMETER Experiment Name: At_Drought_Reproduction_P Parameter: Plant Line Value: WS
  misc_feature: MA Experiment 20001905 PARAMETER Experiment Name: At_Drought_Reproduction_P Parameter: Timepoint (day) Value: 10
  misc_feature: MA Experiment 20001905 PARAMETER Experiment Name: At_Drought_Reproduction_P Parameter: Tissue Value: Rosettes
  misc_feature: MA Experiment 20001905 PARAMETER Experiment Name: At_Drought_Reproduction_P Parameter: Treatment Value: Drought vs. No Drought
atctaactctctctctactgcaatttttagggttttatcctccgaaagtctcaacctttttcttatcctcaacaaggagaaatggcggcgactcaacttacagcgtcaccagtgactatgtcagcaaggagcttagcctcgctggatggtctcagagcttcgagtgtcaagttttcatctttgaaaccagggacccttagacagagccagttccgtcgtttggttgtcaaagctgcttctgttgttgcccctaagtatacttcaattaagccattgggagatcgagttttggtgaagatcaaggaggcagaggagaagactttaggtggtatcttacttccatccactgctcaatcaaaacctcaaggaggtgaagtcgttgccgtgggtgaaggaagaactattgggaagaacaaaattgatatcactgtccctactggagcacaaattatctactccaaatacgcaggaactgaggtggagttcaatgatgtgaagcatcttatcctcaaggaagatgatattgttggcattcttgagacagaggacatcaaagatctcaaacctttgaatgaccgagtctttattaaggttgctgaggcggaggagaaaacagctggagggttgttgttaaccgagactaccaaagagaagccttctattggcacggtgatagcagttggaccgggttccctagacgaggaaggtaaaattacgcctctaccagtatcaaccggaagcacagtactttactccaagtatgctggtaacgacttcaagggcaaagatggttccaactacattgccctcagagcttcagatgtgatggctatactttcttagttatgttatatctttgtaatctgcaacttgtatcccaattgtggaaattttttccgtaaacgggcctgagcataatctggaataaagacttgagtttgaaaatgtgattttattgcc

SEQ ID NO: 24239 - protein, 253 aa, Arabidopsis thaliana
  peptide (1)..(253): Ceres Seq. ID no. 12466074
  misc_feature (158)..(253): Pfam Name: Chaperonin 10 Kd subunit Pfam Description: Chaperonin 10 Kd subunit
  misc_feature (158)..(253): Pfam Name: Chaperonin 10 Kd subunit Pfam Description: Chaperonin 10 Kd subunit
  misc_feature (61)..(153): Homolog of NCBI NO: 23474135 NR Description: hypothetical protein [Desulfovibrio desulfuricans
  misc_feature (154)..(253): Homolog of NCBI NO: 11467285 NR Description: GroES [Cyanophora paradoxa]
  misc_feature (62)..(153): Homolog of NCBI NO: 2493659 NR Description: 10 kDa chaperonin (Protein Cpn10) (groES protein)
  misc_feature (159)..(253): Homolog of NCBI NO: 3599923 NR Description: GroES/HSP10 homolog [Lawsonia intracellularis]
  misc_feature (157)..(252): Homolog of NCBI NO: 22297730 NR Description: 10kD chaperonin [Thermosynechococcus elongatus
  misc_feature (1)..(253): Homolog of NCBI NO: 25453528 NR Description: chaperonin 10 [imported] - Arabidopsis thaliana
  misc_feature (154)..(253): Homolog of NCBI NO: 11467285 NR Description: GroES [Cyanophora paradoxa]
  misc_feature (1)..(253): Homolog of NCBI NO: 21780187 NR Description: cp10-like protein [Gossypium hirsutum]
  misc_feature (1)..(253): Homolog of NCBI NO: 7331143 NR Description: chaperonin 21 precursor [Lycopersicon esculentum]
  misc_feature (1)..(253): Homolog of NCBI NO: 399241 NR Description: 20 kDa chaperonin, chloroplast precursor (Protein (Chloroplast protein Cpn10) (Chloroplast chaperonin 10)
  misc_feature (157)..(252): Homolog of NCBI NO: 22297730 NR Description: 10kD chaperonin [Thermosynechococcus elongatus
  misc_feature (159)..(253): Homolog of NCBI NO: 3599923 NR Description: GroES/HSP10 homolog [Lawsonia intracellularis]
  misc_feature (62)..(153): Homolog of NCBI NO: 2493659 NR Description: 10 kDa chaperonin (Protein Cpn10) (groES protein)
  misc_feature (61)..(153): Homolog of NCBI NO: 23474135 NR Description: hypothetical protein [Desulfovibrio desulfuricans
  misc_feature (1)..(253): Homolog of NCBI NO: 15242045 NR Description: chloroplast Cpn21 protein
  misc_feature (1)..(253): Homolog of NCBI NO: 399241 NR Description: 20 kDa chaperonin, chloroplast precursor (Protein (Chloroplast protein Cpn10) (Chloroplast chaperonin 10)
  misc_feature (1)..(253): Homolog of NCBI NO: 7331143 NR Description: chaperonin 21 precursor [Lycopersicon esculentum]
  misc_feature (1)..(253): Homolog of NCBI NO: 21780187 NR Description: cp10-like protein [Gossypium hirsutum]
  misc_feature (1)..(253): Homolog of NCBI NO: 25453528 NR Description: chaperonin 10 [imported] - Arabidopsis thaliana
  misc_feature (1)..(253): Homolog of NCBI NO: 15242045 NR Description: chloroplast Cpn21 protein
MAATQLTASPVTMSARSLASLDGLRASSVKFSSLKPGTLRQSQFRRLVVKAASVVAPKYTSIKPLGDRVLVKIKEAEEKTLGGILLPSTAQSKPQGGEVVAVGEGRTIGKNKIDITVPTGAQIIYSKYAGTEVEFNDVKHLILKEDDIVGILETEDIKDLKPLNDRVFIKVAEAEEKTAGGLLLTETTKEKPSIGTVIAVGPGSLDEEGKITPLPVSTGSTVLYSKYAGNDFKGKDGSNYIALRASDVMAILS

SEQ ID NO: 24240 - protein, 241 aa, Arabidopsis thaliana
  peptide (1)..(241): Ceres Seq. ID no. 12466075
  misc_feature (146)..(241): Pfam Name: Chaperonin 10 Kd subunit Pfam Description: Chaperonin 10 Kd subunit
  misc_feature (146)..(241): Pfam Name: Chaperonin 10 Kd subunit Pfam Description: Chaperonin 10 Kd subunit
  misc_feature (49)..(141): Homolog of NCBI NO: 23474135 NR Description: hypothetical protein [Desulfovibrio desulfuricans
  misc_feature (142)..(241): Homolog of NCBI NO: 11467285 NR Description: GroES [Cyanophora paradoxa]
  misc_feature (50)..(141): Homolog of NCBI NO: 2493659 NR Description: 10 kDa chaperonin (Protein Cpn10) (groES protein)
  misc_feature (147)..(241): Homolog of NCBI NO: 3599923 NR Description: GroES/HSP10 homolog [Lawsonia intracellularis]
  misc_feature (145)..(240): Homolog of NCBI NO: 22297730 NR Description: 10kD chaperonin [Thermosynechococcus elongatus
  misc_feature (49)..(141): Homolog of NCBI NO: 23474135 NR Description: hypothetical protein [Desulfovibrio desulfuricans
  misc_feature (50)..(141): Homolog of NCBI NO: 2493659 NR Description: 10 kDa chaperonin (Protein Cpn10) (groES protein)
  misc_feature (145)..(240): Homolog of NCBI NO: 22297730 NR Description: 10kD chaperonin [Thermosynechococcus elongatus
  misc_feature (1)..(241): Homolog of NCBI NO: 15242045 NR Description: chloroplast Cpn21 protein
  misc_feature (1)..(241): Homolog of NCBI NO: 25453528 NR Description: chaperonin 10 [imported] - Arabidopsis thaliana
  misc_feature (1)..(241): Homolog of NCBI NO: 21780187 NR Description: cp10-like protein [Gossypium hirsutum]
  misc_feature (1)..(241): Homolog of NCBI NO: 7331143 NR Description: chaperonin 21 precursor [Lycopersicon esculentum]
  misc_feature (1)..(241): Homolog of NCBI NO: 399241 NR Description: 20 kDa chaperonin, chloroplast precursor (Protein (Chloroplast protein Cpn10) (Chloroplast chaperonin 10)
  misc_feature (147)..(241): Homolog of NCBI NO: 3599923 NR Description: GroES/HSP10 homolog [Lawsonia intracellularis]
  misc_feature (142)..(241): Homolog of NCBI NO: 11467285 NR Description: GroES [Cyanophora paradoxa]
  misc_feature (1)..(241): Homolog of NCBI NO: 399241 NR Description: 20 kDa chaperonin, chloroplast precursor (Protein (Chloroplast protein Cpn10) (Chloroplast chaperonin 10)
  misc_feature (1)..(241): Homolog of NCBI NO: 7331143 NR Description: chaperonin 21 precursor [Lycopersicon esculentum]
  misc_feature (1)..(241): Homolog of NCBI NO: 21780187 NR Description: cp10-like protein [Gossypium hirsutum]
  misc_feature (1)..(241): Homolog of NCBI NO: 25453528 NR Description: chaperonin 10 [imported] - Arabidopsis thaliana
  misc_feature (1)..(241): Homolog of NCBI NO: 15242045 NR Description: chloroplast Cpn21 protein
MSARSLASLDGLRASSVKFSSLKPGTLRQSQFRRLVVKAASVVAPKYTSIKPLGDRVLVKIKEAEEKTLGGILLPSTAQSKPQGGEVVAVGEGRTIGKNKIDITVPTGAQIIYSKYAGTEVEFNDVKHLILKEDDIVGILETEDIKDLKPLNDRVFIKVAEAEEKTAGGLLLTETTKEKPSIGTVIAVGPGSLDEEGKITPLPVSTGSTVLYSKYAGNDFKGKDGSNYIALRASDVMAILS

SEQ ID NO: 24241 - DNA, 1085 bp, Arabidopsis thaliana
  misc_feature (1)..(1085): Ceres Seq. ID no. 13500142
  misc_feature: MA Experiment ID: 108569 Result: Down-regulated in Transcription
  misc_feature: MA Experiment 108569 PARAMETER Experiment Name: At_0.001%_MeJA__cDNA_P Parameter: Timepoint (hr) Value: 6
  misc_feature: MA Experiment 108569 PARAMETER Experiment Name: At_0.001%_MeJA__cDNA_P Parameter: Tissue Value: Aerial
  misc_feature: MA Experiment 108569 PARAMETER Experiment Name: At_0.001%_MeJA__cDNA_P Parameter: Treatment Value: 0.001% MeJA vs. No Treatment
  misc_feature: MA Experiment ID: 20000179 Result: Up-regulated in Transcription
  misc_feature: MA Experiment 20000179 PARAMETER Experiment Name: At_Germinating_Seeds_P Parameter: Age (hr) Value: 6 vs. 0
  misc_feature: MA Experiment 20000179 PARAMETER Experiment Name: At_Germinating_Seeds_P Parameter: Tissue Value: Germinating Seeds
  misc_feature: MA Experiment ID: 20000180 Result: Up-regulated in Transcription
  misc_feature: MA Experiment 20000180 PARAMETER Experiment Name: At_Germinating_Seeds_P Parameter: Age (hr) Value: 24 vs. 0
  misc_feature: MA Experiment 20000180 PARAMETER Experiment Name: At_Germinating_Seeds_P Parameter: Tissue Value: Germinating Seeds
  misc_feature: MA Experiment ID: 20000794 Result: Up-regulated in Transcription
  misc_feature: MA Experiment 20000794 PARAMETER Experiment Name: At_Petals_P Parameter: Age (day) Value: 23-25 days
  misc_feature: MA Experiment 20000794 PARAMETER Experiment Name: At_Petals_P Parameter: Plant Line Value: WS
  misc_feature: MA Experiment 20000794 PARAMETER Experiment Name: At_Petals_P Parameter: Tissue Value: Petals vs. Whole plant
atatgtcaggaccggtccgcaggacaagcatgtaataaaactgtgtgttttctacattttctatgaaatgggtgtaattgaaagatactaaatgttagggcttttcagaaacttccgttacgttttaggcgtttaacacaattattattttctaaaacgagagccgtttaacgagaaagagaaatttctaactccagagagcgaagaacacaatcccagagtagcagaatctgatccatcccacctttttcaattctcaggcaaagataagtcaaagttgaaaatggaagggactgtgttcacgccttgtttggaaggaatgaagcatgtcaaatctgatcaaggcgagatgcttactaagccatttttagagctttgcaagaccatcttgcctgttatagataaatttggagctgctatgactctcgtcaaatctgacattggtggcaacataacgaggttggagaagaactacttgtctgatcccgacaagttcaagtacttgtacacctttgttcaagtcgaaattgagtctaagatagcaaaaggatcgtctagctgtacaaacggtcttctctggttaaccagagcaatggatttcttagtggagctgttccgaaacttggtagcacatcaagactggtcaatgccacaagcttgtgctgactcataccaaaaaacactcaagaaatggcacggatggctcgccagctctaccttctctatggctttaaagctagctccggacaggaagaagttcatggatgtcatatctggttctggtaacatccaagccgacatggaaaggttttgtgctgagtttggtccgtttcttcatgataatcataagtttctggctagcgtcggtatggatgacatgaaagcttcttaagtcatcatatgattatcgccggtatcaaatcttctttgccggaatctttgtctgttttaacttttctccttccaattatagaacctccaaaaagaaacagaataatgtgttggtttctatctgaatgttcactttatattacaagttataacatacgaatcaatcttatcaactcttcttgttaatgtttgtt

SEQ ID NO: 24242 - protein, 202 aa, Arabidopsis thaliana
  peptide (1)..(202): Ceres Seq. ID no. 13500143
  misc_feature (19)..(164): Homolog of NCBI NO: 7705684 NR Description: putative glycolipid transfer protein [Homo
  misc_feature (19)..(164): Homolog of NCBI NO: 30481662 NR Description: Unknown (protein for MGC:58573) [Mus musculus]
  misc_feature (66)..(201): Homolog of NCBI NO: 21554671 NR Description: unknown [Arabidopsis thaliana]
  misc_feature (66)..(201): Homolog of NCBI NO: 18402939 NR Description: expressed protein [Arabidopsis thaliana]
  misc_feature (59)..(201): Homolog of NCBI NO: 30686173 NR Description: expressed protein [Arabidopsis thaliana]
  misc_feature (25)..(191): Homolog of NCBI NO: 39545646 NR Description: OJ000114_01.1 [Oryza sativa (japonica
  misc_feature (26)..(201): Homolog of NCBI NO: 9280228 NR Description: gene_id:MXL8.12~unknown protein [Arabidopsis
  misc_feature (25)..(202): Homolog of NCBI NO: 38344077 NR Description: OSJNBa0006B20.21 [Oryza sativa (japonica
  misc_feature (1)..(202): Homolog of NCBI NO: 34901156 NR Description: hypothetical protein~similar to Arabidopsis
  misc_feature (1)..(202): Homolog of NCBI NO: 18403285 NR Description: expressed protein [Arabidopsis thaliana]
MEGTVFTPCLEGMKHVKSDQGEMLTKPFLELCKTILPVIDKFGAAMTLVKSDIGGNITRLEKNYLSDPDKFKYLYTFVQVEIESKIAKGSSSCTNGLLWLTRAMDFLVELFRNLVAHQDWSMPQACADSYQKTLKKWHGWLASSTFSMALKLAPDRKKFMDVISGSGNIQADMERFCAEFGPFLHDNHKFLASVGMDDMKAS

SEQ ID NO: 24243 - protein, 190 aa, Arabidopsis thaliana
  peptide (1)..(190): Ceres Seq. ID no. 13500144
  misc_feature (7)..(152): Homolog of NCBI NO: 7705684 NR Description: putative glycolipid transfer protein [Homo
  misc_feature (7)..(152): Homolog of NCBI NO: 30481662 NR Description: Unknown (protein for MGC:58573) [Mus musculus]
  misc_feature (54)..(189): Homolog of NCBI NO: 21554671 NR Description: unknown [Arabidopsis thaliana]
  misc_feature (54)..(189): Homolog of NCBI NO: 18402939 NR Description: expressed protein [Arabidopsis thaliana]
  misc_feature (47)..(189): Homolog of NCBI NO: 30686173 NR Description: expressed protein [Arabidopsis thaliana]
  misc_feature (13)..(179): Homolog of NCBI NO: 39545646 NR Description: OJ000114_01.1 [Oryza sativa (japonica
  misc_feature (14)..(189): Homolog of NCBI NO: 9280228 NR Description: gene_id:MXL8.12~unknown protein [Arabidopsis
  misc_feature (13)..(190): Homolog of NCBI NO: 38344077 NR Description: OSJNBa0006B20.21 [Oryza sativa (japonica
  misc_feature (1)..(190): Homolog of NCBI NO: 34901156 NR Description: hypothetical protein~similar to Arabidopsis
  misc_feature (1)..(190): Homolog of NCBI NO: 18403285 NR Description: expressed protein [Arabidopsis thaliana]
MKHVKSDQGEMLTKPFLELCKTILPVIDKFGAAMTLVKSDIGGNITRLEKNYLSDPDKFKYLYTFVQVEIESKIAKGSSSCTNGLLWLTRAMDFLVELFRNLVAHQDWSMPQACADSYQKTLKKWHGWLASSTFSMALKLAPDRKKFMDVISGSGNIQADMERFCAEFGPFLHDNHKFLASVGMDDMKAS

SEQ ID NO: 24244 - protein, 180 aa, Arabidopsis thaliana
  peptide (1)..(180): Ceres Seq. ID no. 13500145
  misc_feature (1)..(142): Homolog of NCBI NO: 7705684 NR Description: putative glycolipid transfer protein [Homo
  misc_feature (1)..(142): Homolog of NCBI NO: 30481662 NR Description: Unknown (protein for MGC:58573) [Mus musculus]
  misc_feature (44)..(179): Homolog of NCBI NO: 21554671 NR Description: unknown [Arabidopsis thaliana]
  misc_feature (44)..(179): Homolog of NCBI NO: 18402939 NR Description: expressed protein [Arabidopsis thaliana]
  misc_feature (37)..(179): Homolog of NCBI NO: 30686173 NR Description: expressed protein [Arabidopsis thaliana]
  misc_feature (3)..(169): Homolog of NCBI NO: 39545646 NR Description: OJ000114_01.1 [Oryza sativa (japonica
  misc_feature (4)..(179): Homolog of NCBI NO: 9280228 NR Description: gene_id:MXL8.12~unknown protein [Arabidopsis
  misc_feature (3)..(180): Homolog of NCBI NO: 38344077 NR Description: OSJNBa0006B20.21 [Oryza sativa (japonica
  misc_feature (1)..(180): Homolog of NCBI NO: 34901156 NR Description: hypothetical protein~similar to Arabidopsis
  misc_feature (1)..(180): Homolog of NCBI NO: 18403285 NR Description: expressed protein [Arabidopsis thaliana]
MLTKPFLELCKTILPVIDKFGAAMTLVKSDIGGNITRLEKNYLSDPDKFKYLYTFVQVEIESKIAKGSSSCTNGLLWLTRAMDFLVELFRNLVAHQDWSMPQACADSYQKTLKKWHGWLASSTFSMALKLAPDRKKFMDVISGSGNIQADMERFCAEFGPFLHDNHKFLASVGMDDMKAS

SEQ ID NO: 24245 - DNA, 1466 bp, Arabidopsis thaliana
  misc_feature (1)..(1466): Ceres Seq. ID no. 12321835
  misc_feature: MA Experiment ID: 108434 Result: Down-regulated in Transcription
  misc_feature: MA Experiment 108434 PARAMETER Experiment Name: At_Root_Tips_cDNA_P Parameter: Tissue Value: Root Tips
  misc_feature: MA Experiment ID: 108462 Result: Up-regulated in Transcription
  misc_feature: MA Experiment 108462 PARAMETER Experiment Name: At_Germinating_Seeds_cDNA_P Parameter: Age (day) Value: 2 vs. 0
  misc_feature: MA Experiment 108462 PARAMETER Experiment Name: At_Germinating_Seeds_cDNA_P Parameter: Tissue Value: Germinating Seeds
  misc_feature: MA Experiment ID: 108463 Result: Up-regulated in Transcription
  misc_feature: MA Experiment 108463 PARAMETER Experiment Name: At_Germinating_Seeds_cDNA_P Parameter: Age (day) Value: 3 vs. 0
  misc_feature: MA Experiment 108463 PARAMETER Experiment Name: At_Germinating_Seeds_cDNA_P Parameter: Tissue Value: Germinating Seeds
  misc_feature: MA Experiment ID: 108573 Result: Up-regulated in Transcription
  misc_feature: MA Experiment 108573 PARAMETER Experiment Name: At_Drought_cDNA_P Parameter: Timepoint (hr) Value: 6
  misc_feature: MA Experiment 108573 PARAMETER Experiment Name: At_Drought_cDNA_P Parameter: Tissue Value: Aerial
  misc_feature: MA Experiment 108573 PARAMETER Experiment Name: At_Drought_cDNA_P Parameter: Treatment Value: Drought vs. No Drought
  misc_feature: MA Experiment ID: 108585 Result: Up-regulated in Transcription
  misc_feature: MA Experiment 108585 PARAMETER Experiment Name: At_5mM_NaNP_cDNA_P Parameter: Timepoint (hr) Value: 6
  misc_feature: MA Experiment 108585 PARAMETER Experiment Name: At_5mM_NaNP_cDNA_P Parameter: Tissue Value: Aerial
  misc_feature: MA Experiment 108585 PARAMETER Experiment Name: At_5mM_NaNP_cDNA_P Parameter: Treatment Value: null
  misc_feature: MA Experiment ID: 20000069 Result: Up-regulated in Transcription
  misc_feature: MA Experiment 20000069 PARAMETER Experiment Name: At_100uM_ABA_Mutants_cDNA_P Parameter: Plant Line Value: CS23
  misc_feature: MA Experiment 20000069 PARAMETER Experiment Name: At_100uM_ABA_Mutants_cDNA_P Parameter: Timepoint (hr) Value: 6
  misc_feature: MA Experiment 20000069 PARAMETER Experiment Name: At_100uM_ABA_Mutants_cDNA_P Parameter: Tissue Value: Aerial
  misc_feature: MA Experiment 20000069 PARAMETER Experiment Name: At_100uM_ABA_Mutants_cDNA_P Parameter: Treatment Value: 100uM ABA vs. No Treatment
  misc_feature: MA Experiment ID: 20000070 Result: Up-regulated in Transcription
  misc_feature: MA Experiment 20000070 PARAMETER Experiment Name: At_100uM_ABA_Mutants_cDNA_P Parameter: Plant Line Value: CS24
  misc_feature: MA Experiment 20000070 PARAMETER Experiment Name: At_100uM_ABA_Mutants_cDNA_P Parameter: Timepoint (hr) Value: 6
  misc_feature: MA Experiment 20000070 PARAMETER Experiment Name: At_100uM_ABA_Mutants_cDNA_P Parameter: Tissue Value: Aerial
  misc_feature: MA Experiment 20000070 PARAMETER Experiment Name: At_100uM_ABA_Mutants_cDNA_P Parameter: Treatment Value: 100uM ABA vs. No Treatment
  misc_feature: MA Experiment ID: 20000436 Result: Up-regulated in Transcription
  misc_feature: MA Experiment 20000436 PARAMETER Experiment Name: At_Drought_P Parameter: Age (day) Value: 7
  misc_feature: MA Experiment 20000436 PARAMETER Experiment Name: At_Drought_P Parameter: Organism Value: A. thaliana
  misc_feature: MA Experiment 20000436 PARAMETER Experiment Name: At_Drought_P Parameter: Plant Line Value: WS
  misc_feature: MA Experiment 20000436 PARAMETER Experiment Name: At_Drought_P Parameter: Timepoint (hr) Value: 12
  misc_feature: MA Experiment 20000436 PARAMETER Experiment Name: At_Drought_P Parameter: Tissue Value: Whole Plant
  misc_feature: MA Experiment 20000436 PARAMETER Experiment Name: At_Drought_P Parameter: Treatment Value: Drought vs. No Drought
  misc_feature: MA Experiment ID: 20000437 Result: Up-regulated in Transcription
  misc_feature: MA Experiment 20000437 PARAMETER Experiment Name: At_Drought_P Parameter: Age (day) Value: 8
  misc_feature: MA Experiment 20000437 PARAMETER Experiment Name: At_Drought_P Parameter: Organism Value: A. thaliana
  misc_feature: MA Experiment 20000437 PARAMETER Experiment Name: At_Drought_P Parameter: Plant Line Value: WS
  misc_feature: MA Experiment 20000437 PARAMETER Experiment Name: At_Drought_P Parameter: Timepoint (hr) Value: 24
  misc_feature: MA Experiment 20000437 PARAMETER Experiment Name: At_Drought_P Parameter: Tissue Value: Whole Plant
  misc_feature: MA Experiment 20000437 PARAMETER Experiment Name: At_Drought_P Parameter: Treatment Value: Drought vs. No Drought
  misc_feature: MA Experiment ID: 20001248 Result: Down-regulated in Transcription
  misc_feature: MA Experiment 20001248 PARAMETER Experiment Name: At_Far-red-induction_P Parameter: Age (day) Value: 7
  misc_feature: MA Experiment 20001248 PARAMETER Experiment Name: At_Far-red-induction_P Parameter: Light Value: Far-red vs. White
  misc_feature: MA Experiment 20001248 PARAMETER Experiment Name: At_Far-red-induction_P Parameter: Organism Value: A. thaliana
  misc_feature: MA Experiment 20001248 PARAMETER Experiment Name: At_Far-red-induction_P Parameter: Plant Line Value: Columbia
  misc_feature: MA Experiment 20001248 PARAMETER Experiment Name: At_Far-red-induction_P Parameter: Timepoint (hr) Value: 4
  misc_feature: MA Experiment 20001248 PARAMETER Experiment Name: At_Far-red-induction_P Parameter: Tissue Value: Whole Plant
  misc_feature: MA Experiment ID: 20001458 Result: Up-regulated in Transcription
  misc_feature: MA Experiment 20001458 PARAMETER Experiment Name: At_50mM_NH4NO3_L-to-H_P Parameter: Age (day) Value: Undefined
  misc_feature: MA Experiment 20001458 PARAMETER Experiment Name: At_50mM_NH4NO3_L-to-H_P Parameter: Organism Value: Undefined
  misc_feature: MA Experiment 20001458 PARAMETER Experiment Name: At_50mM_NH4NO3_L-to-H_P Parameter: Plant Line Value: Undefined
  misc_feature: MA Experiment 20001458 PARAMETER Experiment Name: At_50mM_NH4NO3_L-to-H_P Parameter: Timepoint (hr) Value: 2
  misc_feature: MA Experiment 20001458 PARAMETER Experiment Name: At_50mM_NH4NO3_L-to-H_P Parameter: Tissue Value: Siliques
  misc_feature: MA Experiment 20001458 PARAMETER Experiment Name: At_50mM_NH4NO3_L-to-H_P Parameter: Treatment Value: 50mM NH4NO3 vs. 100mM Manitol
  misc_feature: MA Experiment ID: 20001555 Result: Up-regulated in Transcription
  misc_feature: MA Experiment 20001555 PARAMETER Experiment Name: At_Drought_Soil_Dry_P Parameter: Age (day) Value: 24
  misc_feature: MA Experiment 20001555 PARAMETER Experiment Name: At_Drought_Soil_Dry_P Parameter: Organism Value: A. thaliana
  misc_feature: MA Experiment 20001555 PARAMETER Experiment Name: At_Drought_Soil_Dry_P Parameter: Plant Line Value: WS
  misc_feature: MA Experiment 20001555 PARAMETER Experiment Name: At_Drought_Soil_Dry_P Parameter: Post Timepoint (hr) Value: None
  misc_feature: MA Experiment 20001555 PARAMETER Experiment Name: At_Drought_Soil_Dry_P Parameter: Post-Treatment Value: None
  misc_feature: MA Experiment 20001555 PARAMETER Experiment Name: At_Drought_Soil_Dry_P Parameter: Timepoint (day) Value: 10
  misc_feature: MA Experiment 20001555 PARAMETER Experiment Name: At_Drought_Soil_Dry_P Parameter: Treatment Value: Drought vs. No Drought
  misc_feature: MA Experiment ID: 20001556 Result: Up-regulated in Transcription
  misc_feature: MA Experiment 20001556 PARAMETER Experiment Name: At_Drought_Soil_Dry_P Parameter: Age (day) Value: 26
  misc_feature: MA Experiment 20001556 PARAMETER Experiment Name: At_Drought_Soil_Dry_P Parameter: Organism Value: A. thaliana
  misc_feature: MA Experiment 20001556 PARAMETER Experiment Name: At_Drought_Soil_Dry_P Parameter: Plant Line Value: WS
  misc_feature: MA Experiment 20001556 PARAMETER Experiment Name: At_Drought_Soil_Dry_P Parameter: Post Timepoint (hr) Value: None
  misc_feature: MA Experiment 20001556 PARAMETER Experiment Name: At_Drought_Soil_Dry_P Parameter: Post-Treatment Value: None
  misc_feature: MA Experiment 20001556 PARAMETER Experiment Name: At_Drought_Soil_Dry_P Parameter: Timepoint (day) Value: 12
  misc_feature: MA Experiment 20001556 PARAMETER Experiment Name: At_Drought_Soil_Dry_P Parameter: Treatment Value: Drought vs. No Drought
  misc_feature: MA Experiment ID: 20001557 Result: Up-regulated in Transcription
  misc_feature: MA Experiment 20001557 PARAMETER Experiment Name: At_Drought_Soil_Dry_P Parameter: Age (day) Value: 27
  misc_feature: MA Experiment 20001557 PARAMETER Experiment Name: At_Drought_Soil_Dry_P Parameter: Organism Value: A. thaliana
  misc_feature: MA Experiment 20001557 PARAMETER Experiment Name: At_Drought_Soil_Dry_P Parameter: Plant Line Value: WS
  misc_feature: MA Experiment 20001557 PARAMETER Experiment Name: At_Drought_Soil_Dry_P Parameter: Post Timepoint (hr) Value: 3
  misc_feature: MA Experiment 20001557 PARAMETER Experiment Name: At_Drought_Soil_Dry_P Parameter: Post-Treatment Value: Re-Water vs. No Drought
  misc_feature: MA Experiment 20001557 PARAMETER Experiment Name: At_Drought_Soil_Dry_P Parameter: Timepoint (day) Value: 13
  misc_feature: MA Experiment 20001557 PARAMETER Experiment Name: At_Drought_Soil_Dry_P Parameter: Treatment Value: Drought vs. No Drought
  misc_feature: MA Experiment ID: 20001558 Result: Up-regulated in Transcription
  misc_feature: MA Experiment 20001558 PARAMETER Experiment Name: At_Drought_Soil_Dry_P Parameter: Age (day) Value: 27
  misc_feature: MA Experiment 20001558 PARAMETER Experiment Name: At_Drought_Soil_Dry_P Parameter: Organism Value: A. thaliana
  misc_feature: MA Experiment 20001558 PARAMETER Experiment Name: At_Drought_Soil_Dry_P Parameter: Plant Line Value: WS
  misc_feature: MA Experiment 20001558 PARAMETER Experiment Name: At_Drought_Soil_Dry_P Parameter: Post Timepoint (hr) Value: 6
  misc_feature: MA Experiment 20001558 PARAMETER Experiment Name: At_Drought_Soil_Dry_P Parameter: Post-Treatment Value: Re-Water vs. No Drought
  misc_feature: MA Experiment 20001558 PARAMETER Experiment Name: At_Drought_Soil_Dry_P Parameter: Timepoint (day) Value: 13
  misc_feature: MA Experiment 20001558 PARAMETER Experiment Name: At_Drought_Soil_Dry_P Parameter: Treatment Value: Drought vs. No Drought
  misc_feature: MA Experiment ID: 20001560 Result: Up-regulated in Transcription
  misc_feature: MA Experiment 20001560 PARAMETER Experiment Name: At_Drought_Soil_Dry_P Parameter: Age (day) Value: 28
  misc_feature: MA Experiment 20001560 PARAMETER Experiment Name: At_Drought_Soil_Dry_P Parameter: Organism Value: A. thaliana
  misc_feature: MA Experiment 20001560 PARAMETER Experiment Name: At_Drought_Soil_Dry_P Parameter: Plant Line Value: WS
  misc_feature: MA Experiment 20001560 PARAMETER Experiment Name: At_Drought_Soil_Dry_P Parameter: Post Timepoint (hr) Value: None
  misc_feature: MA Experiment 20001560 PARAMETER Experiment Name: At_Drought_Soil_Dry_P Parameter: Post-Treatment Value: None
  misc_feature: MA Experiment 20001560 PARAMETER Experiment Name: At_Drought_Soil_Dry_P Parameter: Timepoint (day) Value: 14
  misc_feature: MA Experiment 20001560 PARAMETER Experiment Name: At_Drought_Soil_Dry_P Parameter: Treatment Value: Drought vs. No Drought
  misc_feature: MA Experiment ID: 20001904 Result: Up-regulated in Transcription
  misc_feature: MA Experiment 20001904 PARAMETER Experiment Name: At_Drought_Reproduction_P Parameter: Age (day) Value: 37
  misc_feature: MA Experiment 20001904 PARAMETER Experiment Name: At_Drought_Reproduction_P Parameter: Organism Value: A. thaliana
  misc_feature: MA Experiment 20001904 PARAMETER Experiment Name: At_Drought_Reproduction_P Parameter: Plant Line Value: WS
  misc_feature: MA Experiment 20001904 PARAMETER Experiment Name: At_Drought_Reproduction_P Parameter: Timepoint (day) Value: 7
  misc_feature: MA Experiment 20001904 PARAMETER Experiment Name: At_Drought_Reproduction_P Parameter: Tissue Value: Rosettes
  misc_feature: MA Experiment 20001904 PARAMETER Experiment Name: At_Drought_Reproduction_P Parameter: Treatment Value: Drought vs. No Drought
  misc_feature: MA Experiment ID: 20001905 Result: Up-regulated in Transcription
  misc_feature: MA Experiment 20001905 PARAMETER Experiment Name: At_Drought_Reproduction_P Parameter: Age (day) Value: 40
  misc_feature: MA Experiment 20001905 PARAMETER Experiment Name: At_Drought_Reproduction_P Parameter: Organism Value: A. thaliana
  misc_feature: MA Experiment 20001905 PARAMETER Experiment Name: At_Drought_Reproduction_P Parameter: Plant Line Value: WS
  misc_feature: MA Experiment 20001905 PARAMETER Experiment Name: At_Drought_Reproduction_P Parameter: Timepoint (day) Value: 10
  misc_feature: MA Experiment 20001905 PARAMETER Experiment Name: At_Drought_Reproduction_P Parameter: Tissue Value: Rosettes
  misc_feature: MA Experiment 20001905 PARAMETER Experiment Name: At_Drought_Reproduction_P Parameter: Treatment Value: Drought vs. No Drought
  misc_feature: MA Experiment ID: 20001910 Result: Up-regulated in Transcription
  misc_feature: MA Experiment 20001910 PARAMETER Experiment Name: At_Drought_Reproduction_P Parameter: Age (day) Value: 37
  misc_feature: MA Experiment 20001910 PARAMETER Experiment Name: At_Drought_Reproduction_P Parameter: Organism Value: A. thaliana
  misc_feature: MA Experiment 20001910 PARAMETER Experiment Name: At_Drought_Reproduction_P Parameter: Plant Line Value: WS
  misc_feature: MA Experiment 20001910 PARAMETER Experiment Name: At_Drought_Reproduction_P Parameter: Timepoint (day) Value: 7
  misc_feature: MA Experiment 20001910 PARAMETER Experiment Name: At_Drought_Reproduction_P Parameter: Tissue Value: Flowers
  misc_feature: MA Experiment 20001910 PARAMETER Experiment Name: At_Drought_Reproduction_P Parameter: Treatment Value: Drought vs. No Drought
  misc_feature: MA Experiment ID: 20001911 Result: Up-regulated in Transcription
  misc_feature: MA Experiment 20001911 PARAMETER Experiment Name: At_Drought_Reproduction_P Parameter: Age (day) Value: 40
  misc_feature: MA Experiment 20001911 PARAMETER Experiment Name: At_Drought_Reproduction_P Parameter: Organism Value: A. thaliana
  misc_feature: MA Experiment 20001911 PARAMETER Experiment Name: At_Drought_Reproduction_P Parameter: Plant Line Value: WS
  misc_feature: MA Experiment 20001911 PARAMETER Experiment Name: At_Drought_Reproduction_P Parameter: Timepoint (day) Value: 10
  misc_feature: MA Experiment 20001911 PARAMETER Experiment Name: At_Drought_Reproduction_P Parameter: Tissue Value: Flowers
  misc_feature: MA Experiment 20001911 PARAMETER Experiment Name: At_Drought_Reproduction_P Parameter: Treatment Value: Drought vs. No Drought
acgataagtgaaaaaagagagaaagagccagaggagagagagaagcttttggtcgtgttcgtttttctttctttctttcttgcaataataaatagaagcaaatcatactccaaaaaccttcattcaaaccttgctaccactttcttcccctaaaagatttcatctaaattcagtaaactcatctacgagttcttgtttttctttaaattttctaagagagagcctaagctgtttaatatagtcatctaatatttagagagatggtgggagagagaatgtggtggtggtcatcatcgtcgacgaaactccgatcaaaccttgaaagatttctcagaggaatcactccaaaacctccttctttctctttatcacagagctgcaagaatgatttgaacagtttgtggatccatgagaacaaagatgagattgaatatttcaggcttagtgatctttgggactgttttgatgagccaagcgcgtatggacttggatcaaaggtcgacttaaacaatggtgaatccgttatgcagtactatgtcccgtatctatccgccattcaaatctatactaacaaatctacagccatttctaggattcatagtgatgtggttgattgtgagagtgaatgttggagtgatgatagtgagattgagaagttgtcaaggtcaatgagcagtggttctagcaaaatatgggattctgtttctgatgattcgggttatgagatcgatggtacttcttcattgatgcgagataagctcggttctattgattttcagtactttgagtccgttaaaccgcacttgcgtgttcctcttaccgctaaggtaaatgaattggctgagaagtatccgggactttcgactctaaggagtgttgatttgtctccagcaagttggttggccattgcttggtatccaatttaccacattccctctcggaagacccataaagatttatcgacatgtttcttgagttatcatactttatcttcggctttccaaggtaacttgatagagggagacgatgagattaacgaaaccatgaaagaagaaacattgtgttttgatgaaggaccggtgaccaagagtatacctttggctccttttggtttagttagttacaaattgcaaggagatttgtggaggaatcaagaatgtggtgaccaaggacgtatagtttatcttcgcagtgcagctgattcgtggctgaaacagcttaatgttcatgatcaccatgaccatagcttcttctccatgaacatgagcttgtagatccaaaaaaagagagccaagactctgtttttttgctctgtttttagttgttttcttagccaagactctgtttttttgctctgtttttagttgttttaagaatcttaggtatatagactcgaaatgtagaggtttcgtttccttctgcttgaacccgtggaaaataaagagaattaggcttgtttttggctc

SEQ ID NO: 24246 - protein, 337 aa, Arabidopsis thaliana
  peptide (1)..(337): Ceres Seq. ID no. 12321836
  misc_feature (18)..(331): Pfam Name: Protein of unknown function (DUF789) Pfam Description: Protein of unknown function (DUF789)
  misc_feature (13)..(331): Homolog of NCBI NO: 37535654 NR Description: unknown protein [Oryza sativa (japonica
  misc_feature (13)..(337): Homolog of NCBI NO: 18958013 NR Description: At1g03610/F21B7_13 [Arabidopsis thaliana]
  misc_feature (13)..(337): Homolog of NCBI NO: 18379117 NR Description: expressed protein
  misc_feature (18)..(332): Homolog of NCBI NO: 25373431 NR Description: hypothetical protein AT4g03420 [imported] -
  misc_feature (18)..(332): Homolog of NCBI NO: 22328289 NR Description: hypothetical protein
  misc_feature (13)..(337): Homolog of NCBI NO: 9280648 NR Description: F21B7.22 [Arabidopsis thaliana]
  misc_feature (6)..(336): Homolog of NCBI NO: 27754726 NR Description: unknown protein [Arabidopsis thaliana]
  misc_feature (6)..(336): Homolog of NCBI NO: 15219407 NR Description: hypothetical protein; protein id: At1g73210.1
  misc_feature (1)..(337): Homolog of NCBI NO: 18394539 NR Description: expressed protein
  misc_feature (1)..(337): Homolog of NCBI NO: 21593308 NR Description: unknown [Arabidopsis thaliana]
MVGERMWWWSSSSTKLRSNLERFLRGITPKPPSFSLSQSCKNDLNSLWIHENKDEIEYFRLSDLWDCFDEPSAYGLGSKVDLNNGESVMQYYVPYLSAIQIYTNKSTAISRIHSDVVDCESECWSDDSEIEKLSRSMSSGSSKIWDSVSDDSGYEIDGTSSLMRDKLGSIDFQYFESVKPHLRVPLTAKVNELAEKYPGLSTLRSVDLSPASWLAIAWYPIYHIPSRKTHKDLSTCFLSYHTLSSAFQGNLIEGDDEINETMKEETLCFDEGPVTKSIPLAPFGLVSYKLQGDLWRNQECGDQGRIVYLRSAADSWLKQLNVHDHHDHSFFSMNMSL

SEQ ID NO: 24247 - protein, 332 aa, Arabidopsis thaliana
  peptide (1)..(332): Ceres Seq. ID no. 12321837
  misc_feature (13)..(326): Pfam Name: Protein of unknown function (DUF789) Pfam Description: Protein of unknown function (DUF789)
  misc_feature (8)..(326): Homolog of NCBI NO: 37535654 NR Description: unknown protein [Oryza sativa (japonica
  misc_feature (8)..(332): Homolog of NCBI NO: 18958013 NR Description: At1g03610/F21B7_13 [Arabidopsis thaliana]
  misc_feature (8)..(332): Homolog of NCBI NO: 18379117 NR Description: expressed protein
  misc_feature (13)..(327): Homolog of NCBI NO: 25373431 NR Description: hypothetical protein AT4g03420 [imported] -
  misc_feature (13)..(327): Homolog of NCBI NO: 22328289 NR Description: hypothetical protein
  misc_feature (8)..(332): Homolog of NCBI NO: 9280648 NR Description: F21B7.22 [Arabidopsis thaliana]
  misc_feature (1)..(331): Homolog of NCBI NO: 27754726 NR Description: unknown protein [Arabidopsis thaliana]
  misc_feature (1)..(331): Homolog of NCBI NO: 15219407 NR Description: hypothetical protein; protein id: At1g73210.1
  misc_feature (1)..(332): Homolog of NCBI NO: 18394539 NR Description: expressed protein
  misc_feature (1)..(332): Homolog of NCBI NO: 21593308 NR Description: unknown [Arabidopsis thaliana]
MWWWSSSSTKLRSNLERFLRGITPKPPSFSLSQSCKNDLNSLWIHENKDEIEYFRLSDLWDCFDEPSAYGLGSKVDLNNGESVMQYYVPYLSAIQIYTNKSTAISRIHSDVVDCESECWSDDSEIEKLSRSMSSGSSKIWDSVSDDSGYEIDGTSSLMRDKLGSIDFQYFESVKPHLRVPLTAKVNELAEKYPGLSTLRSVDLSPASWLAIAWYPIYHIPSRKTHKDLSTCFLSYHTLSSAFQGNLIEGDDEINETMKEETLCFDEGPVTKSIPLAPFGLVSYKLQGDLWRNQECGDQGRIVYLRSAADSWLKQLNVHDHHDHSFFSMNMSL

SEQ ID NO: 24248 - protein, 249 aa, Arabidopsis thaliana
  peptide (1)..(249): Ceres Seq. ID no. 12321838
  misc_feature (1)..(243): Pfam Name: Protein of unknown function (DUF789) Pfam Description: Protein of unknown function (DUF789)
  misc_feature (1)..(243): Homolog of NCBI NO: 37535654 NR Description: unknown protein [Oryza sativa (japonica
  misc_feature (1)..(249): Homolog of NCBI NO: 18958013 NR Description: At1g03610/F21B7_13 [Arabidopsis thaliana]
  misc_feature (1)..(249): Homolog of NCBI NO: 18379117 NR Description: expressed protein
  misc_feature (1)..(244): Homolog of NCBI NO: 25373431 NR Description: hypothetical protein AT4g03420 [imported] -
  misc_feature (1)..(244): Homolog of NCBI NO: 22328289 NR Description: hypothetical protein
  misc_feature (1)..(249): Homolog of NCBI NO: 9280648 NR Description: F21B7.22 [Arabidopsis thaliana]
  misc_feature (1)..(248): Homolog of NCBI NO: 27754726 NR Description: unknown protein [Arabidopsis thaliana]
  misc_feature (1)..(248): Homolog of NCBI NO: 15219407 NR Description: hypothetical protein; protein id: At1g73210.1
  misc_feature (1)..(249): Homolog of NCBI NO: 18394539 NR Description: expressed protein
  misc_feature (1)..(249): Homolog of NCBI NO: 21593308 NR Description: unknown [Arabidopsis thaliana]
MQYYVPYLSAIQIYTNKSTAISRIHSDVVDCESECWSDDSEIEKLSRSMSSGSSKIWDSVSDDSGYEIDGTSSLMRDKLGSIDFQYFESVKPHLRVPLTAKVNELAEKYPGLSTLRSVDLSPASWLAIAWYPIYHIPSRKTHKDLSTCFLSYHTLSSAFQGNLIEGDDEINETMKEETLCFDEGPVTKSIPLAPFGLVSYKLQGDLWRNQECGDQGRIVYLRSAADSWLKQLNVHDHHDHSFFSMNMSL

SEQ ID NO: 24249 - DNA, 1076 bp, Arabidopsis thaliana
  misc_feature (1)..(1076): Ceres Seq. ID no. 12321537
  misc_feature: MA Experiment ID: 108473 Result: Down-regulated in Transcription
  misc_feature: MA Experiment 108473 PARAMETER Experiment Name: At_Drought_Flowers_cDNA_P Parameter: Timepoint (hr) Value: 7 d
  misc_feature: MA Experiment 108473 PARAMETER Experiment Name: At_Drought_Flowers_cDNA_P Parameter: Tissue Value: Flower
  misc_feature: MA Experiment 108473 PARAMETER Experiment Name: At_Drought_Flowers_cDNA_P Parameter: Treatment Value: Drought vs. No Drought
  misc_feature: MA Experiment ID: 108501 Result: Down-regulated in Transcription
  misc_feature: MA Experiment 108501 PARAMETER Experiment Name: At_ap2_floral_buds_cDNA_P Parameter: Plant Line Value: ap2 (Ler.)
  misc_feature: MA Experiment 108501 PARAMETER Experiment Name: At_ap2_floral_buds_cDNA_P Parameter: Tissue Value: Closed Flower
  misc_feature: MA Experiment ID: 20000265 Result: Up-regulated in Transcription
  misc_feature: MA Experiment 20000265 PARAMETER Experiment Name: At_Open_Flower_P Parameter: Age (day) Value: 21
  misc_feature: MA Experiment 20000265 PARAMETER Experiment Name: At_Open_Flower_P Parameter: Plant Line Value: WS
  misc_feature: MA Experiment 20000265 PARAMETER Experiment Name: At_Open_Flower_P Parameter: Tissue Value: Closed Flower vs. Whole Plant
  misc_feature: MA Experiment ID: 20001910 Result: Down-regulated in Transcription
  misc_feature: MA Experiment 20001910 PARAMETER Experiment Name: At_Drought_Reproduction_P Parameter: Age (day) Value: 37
  misc_feature: MA Experiment 20001910 PARAMETER Experiment Name: At_Drought_Reproduction_P Parameter: Organism Value: A. thaliana
  misc_feature: MA Experiment 20001910 PARAMETER Experiment Name: At_Drought_Reproduction_P Parameter: Plant Line Value: WS
  misc_feature: MA Experiment 20001910 PARAMETER Experiment Name: At_Drought_Reproduction_P Parameter: Timepoint (day) Value: 7
  misc_feature: MA Experiment 20001910 PARAMETER Experiment Name: At_Drought_Reproduction_P Parameter: Tissue Value: Flowers
  misc_feature: MA Experiment 20001910 PARAMETER Experiment Name: At_Drought_Reproduction_P Parameter: Treatment Value: Drought vs. No Drought
acgaaacataattgtcaaattcaaacaacaaaaaaaaacactctctccctctccgtatctatttaaaatccgatcaggttaatcgagtttatcatttggagaaagcaaatttccaaaaatgtttcgagttagcaatttcgtggttggtctagcaaacacattggtgatgttagtgggcgcttcggccattggttattcgatttacatgttcgttcaccaaggcgtcactgattgtgaatctgccattcggataccacttctcacgaccggactcatcctcttcttggtgtctttgctcggagtgattggatcttgtttcaaggagaatttggcaatggtttcctacttgatcatattgtttgggggcattgttgcattgatgattttctccatatttctcttctttgtgaccaacaaaggagccggtcgtgtggtgtccggtcgagggtataaagagtaccggacggtggatttctcgacgtggcttaatgggttcgttggtgggaagagatgggttgggataaggtcttgtttggctgaggctaacgtttgtgatgatttgagtgatggtcgtgttagtcagatcgctgatgcgttttatcacaagaacttgtctcccatccagtcaggttgttgtaagccaccatcggattgcaacttcgagttcagaaacgcgacgttctggataccgccgagcaaaaacgaaacggcagttgcggccgaaaacggggactgtggtacgtggagcaacgtgcaaacagagttatgtttcaactgcaacgcatgcaaagcgggtgtgttaacgaacataagagagaagtggaggaatcttcttgttttcaacatttgtctcctcattctcctcataaccgtctattcctgcggttgctgtgctcgtcgaaacaatcggacggctaggaaaagtgattctgtctgatcaacaactcaatttcagtttcttgtgtttttctgttttcttagtttgtttggttttttaagttaattatcttttgttttctttggacaatgtcatgttctgtttctcaacaattatcatgaatttatcacatttcacc

SEQ ID NO: 24250 - protein, 272 aa, Arabidopsis thaliana
  peptide (1)..(272): Ceres Seq. ID no. 12321538
  misc_feature (4)..(249): Pfam Name: Tetraspanin family Pfam Description: Tetraspanin family
  misc_feature (160)..(266): Homolog of NCBI NO: 9294106 NR Description: senescence-associated protein-like [Arabidopsis
  misc_feature (1)..(182): Homolog of NCBI NO: 30682045 NR Description: senescence-associated protein family [Arabidopsis
  misc_feature (1)..(182): Homolog of NCBI NO: 9294106 NR Description: senescence-associated protein-like [Arabidopsis
  misc_feature (1)..(267): Homolog of NCBI NO: 15234743 NR Description: senescence-associated protein homolog
  misc_feature (2)..(264): Homolog of NCBI NO: 29367553 NR Description: senescence-associated protein-like protein
  misc_feature (1)..(264): Homolog of NCBI NO: 20197174 NR Description: hypothetical protein [Arabidopsis thaliana]
  misc_feature (1)..(268): Homolog of NCBI NO: 15237197 NR Description: senescence-associated protein 5-like protein
  misc_feature (1)..(263): Homolog of NCBI NO: 3551954 NR Description: senescence-associated protein 5 [Hemerocallis
  misc_feature (1)..(272): Homolog of NCBI NO: 18394621 NR Description: expressed protein
  misc_feature (1)..(272): Homolog of NCBI NO: 21593310 NR Description: unknown [Arabidopsis thaliana]
MFRVSNFVVGLANTLVMLVGASAIGYSIYMFVHQGVTDCESAIRIPLLTTGLILFLVSLLGVIGSCFKENLAMVSYLIILFGGIVALMIFSIFLFFVTNKGAGRVVSGRGYKEYRTVDFSTWLNGFVGGKRWVGIRSCLAEANVCDDLSDGRVSQIADAFYHKNLSPIQSGCCKPPSDCNFEFRNATFWIPPSKNETAVAAENGDCGTWSNVQTELCFNCNACKAGVLTNIREKWRNLLVFNICLLILLITVYSCGCCARRNNRTARKSDSV

SEQ ID NO: 24251 - protein, 256 aa, Arabidopsis thaliana
  peptide (1)..(256): Ceres Seq. ID no. 12321539
  misc_feature (1)..(233): Pfam Name: Tetraspanin family Pfam Description: Tetraspanin family
  misc_feature (144)..(250): Homolog of NCBI NO: 9294106 NR Description: senescence-associated protein-like [Arabidopsis
  misc_feature (1)..(166): Homolog of NCBI NO: 30682045 NR Description: senescence-associated protein family [Arabidopsis
  misc_feature (1)..(166): Homolog of NCBI NO: 9294106 NR Description: senescence-associated protein-like [Arabidopsis
  misc_feature (1)..(251): Homolog of NCBI NO: 15234743 NR Description: senescence-associated protein homolog
  misc_feature (1)..(248): Homolog of NCBI NO: 29367553 NR Description: senescence-associated protein-like protein
  misc_feature (1)..(248): Homolog of NCBI NO: 20197174 NR Description: hypothetical protein [Arabidopsis thaliana]
  misc_feature (1)..(252): Homolog of NCBI NO: 15237197 NR Description: senescence-associated protein 5-like protein
  misc_feature (1)..(247): Homolog of NCBI NO: 3551954 NR Description: senescence-associated protein 5 [Hemerocallis
  misc_feature (1)..(256): Homolog of NCBI NO: 18394621 NR Description: expressed protein
  misc_feature (1)..(256): Homolog of NCBI NO: 21593310 NR Description: unknown [Arabidopsis thaliana]
MLVGASAIGYSIYMFVHQGVTDCESAIRIPLLTTGLILFLVSLLGVIGSCFKENLAMVSYLIILFGGIVALMIFSIFLFFVTNKGAGRVVSGRGYKEYRTVDFSTWLNGFVGGKRWVGIRSCLAEANVCDDLSDGRVSQIADAFYHKNLSPIQSGCCKPPSDCNFEFRNATFWIPPSKNETAVAAENGDCGTWSNVQTELCFNCNACKAGVLTNIREKWRNLLVFNICLLILLITVYSCGCCARRNNRTARKSDSV

SEQ ID NO: 24252 - protein, 243 aa, Arabidopsis thaliana
  peptide (1)..(243): Ceres Seq. ID no. 12321540
  misc_feature (1)..(220): Pfam Name: Tetraspanin family Pfam Description: Tetraspanin family
  misc_feature (131)..(237): Homolog of NCBI NO: 9294106 NR Description: senescence-associated protein-like [Arabidopsis
  misc_feature (1)..(153): Homolog of NCBI NO: 30682045 NR Description: senescence-associated protein family [Arabidopsis
  misc_feature (1)..(153): Homolog of NCBI NO: 9294106 NR Description: senescence-associated protein-like [Arabidopsis
  misc_feature (1)..(238): Homolog of NCBI NO: 15234743 NR Description: senescence-associated protein homolog
  misc_feature (1)..(235): Homolog of NCBI NO: 29367553 NR Description: senescence-associated protein-like protein
  misc_feature (1)..(235): Homolog of NCBI NO: 20197174 NR Description: hypothetical protein [Arabidopsis thaliana]
  misc_feature (1)..(239): Homolog of NCBI NO: 15237197 NR Description: senescence-associated protein 5-like protein
  misc_feature (1)..(234): Homolog of NCBI NO: 3551954 NR Description: senescence-associated protein 5 [Hemerocallis
  misc_feature (1)..(243): Homolog of NCBI NO: 18394621 NR Description: expressed protein
  misc_feature (1)..(243): Homolog of NCBI NO: 21593310 NR Description: unknown [Arabidopsis thaliana]
MFVHQGVTDCESAIRIPLLTTGLILFLVSLLGVIGSCFKENLAMVSYLIILFGGIVALMIFSIFLFFVTNKGAGRVVSGRGYKEYRTVDFSTWLNGFVGGKRWVGIRSCLAEANVCDDLSDGRVSQIADAFYHKNLSPIQSGCCKPPSDCNFEFRNATFWIPPSKNETAVAAENGDCGTWSNVQTELCFNCNACKAGVLTNIREKWRNLLVFNICLLILLITVYSCGCCARRNNRTARKSDSV

SEQ ID NO: 24253 - DNA, 1166 bp, Arabidopsis thaliana
  misc_feature (1)..(1166): Ceres Seq. ID no. 13486826
  misc_feature: MA Experiment ID: 20001905 Result: Up-regulated in Transcription
  misc_feature: MA Experiment 20001905 PARAMETER Experiment Name: At_Drought_Reproduction_P Parameter: Age (day) Value: 40
  misc_feature: MA Experiment 20001905 PARAMETER Experiment Name: At_Drought_Reproduction_P Parameter: Organism Value: A. thaliana
  misc_feature: MA Experiment 20001905 PARAMETER Experiment Name: At_Drought_Reproduction_P Parameter: Plant Line Value: WS
  misc_feature: MA Experiment 20001905 PARAMETER Experiment Name: At_Drought_Reproduction_P Parameter: Timepoint (day) Value: 10
  misc_feature: MA Experiment 20001905 PARAMETER Experiment Name: At_Drought_Reproduction_P Parameter: Tissue Value: Rosettes
  misc_feature: MA Experiment 20001905 PARAMETER Experiment Name: At_Drought_Reproduction_P Parameter: Treatment Value: Drought vs. No Drought
attttcatttcgcgtctcgaccttcgaattcgacaaatccctaattccaaaatcctctcggatctaaaagagtgtgtgataacataagatgtcgtcttctcgggaagagaatgtgtacttagccaagttagctgagcaagctgaacgttatgaggaaatggttgagttcatggagaaagttgcaaagactgttgacaccgatgagcttactgtcgaagagagaaacctcttgtctgttgcttacaagaacgtcattggtgctaggagagcttcctggaggatcatatcttccattgaacagaaggaagaaagcagaggaaacgatgatcatgtttccattatcaaggactacagaggaaagatcgaaactgaactcagcaaaatctgtgatggaatactcaatcttctggattctcaccttgttcccactgcatctttggccgagtccaaagtcttttacctcaaaatgaaaggagattaccacaggtaccttgctgagtttaagactggagctgagaggaaagaagctgctgagagcactctggttgcttacaagtcagctcaggatattgcacttgctgatttagctcctactcatccgattagactgggacttgctcttaacttctctgtcttctactacgagattctcaactcacctgatcgtgcctgcagtctcgcaaaacaggcttttgatgaggccatttctgagctggatacattaggagaagaatcatacaaagacagtacgttgataatgcaacttctccgtgacaatctgaccctttggaactctgacatcaatgatgaggcgggcggtgatgagatcaaggaggcgtcaaaacatgagccggaagaggggaaaccagctgagacagggcagtgaccagagagagagggagagacatttctaagtatgtatggtatggattttccaaaaacatatgatatgattaggggatttgtagaagcagagagaaagatctttatttgattttctccaaaaatctctgttcccttttttttttttattgggttattaaagctgtttgagtctttggttcctgcttcgttgcttgttagtatttaggaagtgaagaaacaaaactttgaattattgctttccattcaactcgtcataaattatcataatcagtgtattattt

SEQ ID NO: 24254 - protein, 265 aa, Arabidopsis thaliana
  peptide (1)..(265): Ceres Seq. ID no. 13486827
  misc_feature (5)..(242): Pfam Name: 14-3-3 protein Pfam Description: 14-3-3 protein
  misc_feature (4)..(252): Homolog of NCBI NO: 12229593 NR Description: 14-3-3-like protein
  misc_feature (3)..(258): Homolog of NCBI NO: 8515888 NR Description: 14-3-3 protein [Populus x canescens]
  misc_feature (4)..(252): Homolog of NCBI NO: 2921512 NR Description: GF14 protein [Fritillaria agrestis]
  misc_feature (3)..(262): Homolog of NCBI NO: 3023187 NR Description: 14-3-3-LIKE PROTEIN (G-BOX BINDING FACTOR)
  misc_feature (3)..(262): Homolog of NCBI NO: 2129595 NR Description: 14-3-3 protein homolog GF14 upsilon chain -
  misc_feature (3)..(262): Homolog of NCBI NO: 18417863 NR Description: 14-3-3 protein GF14 upsilon (grf5) [Arabidopsis
  misc_feature (1)..(265): Homolog of NCBI NO: 18396217 NR Description: 14-3-3 protein GF14 nu (grf7) [Arabidopsis
MSSSREENVYLAKLAEQAERYEEMVEFMEKVAKTVDTDELTVEERNLLSVAYKNVIGARRASWRIISSIEQKEESRGNDDHVSIIKDYRGKIETELSKICDGILNLLDSHLVPTASLAESKVFYLKMKGDYHRYLAEFKTGAERKEAAESTLVAYKSAQDIALADLAPTHPIRLGLALNFSVFYYEILNSPDRACSLAKQAFDEAISELDTLGEESYKDSTLIMQLLRDNLTLWNSDINDEAGGDEIKEASKHEPEEGKPAETGQ

SEQ ID NO: 24255 - protein, 242 aa, Arabidopsis thaliana
  peptide (1)..(242): Ceres Seq. ID no. 13486828
  misc_feature (1)..(219): Pfam Name: 14-3-3 protein Pfam Description: 14-3-3 protein
  misc_feature (1)..(229): Homolog of NCBI NO: 12229593 NR Description: 14-3-3-like protein
  misc_feature (1)..(235): Homolog of NCBI NO: 8515888 NR Description: 14-3-3 protein [Populus x canescens]
  misc_feature (1)..(229): Homolog of NCBI NO: 2921512 NR Description: GF14 protein [Fritillaria agrestis]
  misc_feature (1)..(239): Homolog of NCBI NO: 3023187 NR Description: 14-3-3-LIKE PROTEIN (G-BOX BINDING FACTOR)
  misc_feature (1)..(239): Homolog of NCBI NO: 2129595 NR Description: 14-3-3 protein homolog GF14 upsilon chain -
  misc_feature (1)..(239): Homolog of NCBI NO: 18417863 NR Description: 14-3-3 protein GF14 upsilon (grf5) [Arabidopsis
  misc_feature (1)..(242): Homolog of NCBI NO: 18396217 NR Description: 14-3-3 protein GF14 nu (grf7) [Arabidopsis
MVEFMEKVAKTVDTDELTVEERNLLSVAYKNVIGARRASWRIISSIEQKEESRGNDDHVSIIKDYRGKIETELSKICDGILNLLDSHLVPTASLAESKVFYLKMKGDYHRYLAEFKTGAERKEAAESTLVAYKSAQDIALADLAPTHPIRLGLALNFSVFYYEILNSPDRACSLAKQAFDEAISELDTLGEESYKDSTLIMQLLRDNLTLWNSDINDEAGGDEIKEASKHEPEEGKPAETGQ

SEQ ID NO: 24256 - protein, 238 aa, Arabidopsis thaliana
  peptide (1)..(238): Ceres Seq. ID no. 13486829
  misc_feature (1)..(215): Pfam Name: 14-3-3 protein Pfam Description: 14-3-3 protein
  misc_feature (1)..(225): Homolog of NCBI NO: 12229593 NR Description: 14-3-3-like protein
  misc_feature (1)..(231): Homolog of NCBI NO: 8515888 NR Description: 14-3-3 protein [Populus x canescens]
  misc_feature (1)..(225): Homolog of NCBI NO: 2921512 NR Description: GF14 protein [Fritillaria agrestis]
  misc_feature (1)..(235): Homolog of NCBI NO: 3023187 NR Description: 14-3-3-LIKE PROTEIN (G-BOX BINDING FACTOR)
  misc_feature (1)..(235): Homolog of NCBI NO: 2129595 NR Description: 14-3-3 protein homolog GF14 upsilon chain -
  misc_feature (1)..(235): Homolog of NCBI NO: 18417863 NR Description: 14-3-3 protein GF14 upsilon (grf5) [Arabidopsis
  misc_feature (1)..(238): Homolog of NCBI NO: 18396217 NR Description: 14-3-3 protein GF14 nu (grf7) [Arabidopsis
MEKVAKTVDTDELTVEERNLLSVAYKNVIGARRASWRIISSIEQKEESRGNDDHVSIIKDYRGKIETELSKICDGILNLLDSHLVPTASLAESKVFYLKMKGDYHRYLAEFKTGAERKEAAESTLVAYKSAQDIALADLAPTHPIRLGLALNFSVFYYEILNSPDRACSLAKQAFDEAISELDTLGEESYKDSTLIMQLLRDNLTLWNSDINDEAGGDEIKEASKHEPEEGKPAETGQ

SEQ ID NO: 24257 - DNA, 1050 bp, Arabidopsis thaliana
  misc_feature (1)..(1050): Ceres Seq. ID no. 13591665
  misc_feature: MA Experiment ID: 108434 Result: Up-regulated in Transcription
  misc_feature: MA Experiment 108434 PARAMETER Experiment Name: At_Root_Tips_cDNA_P Parameter: Tissue Value: Root Tips
  misc_feature: MA Experiment ID: 20000234 Result: Up-regulated in Transcription
  misc_feature: MA Experiment 20000234 PARAMETER Experiment Name: At_Siliques_P Parameter: Age (day) Value: 21
  misc_feature: MA Experiment 20000234 PARAMETER Experiment Name: At_Siliques_P Parameter: Organism Value: A. thaliana
  misc_feature: MA Experiment 20000234 PARAMETER Experiment Name: At_Siliques_P Parameter: Plant Line Value: WS
  misc_feature: MA Experiment 20000234 PARAMETER Experiment Name: At_Siliques_P Parameter: Tissue Value: Less Than 5mm Siliques vs. Whole Plant
  misc_feature: MA Experiment ID: 20000265 Result: Up-regulated in Transcription
  misc_feature: MA Experiment 20000265 PARAMETER Experiment Name: At_Open_Flower_P Parameter: Age (day) Value: 21
  misc_feature: MA Experiment 20000265 PARAMETER Experiment Name: At_Open_Flower_P Parameter: Plant Line Value: WS
  misc_feature: MA Experiment 20000265 PARAMETER Experiment Name: At_Open_Flower_P Parameter: Tissue Value: Closed Flower vs. Whole Plant
ggtattcgtcttccgcctcctctcccatcggttttgaacagcttggcagaagaagtgaaacttgagagagtaatggagaacttggaagatctgaaaattctggctgagcagtggtcgcatcaaggaattgaatatcttcagaagataccaccgaatcagctgtatgccgccattggtgttttgttgtttacaaccatcttgctcttcctatccattcgcctggtcagacgtaccaaatccaacactgtactcctttctgggctgaccggaagtggaaagactgtgctcttttaccaactccgagatggatcgtcgcatcagggcactgtaacatcaatggaaccaaatgaaggcacttttgttcttcacagtgaaaatactaagaaaggaaaaatcaagcctgttcatcttgttgatgttcctgggcactctcggcttcgacccaagctagaagaattcttgccccaagcagctgccattgtgttcgtagtggatgccttggagttcctcccaaactgtcgtgcagcttcagagtacctatacgagattctgaccaatgcgaatgttgtcaagaagaagattccagtcctcctttgctgtaacaagaccgataaactcactgcacacaccaaggagtttatccggaagcaaatggagaaagaaattgagaaactgagggcttcaaggagtgcagtctctactgctgatatagcgaatgacttcaccattggaattgagggagaagtgttctccttcacgcattgctccaacaaagtcactgtcgctgaggcatctggacttaccggagaaaccatccagattgaagacttcattcgagaatacatcaagccatgagctccaacatgccttcatagattgaatctaccacaagtttcttatgctttgggctgtgactttgatttgagtttagagatccttttgtatatgagatctttggatgatttagggtgttcaaaactgagtagctgtattttcgagttagataatctgttttaaatcggaatgattttaaggaaatgttaaatgact

SEQ ID NO: 24258 - protein, 284 aa, Arabidopsis thaliana
  peptide (1)..(284): Ceres Seq. ID no. 13591666
  misc_feature (85)..(218): Pfam Name: ADP-ribosylation factor family Pfam Description: ADP-ribosylation factor family
  misc_feature (85)..(218): Pfam Name: ADP-ribosylation factor family Pfam Description: ADP-ribosylation factor family
  misc_feature (46)..(269): Homolog of NCBI NO: 33086606 NR Description: Ab2-417 [Rattus norvegicus]
  misc_feature (46)..(269): Homolog of NCBI NO: 14917113 NR Description: signal recognition particle receptor, beta
  misc_feature (46)..(269): Homolog of NCBI NO: 14042265 NR Description: unnamed protein product [Homo sapiens]
  misc_feature (46)..(269): Homolog of NCBI NO: 27721301 NR Description: similar to signal recognition particle receptor,
  misc_feature (46)..(271): Homolog of NCBI NO: 12842535 NR Description: unnamed protein product [Mus musculus]
  misc_feature (46)..(269): Homolog of NCBI NO: 33086606 NR Description: Ab2-417 [Rattus norvegicus]
  misc_feature (46)..(269): Homolog of NCBI NO: 14042265 NR Description: unnamed protein product [Homo sapiens]
  misc_feature (46)..(271): Homolog of NCBI NO: 12842535 NR Description: unnamed protein product [Mus musculus]
  misc_feature (25)..(284): Homolog of NCBI NO: 15239201 NR Description: signal recognition particle receptor beta
  misc_feature (25)..(284): Homolog of NCBI NO: 15224229 NR Description: signal recognition particle receptor beta subunit
  misc_feature (46)..(265): Homolog of NCBI NO: 38174090 NR Description: Unknown (protein for MGC:75930) [Silurana
  misc_feature (46)..(269): Homolog of NCBI NO: 38649415 NR Description: Signal recognition particle receptor, beta
  misc_feature (46)..(271): Homolog of NCBI NO: 6678137 NR Description: signal recognition particle receptor, B subunit
  misc_feature (46)..(269): Homolog of NCBI NO: 27721301 NR Description: similar to signal recognition particle receptor,
  misc_feature (46)..(269): Homolog of NCBI NO: 14917113 NR Description: signal recognition particle receptor, beta
  misc_feature (46)..(271): Homolog of NCBI NO: 6678137 NR Description: signal recognition particle receptor, B subunit
  misc_feature (46)..(269): Homolog of NCBI NO: 38649415 NR Description: Signal recognition particle receptor, beta
  misc_feature (46)..(265): Homolog of NCBI NO: 38174090 NR Description: Unknown (protein for MGC:75930) [Silurana
  misc_feature (25)..(284): Homolog of NCBI NO: 15224229 NR Description: signal recognition particle receptor beta subunit
  misc_feature (25)..(284): Homolog of NCBI NO: 15239201 NR Description: signal recognition particle receptor beta
GIRLPPPLPSVLNSLAEEVKLERVMENLEDLKILAEQWSHQGIEYLQKIPPNQLYAAIGVLLFTTILLFLSIRLVRRTKSNTVLLSGLTGSGKTVLFYQLRDGSSHQGTVTSMEPNEGTFVLHSENTKKGKIKPVHLVDVPGHSRLRPKLEEFLPQAAAIVFVVDALEFLPNCRAASEYLYEILTNANVVKKKIPVLLCCNKTDKLTAHTKEFIRKQMEKEIEKLRASRSAVSTADIANDFTIGIEGEVFSFTHCSNKVTVAEASGLTGETIQIEDFIREYIKP

SEQ ID NO: 24259 - protein, 260 aa, Arabidopsis thaliana
  peptide (1)..(260): Ceres Seq. ID no. 13591667
  misc_feature (61)..(194): Pfam Name: ADP-ribosylation factor family Pfam Description: ADP-ribosylation factor family
  misc_feature (61)..(194): Pfam Name: ADP-ribosylation factor family Pfam Description: ADP-ribosylation factor family
  misc_feature (22)..(245): Homolog of NCBI NO: 33086606 NR Description: Ab2-417 [Rattus norvegicus]
  misc_feature (22)..(245): Homolog of NCBI NO: 14917113 NR Description: signal recognition particle receptor, beta
  misc_feature (22)..(245): Homolog of NCBI NO: 14042265 NR Description: unnamed protein product [Homo sapiens]
  misc_feature (22)..(245): Homolog of NCBI NO: 27721301 NR Description: similar to signal recognition particle receptor,
  misc_feature (22)..(247): Homolog of NCBI NO: 12842535 NR Description: unnamed protein product [Mus musculus]
  misc_feature (22)..(245): Homolog of NCBI NO: 33086606 NR Description: Ab2-417 [Rattus norvegicus]
  misc_feature (22)..(245): Homolog of NCBI NO: 14042265 NR Description: unnamed protein product [Homo sapiens]
  misc_feature (22)..(247): Homolog of NCBI NO: 12842535 NR Description: unnamed protein product [Mus musculus]
  misc_feature (1)..(260): Homolog of NCBI NO: 15239201 NR Description: signal recognition particle receptor beta
  misc_feature (1)..(260): Homolog of NCBI NO: 15224229 NR Description: signal recognition particle receptor beta subunit
  misc_feature (22)..(241): Homolog of NCBI NO: 38174090 NR Description: Unknown (protein for MGC:75930) [Silurana
  misc_feature (22)..(245): Homolog of NCBI NO: 38649415 NR Description: Signal recognition particle receptor, beta
  misc_feature (22)..(247): Homolog of NCBI NO: 6678137 NR Description: signal recognition particle receptor, B subunit
  misc_feature (22)..(245): Homolog of NCBI NO: 27721301 NR Description: similar to signal recognition particle receptor,
  misc_feature (22)..(245): Homolog of NCBI NO: 14917113 NR Description: signal recognition particle receptor, beta
  misc_feature (22)..(247): Homolog of NCBI NO: 6678137 NR Description: signal recognition particle receptor, B subunit
  misc_feature (22)..(245): Homolog of NCBI NO: 38649415 NR Description: Signal recognition particle receptor, beta
  misc_feature (22)..(241): Homolog of NCBI NO: 38174090 NR Description: Unknown (protein for MGC:75930) [Silurana
  misc_feature (1)..(260): Homolog of NCBI NO: 15224229 NR Description: signal recognition particle receptor beta subunit
  misc_feature (1)..(260): Homolog of NCBI NO: 15239201 NR Description: signal recognition particle receptor beta
MENLEDLKILAEQWSHQGIEYLQKIPPNQLYAAIGVLLFTTILLFLSIRLVRRTKSNTVLLSGLTGSGKTVLFYQLRDGSSHQGTVTSMEPNEGTFVLHSENTKKGKIKPVHLVDVPGHSRLRPKLEEFLPQAAAIVFVVDALEFLPNCRAASEYLYEILTNANVVKKKIPVLLCCNKTDKLTAHTKEFIRKQMEKEIEKLRASRSAVSTADIANDFTIGIEGEVFSFTHCSNKVTVAEASGLTGETIQIEDFIREYIKP

SEQ ID NO: 24260 - protein, 172 aa, Arabidopsis thaliana
  peptide (1)..(172): Ceres Seq. ID no. 13591668
  misc_feature (1)..(106): Pfam Name: ADP-ribosylation factor family Pfam Description: ADP-ribosylation factor family
  misc_feature (1)..(106): Pfam Name: ADP-ribosylation factor family Pfam Description: ADP-ribosylation factor family
  misc_feature (1)..(157): Homolog of NCBI NO: 33086606 NR Description: Ab2-417 [Rattus norvegicus]
  misc_feature (1)..(157): Homolog of NCBI NO: 14917113 NR Description: signal recognition particle receptor, beta
  misc_feature (1)..(157): Homolog of NCBI NO: 14042265 NR Description: unnamed protein product [Homo sapiens]
  misc_feature (1)..(157): Homolog of NCBI NO: 27721301 NR Description: similar to signal recognition particle receptor,
  misc_feature (1)..(159): Homolog of NCBI NO: 12842535 NR Description: unnamed protein product [Mus musculus]
  misc_feature (1)..(157): Homolog of NCBI NO: 33086606 NR Description: Ab2-417 [Rattus norvegicus]
  misc_feature (1)..(157): Homolog of NCBI NO: 14042265 NR Description: unnamed protein product [Homo sapiens]
  misc_feature (1)..(159): Homolog of NCBI NO: 12842535 NR Description: unnamed protein product [Mus musculus]
  misc_feature (1)..(172): Homolog of NCBI NO: 15239201 NR Description: signal recognition particle receptor beta
  misc_feature (1)..(172): Homolog of NCBI NO: 15224229 NR Description: signal recognition particle receptor beta subunit
  misc_feature (1)..(153): Homolog of NCBI NO: 38174090 NR Description: Unknown (protein for MGC:75930) [Silurana
  misc_feature (1)..(157): Homolog of NCBI NO: 38649415 NR Description: Signal recognition particle receptor, beta
  misc_feature (1)..(159): Homolog of NCBI NO: 6678137 NR Description: signal recognition particle receptor, B subunit
  misc_feature (1)..(157): Homolog of NCBI NO: 27721301 NR Description: similar to signal recognition particle receptor,
  misc_feature (1)..(157): Homolog of NCBI NO: 14917113 NR Description: signal recognition particle receptor, beta
  misc_feature (1)..(159): Homolog of NCBI NO: 6678137 NR Description: signal recognition particle receptor, B subunit
  misc_feature (1)..(157): Homolog of NCBI NO: 38649415 NR Description: Signal recognition particle receptor, beta
  misc_feature (1)..(153): Homolog of NCBI NO: 38174090 NR Description: Unknown (protein for MGC:75930) [Silurana
  misc_feature (1)..(172): Homolog of NCBI NO: 15224229 NR Description: signal recognition particle receptor beta subunit
  misc_feature (1)..(172): Homolog of NCBI NO: 15239201 NR Description: signal recognition particle receptor beta
MEPNEGTFVLHSENTKKGKIKPVHLVDVPGHSRLRPKLEEFLPQAAAIVFVVDALEFLPNCRAASEYLYEILTNANVVKKKIPVLLCCNKTDKLTAHTKEFIRKQMEKEIEKLRASRSAVSTADIANDFTIGIEGEVFSFTHCSNKVTVAEASGLTGETIQIEDFIREYIKP

SEQ ID NO: 24261 - DNA, 904 bp, Arabidopsis thaliana
  misc_feature (1)..(904): Ceres Seq. ID no. 12321843
  misc_feature: MA Experiment ID: 108434 Result: Down-regulated in Transcription
  misc_feature: MA Experiment 108434 PARAMETER Experiment Name: At_Root_Tips_cDNA_P Parameter: Tissue Value: Root Tips
  misc_feature: MA Experiment ID: 108461 Result: Down-regulated in Transcription
  misc_feature: MA Experiment 108461 PARAMETER Experiment Name: At_Germinating_Seeds_cDNA_P Parameter: Age (day) Value: 1 vs. 0
  misc_feature: MA Experiment 108461 PARAMETER Experiment Name: At_Germinating_Seeds_cDNA_P Parameter: Tissue Value: Germinating Seeds
  misc_feature: MA Experiment ID: 108462 Result: Down-regulated in Transcription
  misc_feature: MA Experiment 108462 PARAMETER Experiment Name: At_Germinating_Seeds_cDNA_P Parameter: Age (day) Value: 2 vs. 0
  misc_feature: MA Experiment 108462 PARAMETER Experiment Name: At_Germinating_Seeds_cDNA_P Parameter: Tissue Value: Germinating Seeds
  misc_feature: MA Experiment ID: 108488 Result: Down-regulated in Transcription
  misc_feature: MA Experiment ID: 108561 Result: Up-regulated in Transcription
  misc_feature: MA Experiment 108561 PARAMETER Experiment Name: At_100uM_ABA_cDNA_P Parameter: Timepoint (hr) Value: 6
  misc_feature: MA Experiment 108561 PARAMETER Experiment Name: At_100uM_ABA_cDNA_P Parameter: Tissue Value: Aerial
  misc_feature: MA Experiment 108561 PARAMETER Experiment Name: At_100uM_ABA_cDNA_P Parameter: Treatment Value: 100uM ABA vs. No Treatment
  misc_feature: MA Experiment ID: 108573 Result: Up-regulated in Transcription
  misc_feature: MA Experiment 108573 PARAMETER Experiment Name: At_Drought_cDNA_P Parameter: Timepoint (hr) Value: 6
  misc_feature: MA Experiment 108573 PARAMETER Experiment Name: At_Drought_cDNA_P Parameter: Tissue Value: Aerial
  misc_feature: MA Experiment 108573 PARAMETER Experiment Name: At_Drought_cDNA_P Parameter: Treatment Value: Drought vs. No Drought
  misc_feature: MA Experiment ID: 20000113 Result: Down-regulated in Transcription
  misc_feature: MA Experiment 20000113 PARAMETER Experiment Name: At_42deg_Heat_cDNA_P Parameter: Temperature (deg C) Value: 42 vs. 22
  misc_feature: MA Experiment 20000113 PARAMETER Experiment Name: At_42deg_Heat_cDNA_P Parameter: Timepoint (hr) Value: 8
  misc_feature: MA Experiment 20000113 PARAMETER Experiment Name: At_42deg_Heat_cDNA_P Parameter: Tissue Value: Aerial
  misc_feature: MA Experiment ID: 20000166 Result: Down-regulated in Transcription
  misc_feature: MA Experiment 20000166 PARAMETER Experiment Name: At_100uM_ABA_P Parameter: Age (day) Value: 14
  misc_feature: MA Experiment 20000166 PARAMETER Experiment Name: At_100uM_ABA_P Parameter: Organism Value: A. thaliana
  misc_feature: MA Experiment 20000166 PARAMETER Experiment Name: At_100uM_ABA_P Parameter: Plant Line Value: WS
  misc_feature: MA Experiment 20000166 PARAMETER Experiment Name: At_100uM_ABA_P Parameter: Timepoint (hr) Value: 1
  misc_feature: MA Experiment 20000166 PARAMETER Experiment Name: At_100uM_ABA_P Parameter: Tissue Value: Aerial
  misc_feature: MA Experiment 20000166 PARAMETER Experiment Name: At_100uM_ABA_P Parameter: Treatment Value: 100uM ABA vs. No Treatment
  misc_feature: MA Experiment ID: 20000179 Result: Down-regulated in Transcription
  misc_feature: MA Experiment 20000179 PARAMETER Experiment Name: At_Germinating_Seeds_P Parameter: Age (hr) Value: 6 vs. 0
  misc_feature: MA Experiment 20000179 PARAMETER Experiment Name: At_Germinating_Seeds_P Parameter: Tissue Value: Germinating Seeds
  misc_feature: MA Experiment ID: 20000185 Result: Down-regulated in Transcription
  misc_feature: MA Experiment 20000185 PARAMETER Experiment Name: At_Roots__P Parameter: Age (day) Value: 7 vs. 21
  misc_feature: MA Experiment 20000185 PARAMETER Experiment Name: At_Roots__P Parameter: Organism Value: A. thaliana
  misc_feature: MA Experiment 20000185 PARAMETER Experiment Name: At_Roots__P Parameter: Tissue Value: Roots vs. Whole Plant
  misc_feature: MA Experiment ID: 20000234 Result: Down-regulated in Transcription
  misc_feature: MA Experiment 20000234 PARAMETER Experiment Name: At_Siliques_P Parameter: Age (day) Value: 21
  misc_feature: MA Experiment 20000234 PARAMETER Experiment Name: At_Siliques_P Parameter: Organism Value: A. thaliana
  misc_feature: MA Experiment 20000234 PARAMETER Experiment Name: At_Siliques_P Parameter: Plant Line Value: WS
  misc_feature: MA Experiment 20000234 PARAMETER Experiment Name: At_Siliques_P Parameter: Tissue Value: Less Than 5mm Siliques vs. Whole Plant
  misc_feature: MA Experiment ID: 20000235 Result: Down-regulated in Transcription
  misc_feature: MA Experiment 20000235 PARAMETER Experiment Name: At_Siliques_P Parameter: Age (day) Value: 21
  misc_feature: MA Experiment 20000235 PARAMETER Experiment Name: At_Siliques_P Parameter: Organism Value: A. thaliana
  misc_feature: MA Experiment 20000235 PARAMETER Experiment Name: At_Siliques_P Parameter: Plant Line Value: WS
  misc_feature: MA Experiment 20000235 PARAMETER Experiment Name: At_Siliques_P Parameter: Tissue Value: 5-10mm Siliques vs. Whole Plant
  misc_feature: MA Experiment ID: 20000265 Result: Down-regulated in Transcription
  misc_feature: MA Experiment 20000265 PARAMETER Experiment Name: At_Open_Flower_P Parameter: Age (day) Value: 21
  misc_feature: MA Experiment 20000265 PARAMETER Experiment Name: At_Open_Flower_P Parameter: Plant Line Value: WS
  misc_feature: MA Experiment 20000265 PARAMETER Experiment Name: At_Open_Flower_P Parameter: Tissue Value: Closed Flower vs. Whole Plant
  misc_feature: MA Experiment ID: 20000286 Result: Down-regulated in Transcription
  misc_feature: MA Experiment 20000286 PARAMETER Experiment Name: At_Open_Flower_P Parameter: Age (day) Value: 21
  misc_feature: MA Experiment 20000286 PARAMETER Experiment Name: At_Open_Flower_P Parameter: Plant Line Value: WS
  misc_feature: MA Experiment 20000286 PARAMETER Experiment Name: At_Open_Flower_P Parameter: Tissue Value: Half Open vs. Whole Plant
  misc_feature: MA Experiment ID: 20000437 Result: Up-regulated in Transcription
  misc_feature: MA Experiment 20000437 PARAMETER Experiment Name: At_Drought_P Parameter: Age (day) Value: 8
  misc_feature: MA Experiment 20000437 PARAMETER Experiment Name: At_Drought_P Parameter: Organism Value: A. thaliana
  misc_feature: MA Experiment 20000437 PARAMETER Experiment Name: At_Drought_P Parameter: Plant Line Value: WS
  misc_feature: MA Experiment 20000437 PARAMETER Experiment Name: At_Drought_P Parameter: Timepoint (hr) Value: 24
  misc_feature: MA Experiment 20000437 PARAMETER Experiment Name: At_Drought_P Parameter: Tissue Value: Whole Plant
  misc_feature: MA Experiment 20000437 PARAMETER Experiment Name: At_Drought_P Parameter: Treatment Value: Drought vs. No Drought
  misc_feature: MA Experiment ID: 20000439 Result: Down-regulated in Transcription
  misc_feature: MA Experiment 20000439 PARAMETER Experiment Name: At_Roots__P Parameter: Age (day) Value: 14 vs. 21
  misc_feature: MA Experiment 20000439 PARAMETER Experiment Name: At_Roots__P Parameter: Organism Value: A. thaliana
  misc_feature: MA Experiment 20000439 PARAMETER Experiment Name: At_Roots__P Parameter: Tissue Value: Roots vs. Whole Plant
  misc_feature: MA Experiment ID: 20000451 Result: Up-regulated in Transcription
  misc_feature: MA Experiment 20000451 PARAMETER Experiment Name: At_CS6879_Shoots-Roots_P Parameter: Age (day) Value: 14
  misc_feature: MA Experiment 20000451 PARAMETER Experiment Name: At_CS6879_Shoots-Roots_P Parameter: Organism Value: A. thaliana
  misc_feature: MA Experiment 20000451 PARAMETER Experiment Name: At_CS6879_Shoots-Roots_P Parameter: Plant Line Value: CS6879 vs. WS
  misc_feature: MA Experiment 20000451 PARAMETER Experiment Name: At_CS6879_Shoots-Roots_P Parameter: Tissue Value: Roots
  misc_feature: MA Experiment ID: 20000495 Result: Up-regulated in Transcription
  misc_feature: MA Experiment 20000495 PARAMETER Experiment Name: At_Guard_Cells_P Parameter: Harvest Date Value: 8/2/2002
  misc_feature: MA Experiment 20000495 PARAMETER Experiment Name: At_Guard_Cells_P Parameter: Organism Value: A. thaliana
  misc_feature: MA Experiment 20000495 PARAMETER Experiment Name: At_Guard_Cells_P Parameter: Tissue Value: Guard Cells vs. Leaves
  misc_feature: MA Experiment ID: 20000573 Result: Down-regulated in Transcription
  misc_feature: MA Experiment 20000573 PARAMETER Experiment Name: At_100uM_ABA_Mutants__P Parameter: Organism Value: A. thaliana
  misc_feature: MA Experiment 20000573 PARAMETER Experiment Name: At_100uM_ABA_Mutants__P Parameter: Plant Line Value: CS22 vs. Ler wt
  misc_feature: MA Experiment 20000573 PARAMETER Experiment Name: At_100uM_ABA_Mutants__P Parameter: Timepoint (hr) Value: N/A
  misc_feature: MA Experiment 20000573 PARAMETER Experiment Name: At_100uM_ABA_Mutants__P Parameter: Tissue Value: Whole Plant
  misc_feature: MA Experiment 20000573 PARAMETER Experiment Name: At_100uM_ABA_Mutants__P Parameter: Treatment Value: None
  misc_feature: MA Experiment ID: 20000794 Result: Up-regulated in Transcription
  misc_feature: MA Experiment 20000794 PARAMETER Experiment Name: At_Petals_P Parameter: Age (day) Value: 23-25 days
  misc_feature: MA Experiment 20000794 PARAMETER Experiment Name: At_Petals_P Parameter: Plant Line Value: WS
  misc_feature: MA Experiment 20000794 PARAMETER Experiment Name: At_Petals_P Parameter: Tissue Value: Petals vs. Whole plant
  misc_feature: MA Experiment ID: 20001247 Result: Up-regulated in Transcription
  misc_feature: MA Experiment 20001247 PARAMETER Experiment Name: At_Far-red-induction_P Parameter: Age (day) Value: 7
  misc_feature: MA Experiment 20001247 PARAMETER Experiment Name: At_Far-red-induction_P Parameter: Light Value: Far-red vs. White
  misc_feature: MA Experiment 20001247 PARAMETER Experiment Name: At_Far-red-induction_P Parameter: Organism Value: A. thaliana
  misc_feature: MA Experiment 20001247 PARAMETER Experiment Name: At_Far-red-induction_P Parameter: Plant Line Value: Columbia
  misc_feature: MA Experiment 20001247 PARAMETER Experiment Name: At_Far-red-induction_P Parameter: Timepoint (hr) Value: 1
  misc_feature: MA Experiment 20001247 PARAMETER Experiment Name: At_Far-red-induction_P Parameter: Tissue Value: Whole Plant
  misc_feature: MA Experiment ID: 20001451 Result: Up-regulated in Transcription
  misc_feature: MA Experiment 20001451 PARAMETER Experiment Name: At_Far-red-induction_P Parameter: Age (day) Value: 7
  misc_feature: MA Experiment 20001451 PARAMETER Experiment Name: At_Far-red-induction_P Parameter: Light Value: Far-red vs. White
  misc_feature: MA Experiment 20001451 PARAMETER Experiment Name: At_Far-red-induction_P Parameter: Organism Value: A. thaliana
  misc_feature: MA Experiment 20001451 PARAMETER Experiment Name: At_Far-red-induction_P Parameter: Plant Line Value: Columbia
  misc_feature: MA Experiment 20001451 PARAMETER Experiment Name: At_Far-red-induction_P Parameter: Timepoint (hr) Value: 24
  misc_feature: MA Experiment 20001451 PARAMETER Experiment Name: At_Far-red-induction_P Parameter: Tissue Value: Whole Plant
  misc_feature: MA Experiment ID: 20001556 Result: Up-regulated in Transcription
  misc_feature: MA Experiment 20001556 PARAMETER Experiment Name: At_Drought_Soil_Dry_P Parameter: Age (day) Value: 26
  misc_feature: MA Experiment 20001556 PARAMETER Experiment Name: At_Drought_Soil_Dry_P Parameter: Organism Value: A. thaliana
  misc_feature: MA Experiment 20001556 PARAMETER Experiment Name: At_Drought_Soil_Dry_P Parameter: Plant Line Value: WS
  misc_feature: MA Experiment 20001556 PARAMETER Experiment Name: At_Drought_Soil_Dry_P Parameter: Post Timepoint (hr) Value: None
  misc_feature: MA Experiment 20001556 PARAMETER Experiment Name: At_Drought_Soil_Dry_P Parameter: Post-Treatment Value: None
  misc_feature: MA Experiment 20001556 PARAMETER Experiment Name: At_Drought_Soil_Dry_P Parameter: Timepoint (day) Value: 12
  misc_feature: MA Experiment 20001556 PARAMETER Experiment Name: At_Drought_Soil_Dry_P Parameter: Treatment Value: Drought vs. No Drought
  misc_feature: MA Experiment ID: 20001557 Result: Up-regulated in Transcription
  misc_feature: MA Experiment 20001557 PARAMETER Experiment Name: At_Drought_Soil_Dry_P Parameter: Age (day) Value: 27
  misc_feature: MA Experiment 20001557 PARAMETER Experiment Name: At_Drought_Soil_Dry_P Parameter: Organism Value: A. thaliana
  misc_feature: MA Experiment 20001557 PARAMETER Experiment Name: At_Drought_Soil_Dry_P Parameter: Plant Line Value: WS
  misc_feature: MA Experiment 20001557 PARAMETER Experiment Name: At_Drought_Soil_Dry_P Parameter: Post Timepoint (hr) Value: 3
  misc_feature: MA Experiment 20001557 PARAMETER Experiment Name: At_Drought_Soil_Dry_P Parameter: Post-Treatment Value: Re-Water vs. No Drought
  misc_feature: MA Experiment 20001557 PARAMETER Experiment Name: At_Drought_Soil_Dry_P Parameter: Timepoint (day) Value: 13
  misc_feature: MA Experiment 20001557 PARAMETER Experiment Name: At_Drought_Soil_Dry_P Parameter: Treatment Value: Drought vs. No Drought
  misc_feature: MA Experiment ID: 20001559 Result: Up-regulated in Transcription
  misc_feature: MA Experiment 20001559 PARAMETER Experiment Name: At_Drought_Soil_Dry_P Parameter: Age (day) Value: 28
  misc_feature: MA Experiment 20001559 PARAMETER Experiment Name: At_Drought_Soil_Dry_P Parameter: Organism Value: A. thaliana
  misc_feature: MA Experiment 20001559 PARAMETER Experiment Name: At_Drought_Soil_Dry_P Parameter: Plant Line Value: WS
  misc_feature: MA Experiment 20001559 PARAMETER Experiment Name: At_Drought_Soil_Dry_P Parameter: Post Timepoint (hr) Value: 29
  misc_feature: MA Experiment 20001559 PARAMETER Experiment Name: At_Drought_Soil_Dry_P Parameter: Post-Treatment Value: Re-Water vs. No Drought
  misc_feature: MA Experiment 20001559 PARAMETER Experiment Name: At_Drought_Soil_Dry_P Parameter: Timepoint (day) Value: 14
  misc_feature: MA Experiment 20001559 PARAMETER Experiment Name: At_Drought_Soil_Dry_P Parameter: Treatment Value: Drought vs. No Drought
  misc_feature: MA Experiment ID: 20001904 Result: Up-regulated in Transcription
  misc_feature: MA Experiment 20001904 PARAMETER Experiment Name: At_Drought_Reproduction_P Parameter: Age (day) Value: 37
  misc_feature: MA Experiment 20001904 PARAMETER Experiment Name: At_Drought_Reproduction_P Parameter: Organism Value: A. thaliana
  misc_feature: MA Experiment 20001904 PARAMETER Experiment Name: At_Drought_Reproduction_P Parameter: Plant Line Value: WS
  misc_feature: MA Experiment 20001904 PARAMETER Experiment Name: At_Drought_Reproduction_P Parameter: Timepoint (day) Value: 7
  misc_feature: MA Experiment 20001904 PARAMETER Experiment Name: At_Drought_Reproduction_P Parameter: Tissue Value: Rosettes
  misc_feature: MA Experiment 20001904 PARAMETER Experiment Name: At_Drought_Reproduction_P Parameter: Treatment Value: Drought vs. No Drought
  misc_feature: MA Experiment ID: 20001906 Result: Up-regulated in Transcription
  misc_feature: MA Experiment 20001906 PARAMETER Experiment Name: At_Drought_Reproduction_P Parameter: Age (day) Value: 35
  misc_feature: MA Experiment 20001906 PARAMETER Experiment Name: At_Drought_Reproduction_P Parameter: Organism Value: A. thaliana
  misc_feature: MA Experiment 20001906 PARAMETER Experiment Name: At_Drought_Reproduction_P Parameter: Plant Line Value: WS
  misc_feature: MA Experiment 20001906 PARAMETER Experiment Name: At_Drought_Reproduction_P Parameter: Timepoint (day) Value: 5
  misc_feature: MA Experiment 20001906 PARAMETER Experiment Name: At_Drought_Reproduction_P Parameter: Tissue Value: Siliques
  misc_feature: MA Experiment 20001906 PARAMETER Experiment Name: At_Drought_Reproduction_P Parameter: Treatment Value: Drought vs. No Drought
  misc_feature: MA Experiment ID: 20001908 Result: Up-regulated in Transcription
  misc_feature: MA Experiment 20001908 PARAMETER Experiment Name: At_Drought_Reproduction_P Parameter: Age (day) Value: 40
  misc_feature: MA Experiment 20001908 PARAMETER Experiment Name: At_Drought_Reproduction_P Parameter: Organism Value: A. thaliana
  misc_feature: MA Experiment 20001908 PARAMETER Experiment Name: At_Drought_Reproduction_P Parameter: Plant Line Value: WS
  misc_feature: MA Experiment 20001908 PARAMETER Experiment Name: At_Drought_Reproduction_P Parameter: Timepoint (day) Value: 10
  misc_feature: MA Experiment 20001908 PARAMETER Experiment Name: At_Drought_Reproduction_P Parameter: Tissue Value: Siliques
  misc_feature: MA Experiment 20001908 PARAMETER Experiment Name: At_Drought_Reproduction_P Parameter: Treatment Value: Drought vs. No Drought
  misc_feature: MA Experiment ID: 20001910 Result: Up-regulated in Transcription
  misc_feature: MA Experiment 20001910 PARAMETER Experiment Name: At_Drought_Reproduction_P Parameter: Age (day) Value: 37
  misc_feature: MA Experiment 20001910 PARAMETER Experiment Name: At_Drought_Reproduction_P Parameter: Organism Value: A. thaliana
  misc_feature: MA Experiment 20001910 PARAMETER Experiment Name: At_Drought_Reproduction_P Parameter: Plant Line Value: WS
  misc_feature: MA Experiment 20001910 PARAMETER Experiment Name: At_Drought_Reproduction_P Parameter: Timepoint (day) Value: 7
  misc_feature: MA Experiment 20001910 PARAMETER Experiment Name: At_Drought_Reproduction_P Parameter: Tissue Value: Flowers
  misc_feature: MA Experiment 20001910 PARAMETER Experiment Name: At_Drought_Reproduction_P Parameter: Treatment Value: Drought vs. No Drought
aatcatcaaacatccaaactctatcctttcgttttcttgttagagaaaaattaatactagatgggtaacagtttaggcggcaagaaaacgaccaaagtcatgaagatagacggcgagacttttaaactgaaaactccggtgacggctgaggaggtcttaaaagactttcccggccacgtcttgttagacttcgaatccgtcaagcactacggtgcccgagccaaaccacttgaggcgaagcagaggttggaggcgaagcggctttattttgtggtggagccggtgaaagagtgtccaccgagaagggtaagatcaggaattcacgtgagtgcaaaggagaggcttgagagtctcatgctggcccggagatcgtcttccgatctctccatactcaaaccaccaggaggatggacgacggaggaagaagaaggagcggtgaggagggtgaaggtgaggattcccaaagctgagcttgaaaagctcgttaaagaaggagccaccgaagccgaagctacgcagaagatcgctgctctctttatggccaaacagaggcaagaggaggcatatcagaacacacgacaggatgagcccgccaccacggccaccgccaccgccaccaccaccgccacaagaggagtcaaatcccgtttgaaacgagtgagtttcatggcggaaagaggagggagcgagatcactgtagcttgaaccaataaacatatgtattagagaatgcttcccaacgtttctgcaaattctatgtacataaaaaacgcagaaagtttgagagaaagcttattcagatattcatccatgtctccactctattgtactcaagagttttactattattacattgtagaagaaacagtcattttataggcagattcattcgtttgcctctcgc

SEQ ID NO: 24262 - protein, 214 aa, Arabidopsis thaliana
  peptide (1)..(214): Ceres Seq. ID no. 12321844
  misc_feature (1)..(197): Homolog of NCBI NO: 25371187 NR Description: hypothetical protein At2g01340 [imported] -
  misc_feature (1)..(214): Homolog of NCBI NO: 30677912 NR Description: expressed protein [Arabidopsis thaliana]
MGNSLGGKKTTKVMKIDGETFKLKTPVTAEEVLKDFPGHVLLDFESVKHYGARAKPLEAKQRLEAKRLYFVVEPVKECPPRRVRSGIHVSAKERLESLMLARRSSSDLSILKPPGGWTTEEEEGAVRRVKVRIPKAELEKLVKEGATEAEATQKIAALFMAKQRQEEAYQNTRQDEPATTATATATTTATRGVKSRLKRVSFMAERGGSEITVA

SEQ ID NO: 24263 - protein, 201 aa, Arabidopsis thaliana
  peptide (1)..(201): Ceres Seq. ID no. 12321845
  misc_feature (1)..(184): Homolog of NCBI NO: 25371187 NR Description: hypothetical protein At2g01340 [imported] -
  misc_feature (1)..(201): Homolog of NCBI NO: 30677912 NR Description: expressed protein [Arabidopsis thaliana]
MKIDGETFKLKTPVTAEEVLKDFPGHVLLDFESVKHYGARAKPLEAKQRLEAKRLYFVVEPVKECPPRRVRSGIHVSAKERLESLMLARRSSSDLSILKPPGGWTTEEEEGAVRRVKVRIPKAELEKLVKEGATEAEATQKIAALFMAKQRQEEAYQNTRQDEPATTATATATTTATRGVKSRLKRVSFMAERGGSEITVA

SEQ ID NO: 24264 - protein, 116 aa, Arabidopsis thaliana
  peptide (1)..(116): Ceres Seq. ID no. 12321846
  misc_feature (1)..(99): Homolog of NCBI NO: 25371187 NR Description: hypothetical protein At2g01340 [imported] -
  misc_feature (1)..(116): Homolog of NCBI NO: 30677912 NR Description: expressed protein [Arabidopsis thaliana]
MLARRSSSDLSILKPPGGWTTEEEEGAVRRVKVRIPKAELEKLVKEGATEAEATQKIAALFMAKQRQEEAYQNTRQDEPATTATATATTTATRGVKSRLKRVSFMAERGGSEITVA

SEQ ID NO: 24265 - DNA, 1777 bp, Arabidopsis thaliana
  misc_feature (1)..(1777): Ceres Seq. ID no. 13610497
  misc_feature: MA Experiment ID: 108561 Result: Up-regulated in Transcription
  misc_feature: MA Experiment 108561 PARAMETER Experiment Name: At_100uM_ABA_cDNA_P Parameter: Timepoint (hr) Value: 6
  misc_feature: MA Experiment 108561 PARAMETER Experiment Name: At_100uM_ABA_cDNA_P Parameter: Tissue Value: Aerial
  misc_feature: MA Experiment 108561 PARAMETER Experiment Name: At_100uM_ABA_cDNA_P Parameter: Treatment Value: 100uM ABA vs. No Treatment
  misc_feature: MA Experiment ID: 108569 Result: Up-regulated in Transcription
  misc_feature: MA Experiment 108569 PARAMETER Experiment Name: At_0.001%_MeJA__cDNA_P Parameter: Timepoint (hr) Value: 6
  misc_feature: MA Experiment 108569 PARAMETER Experiment Name: At_0.001%_MeJA__cDNA_P Parameter: Tissue Value: Aerial
  misc_feature: MA Experiment 108569 PARAMETER Experiment Name: At_0.001%_MeJA__cDNA_P Parameter: Treatment Value: 0.001% MeJA vs. No Treatment
  misc_feature: MA Experiment ID: 108572 Result: Up-regulated in Transcription
  misc_feature: MA Experiment 108572 PARAMETER Experiment Name: At_Drought_cDNA_P Parameter: Timepoint (hr) Value: 1
  misc_feature: MA Experiment 108572 PARAMETER Experiment Name: At_Drought_cDNA_P Parameter: Tissue Value: Aerial
  misc_feature: MA Experiment 108572 PARAMETER Experiment Name: At_Drought_cDNA_P Parameter: Treatment Value: Drought vs. No Drought
  misc_feature: MA Experiment ID: 108573 Result: Up-regulated in Transcription
  misc_feature: MA Experiment 108573 PARAMETER Experiment Name: At_Drought_cDNA_P Parameter: Timepoint (hr) Value: 6
  misc_feature: MA Experiment 108573 PARAMETER Experiment Name: At_Drought_cDNA_P Parameter: Tissue Value: Aerial
  misc_feature: MA Experiment 108573 PARAMETER Experiment Name: At_Drought_cDNA_P Parameter: Treatment Value: Drought vs. No Drought
  misc_feature: MA Experiment ID: 108579 Result: Down-regulated in Transcription
  misc_feature: MA Experiment 108579 PARAMETER Experiment Name: At_4deg_Cold_cDNA_P Parameter: Temperature (deg C) Value: 4 vs. 22
  misc_feature: MA Experiment 108579 PARAMETER Experiment Name: At_4deg_Cold_cDNA_P Parameter: Timepoint (hr) Value: 6
  misc_feature: MA Experiment 108579 PARAMETER Experiment Name: At_4deg_Cold_cDNA_P Parameter: Tissue Value: Aerial
  misc_feature: MA Experiment ID: 108585 Result: Up-regulated in Transcription
  misc_feature: MA Experiment 108585 PARAMETER Experiment Name: At_5mM_NaNP_cDNA_P Parameter: Timepoint (hr) Value: 6
  misc_feature: MA Experiment 108585 PARAMETER Experiment Name: At_5mM_NaNP_cDNA_P Parameter: Tissue Value: Aerial
  misc_feature: MA Experiment 108585 PARAMETER Experiment Name: At_5mM_NaNP_cDNA_P Parameter: Treatment Value: null
  misc_feature: MA Experiment ID: 108595 Result: Up-regulated in Transcription
  misc_feature: MA Experiment 108595 PARAMETER Experiment Name: At_Ler-pi_Ovule_cDNA_P Parameter: Plant Line Value: null
  misc_feature: MA Experiment ID: 108605 Result: Up-regulated in Transcription
  misc_feature: MA Experiment 108605 PARAMETER Experiment Name: At_100uM_ABA_cDNA_P Parameter: Timepoint (hr) Value: 6
  misc_feature: MA Experiment 108605 PARAMETER Experiment Name: At_100uM_ABA_cDNA_P Parameter: Tissue Value: Aerial
  misc_feature: MA Experiment 108605 PARAMETER Experiment Name: At_100uM_ABA_cDNA_P Parameter: Treatment Value: 100uM ABA vs. No Treatment
  misc_feature: MA Experiment ID: 108607 Result: Up-regulated in Transcription
  misc_feature: MA Experiment 108607 PARAMETER Experiment Name: At_100uM_ABA_cDNA_P Parameter: Timepoint (hr) Value: 4
  misc_feature: MA Experiment 108607 PARAMETER Experiment Name: At_100uM_ABA_cDNA_P Parameter: Tissue Value: Aerial
  misc_feature: MA Experiment 108607 PARAMETER Experiment Name: At_100uM_ABA_cDNA_P Parameter: Treatment Value: 100uM ABA vs. No Treatment
  misc_feature: MA Experiment ID: 108608 Result: Up-regulated in Transcription
  misc_feature: MA Experiment 108608 PARAMETER Experiment Name: At_100uM_ABA_cDNA_P Parameter: Timepoint (hr) Value: 1
  misc_feature: MA Experiment 108608 PARAMETER Experiment Name: At_100uM_ABA_cDNA_P Parameter: Tissue Value: Aerial
  misc_feature: MA Experiment 108608 PARAMETER Experiment Name: At_100uM_ABA_cDNA_P Parameter: Treatment Value: 100uM ABA vs. No Treatment
  misc_feature: MA Experiment ID: 108609 Result: Up-regulated in Transcription
  misc_feature: MA Experiment 108609 PARAMETER Experiment Name: At_100uM_ABA_cDNA_P Parameter: Timepoint (hr) Value: 24
  misc_feature: MA Experiment 108609 PARAMETER Experiment Name: At_100uM_ABA_cDNA_P Parameter: Tissue Value: Aerial
  misc_feature: MA Experiment 108609 PARAMETER Experiment Name: At_100uM_ABA_cDNA_P Parameter: Treatment Value: 100uM ABA vs. No Treatment
  misc_feature: MA Experiment ID: 108667 Result: Up-regulated in Transcription
  misc_feature: MA Experiment 108667 PARAMETER Experiment Name: At_2mM_SA_cDNA_P Parameter: Plant Line Value: WS
  misc_feature: MA Experiment 108667 PARAMETER Experiment Name: At_2mM_SA_cDNA_P Parameter: Timepoint (hr) Value: 1
  misc_feature: MA Experiment 108667 PARAMETER Experiment Name: At_2mM_SA_cDNA_P Parameter: Treatment Value: 2mM SA vs. No Treatment
  misc_feature: MA Experiment ID: 20000070 Result: Up-regulated in Transcription
  misc_feature: MA Experiment 20000070 PARAMETER Experiment Name: At_100uM_ABA_Mutants_cDNA_P Parameter: Plant Line Value: CS24
  misc_feature: MA Experiment 20000070 PARAMETER Experiment Name: At_100uM_ABA_Mutants_cDNA_P Parameter: Timepoint (hr) Value: 6
  misc_feature: MA Experiment 20000070 PARAMETER Experiment Name: At_100uM_ABA_Mutants_cDNA_P Parameter: Tissue Value: Aerial
  misc_feature: MA Experiment 20000070 PARAMETER Experiment Name: At_100uM_ABA_Mutants_cDNA_P Parameter: Treatment Value: 100uM ABA vs. No Treatment
  misc_feature: MA Experiment ID: 20000087 Result: Up-regulated in Transcription
  misc_feature: MA Experiment 20000087 PARAMETER Experiment Name: At_100uM_ABA_Mutants_cDNA_P Parameter: Plant Line Value: WS
  misc_feature: MA Experiment 20000087 PARAMETER Experiment Name: At_100uM_ABA_Mutants_cDNA_P Parameter: Timepoint (hr) Value: 6
  misc_feature: MA Experiment 20000087 PARAMETER Experiment Name: At_100uM_ABA_Mutants_cDNA_P Parameter: Tissue Value: Aerial
  misc_feature: MA Experiment 20000087 PARAMETER Experiment Name: At_100uM_ABA_Mutants_cDNA_P Parameter: Treatment Value: 100uM ABA vs. No Treatment
  misc_feature: MA Experiment ID: 20000088 Result: Up-regulated in Transcription
  misc_feature: MA Experiment 20000088 PARAMETER Experiment Name: At_100uM_ABA_Mutants_cDNA_P Parameter: Plant Line Value: Landsberg
  misc_feature: MA Experiment 20000088 PARAMETER Experiment Name: At_100uM_ABA_Mutants_cDNA_P Parameter: Timepoint (hr) Value: 6
  misc_feature: MA Experiment 20000088 PARAMETER Experiment Name: At_100uM_ABA_Mutants_cDNA_P Parameter: Tissue Value: Aerial
  misc_feature: MA Experiment 20000088 PARAMETER Experiment Name: At_100uM_ABA_Mutants_cDNA_P Parameter: Treatment Value: 100uM ABA vs. No Treatment
  misc_feature: MA Experiment ID: 20000089 Result: Up-regulated in Transcription
  misc_feature: MA Experiment ID: 20000117 Result: Up-regulated in Transcription
  misc_feature: MA Experiment 20000117 PARAMETER Experiment Name: At_100uM_ABA_Mutants_cDNA_P Parameter: Plant Line Value: Columbia
  misc_feature: MA Experiment 20000117 PARAMETER Experiment Name: At_100uM_ABA_Mutants_cDNA_P Parameter: Timepoint (hr) Value: 6
  misc_feature: MA Experiment 20000117 PARAMETER Experiment Name: At_100uM_ABA_Mutants_cDNA_P Parameter: Tissue Value: Aerial
  misc_feature: MA Experiment 20000117 PARAMETER Experiment Name: At_100uM_ABA_Mutants_cDNA_P Parameter: Treatment Value: 100uM ABA vs. No Treatment
  misc_feature: MA Experiment ID: 20000166 Result: Up-regulated in Transcription
  misc_feature: MA Experiment 20000166 PARAMETER Experiment Name: At_100uM_ABA_P Parameter: Age (day) Value: 14
  misc_feature: MA Experiment 20000166 PARAMETER Experiment Name: At_100uM_ABA_P Parameter: Organism Value: A. thaliana
  misc_feature: MA Experiment 20000166 PARAMETER Experiment Name: At_100uM_ABA_P Parameter: Plant Line Value: WS
  misc_feature: MA Experiment 20000166 PARAMETER Experiment Name: At_100uM_ABA_P Parameter: Timepoint (hr) Value: 1
  misc_feature: MA Experiment 20000166 PARAMETER Experiment Name: At_100uM_ABA_P Parameter: Tissue Value: Aerial
  misc_feature: MA Experiment 20000166 PARAMETER Experiment Name: At_100uM_ABA_P Parameter: Treatment Value: 100uM ABA vs. No Treatment
  misc_feature: MA Experiment ID: 20000169 Result: Up-regulated in Transcription
  misc_feature: MA Experiment 20000169 PARAMETER Experiment Name: At_100uM_ABA_P Parameter: Age (day) Value: 14
  misc_feature: MA Experiment 20000169 PARAMETER Experiment Name: At_100uM_ABA_P Parameter: Organism Value: A. thaliana
  misc_feature: MA Experiment 20000169 PARAMETER Experiment Name: At_100uM_ABA_P Parameter: Plant Line Value: WS
  misc_feature: MA Experiment 20000169 PARAMETER Experiment Name: At_100uM_ABA_P Parameter: Timepoint (hr) Value: 6
  misc_feature: MA Experiment 20000169 PARAMETER Experiment Name: At_100uM_ABA_P Parameter: Tissue Value: Aerial
  misc_feature: MA Experiment 20000169 PARAMETER Experiment Name: At_100uM_ABA_P Parameter: Treatment Value: 100uM ABA vs. No Treatment
  misc_feature: MA Experiment ID: 20000182 Result: Up-regulated in Transcription
  misc_feature: MA Experiment 20000182 PARAMETER Experiment Name: At_2mM_SA_P Parameter: Age (day) Value: 14
  misc_feature: MA Experiment 20000182 PARAMETER Experiment Name: At_2mM_SA_P Parameter: Organism Value: A. thaliana
  misc_feature: MA Experiment 20000182 PARAMETER Experiment Name: At_2mM_SA_P Parameter: Plant Line Value: WS
  misc_feature: MA Experiment 20000182 PARAMETER Experiment Name: At_2mM_SA_P Parameter: Timepoint (hr) Value: 6
  misc_feature: MA Experiment 20000182 PARAMETER Experiment Name: At_2mM_SA_P Parameter: Tissue Value: Aerial
  misc_feature: MA Experiment 20000182 PARAMETER Experiment Name: At_2mM_SA_P Parameter: Treatment Value: 2mM SA vs. No Treatment
  misc_feature: MA Experiment ID: 20000184 Result: Down-regulated in Transcription
  misc_feature: MA Experiment 20000184 PARAMETER Experiment Name: At_Shoots__P Parameter: Age (day) Value: 7
  misc_feature: MA Experiment 20000184 PARAMETER Experiment Name: At_Shoots__P Parameter: Tissue Value: Shoots vs. Whole Plant
  misc_feature: MA Experiment ID: 20000213 Result: Down-regulated in Transcription
  misc_feature: MA Experiment 20000213 PARAMETER Experiment Name: At_4deg_Cold_P Parameter: Timepoint (hr) Value: 2
  misc_feature: MA Experiment ID: 20000234 Result: Down-regulated in Transcription
  misc_feature: MA Experiment 20000234 PARAMETER Experiment Name: At_Siliques_P Parameter: Age (day) Value: 21
  misc_feature: MA Experiment 20000234 PARAMETER Experiment Name: At_Siliques_P Parameter: Organism Value: A. thaliana
  misc_feature: MA Experiment 20000234 PARAMETER Experiment Name: At_Siliques_P Parameter: Plant Line Value: WS
  misc_feature: MA Experiment 20000234 PARAMETER Experiment Name: At_Siliques_P Parameter: Tissue Value: Less Than 5mm Siliques vs. Whole Plant
  misc_feature: MA Experiment ID: 20000267 Result: Up-regulated in Transcription
  misc_feature: MA Experiment 20000267 PARAMETER Experiment Name: At_Drought_P Parameter: Age (day) Value: 7
  misc_feature: MA Experiment 20000267 PARAMETER Experiment Name: At_Drought_P Parameter: Organism Value: A. thaliana
  misc_feature: MA Experiment 20000267 PARAMETER Experiment Name: At_Drought_P Parameter: Plant Line Value: WS
  misc_feature: MA Experiment 20000267 PARAMETER Experiment Name: At_Drought_P Parameter: Timepoint (hr) Value: 6
  misc_feature: MA Experiment 20000267 PARAMETER Experiment Name: At_Drought_P Parameter: Tissue Value: Whole Plant
  misc_feature: MA Experiment 20000267 PARAMETER Experiment Name: At_Drought_P Parameter: Treatment Value: Drought vs. No Drought
  misc_feature: MA Experiment ID: 20000268 Result: Up-regulated in Transcription
  misc_feature: MA Experiment 20000268 PARAMETER Experiment Name: At_100mM_NaCl__P Parameter: Age (day) Value: 14
  misc_feature: MA Experiment 20000268 PARAMETER Experiment Name: At_100mM_NaCl__P Parameter: Organism Value: A. thaliana
  misc_feature: MA Experiment 20000268 PARAMETER Experiment Name: At_100mM_NaCl__P Parameter: Plant Line Value: WS
  misc_feature: MA Experiment 20000268 PARAMETER Experiment Name: At_100mM_NaCl__P Parameter: Timepoint (hr) Value: 6
  misc_feature: MA Experiment 20000268 PARAMETER Experiment Name: At_100mM_NaCl__P Parameter: Tissue Value: Whole Plant
  misc_feature: MA Experiment 20000268 PARAMETER Experiment Name: At_100mM_NaCl__P Parameter: Treatment Value: 100mM NaCl vs. No Treatment
  misc_feature: MA Experiment ID: 20000436 Result: Up-regulated in Transcription
  misc_feature: MA Experiment 20000436 PARAMETER Experiment Name: At_Drought_P Parameter: Age (day) Value: 7
  misc_feature: MA Experiment 20000436 PARAMETER Experiment Name: At_Drought_P Parameter: Organism Value: A. thaliana
  misc_feature: MA Experiment 20000436 PARAMETER Experiment Name: At_Drought_P Parameter: Plant Line Value: WS
  misc_feature: MA Experiment 20000436 PARAMETER Experiment Name: At_Drought_P Parameter: Timepoint (hr) Value: 12
  misc_feature: MA Experiment 20000436 PARAMETER Experiment Name: At_Drought_P Parameter: Tissue Value: Whole Plant
  misc_feature: MA Experiment 20000436 PARAMETER Experiment Name: At_Drought_P Parameter: Treatment Value: Drought vs. No Drought
  misc_feature: MA Experiment ID: 20000437 Result: Up-regulated in Transcription
  misc_feature: MA Experiment 20000437 PARAMETER Experiment Name: At_Drought_P Parameter: Age (day) Value: 8
  misc_feature: MA Experiment 20000437 PARAMETER Experiment Name: At_Drought_P Parameter: Organism Value: A. thaliana
  misc_feature: MA Experiment 20000437 PARAMETER Experiment Name: At_Drought_P Parameter: Plant Line Value: WS
  misc_feature: MA Experiment 20000437 PARAMETER Experiment Name: At_Drought_P Parameter: Timepoint (hr) Value: 24
  misc_feature: MA Experiment 20000437 PARAMETER Experiment Name: At_Drought_P Parameter: Tissue Value: Whole Plant
  misc_feature: MA Experiment 20000437 PARAMETER Experiment Name: At_Drought_P Parameter: Treatment Value: Drought vs. No Drought
  misc_feature: MA Experiment ID: 20000438 Result: Down-regulated in Transcription
  misc_feature: MA Experiment 20000438 PARAMETER Experiment Name: At_Shoots__P Parameter: Age (day) Value: 14
  misc_feature: MA Experiment 20000438 PARAMETER Experiment Name: At_Shoots__P Parameter: Tissue Value: Shoots vs. Whole Plant
  misc_feature: MA Experiment ID: 20000453 Result: Up-regulated in Transcription
  misc_feature: MA Experiment 20000453 PARAMETER Experiment Name: At_100uM_ABA_P Parameter: Age (day) Value: 15
  misc_feature: MA Experiment 20000453 PARAMETER Experiment Name: At_100uM_ABA_P Parameter: Organism Value: A. thaliana
  misc_feature: MA Experiment 20000453 PARAMETER Experiment Name: At_100uM_ABA_P Parameter: Plant Line Value: WS
  misc_feature: MA Experiment 20000453 PARAMETER Experiment Name: At_100uM_ABA_P Parameter: Timepoint (hr) Value: 24
  misc_feature: MA Experiment 20000453 PARAMETER Experiment Name: At_100uM_ABA_P Parameter: Tissue Value: Aerial
  misc_feature: MA Experiment 20000453 PARAMETER Experiment Name: At_100uM_ABA_P Parameter: Treatment Value: 100uM ABA vs. No Treatment
  misc_feature: MA Experiment ID: 20000455 Result: Up-regulated in Transcription
  misc_feature: MA Experiment 20000455 PARAMETER Experiment Name: At_100uM_ABA_P Parameter: Age (day) Value: 16
  misc_feature: MA Experiment 20000455 PARAMETER Experiment Name: At_100uM_ABA_P Parameter: Organism Value: A. thaliana
  misc_feature: MA Experiment 20000455 PARAMETER Experiment Name: At_100uM_ABA_P Parameter: Plant Line Value: WS
  misc_feature: MA Experiment 20000455 PARAMETER Experiment Name: At_100uM_ABA_P Parameter: Timepoint (hr) Value: 48
  misc_feature: MA Experiment 20000455 PARAMETER Experiment Name: At_100uM_ABA_P Parameter: Tissue Value: Aerial
  misc_feature: MA Experiment 20000455 PARAMETER Experiment Name: At_100uM_ABA_P Parameter: Treatment Value: 100uM ABA vs. No Treatment
  misc_feature: MA Experiment ID: 20000573 Result: Up-regulated in Transcription
  misc_feature: MA Experiment 20000573 PARAMETER Experiment Name: At_100uM_ABA_Mutants__P Parameter: Organism Value: A. thaliana
  misc_feature: MA Experiment 20000573 PARAMETER Experiment Name: At_100uM_ABA_Mutants__P Parameter: Plant Line Value: CS22 vs. Ler wt
  misc_feature: MA Experiment 20000573 PARAMETER Experiment Name: At_100uM_ABA_Mutants__P Parameter: Timepoint (hr) Value: N/A
  misc_feature: MA Experiment 20000573 PARAMETER Experiment Name: At_100uM_ABA_Mutants__P Parameter: Tissue Value: Whole Plant
  misc_feature: MA Experiment 20000573 PARAMETER Experiment Name: At_100uM_ABA_Mutants__P Parameter: Treatment Value: None
  misc_feature: MA Experiment ID: 20000574 Result: Up-regulated in Transcription
  misc_feature: MA Experiment 20000574 PARAMETER Experiment Name: At_100uM_ABA_Mutants__P Parameter: Organism Value: A. thaliana
  misc_feature: MA Experiment 20000574 PARAMETER Experiment Name: At_100uM_ABA_Mutants__P Parameter: Plant Line Value: CS23 vs. Ler wt
  misc_feature: MA Experiment 20000574 PARAMETER Experiment Name: At_100uM_ABA_Mutants__P Parameter: Timepoint (hr) Value: N/A
  misc_feature: MA Experiment 20000574 PARAMETER Experiment Name: At_100uM_ABA_Mutants__P Parameter: Tissue Value: Whole Plant
  misc_feature: MA Experiment 20000574 PARAMETER Experiment Name: At_100uM_ABA_Mutants__P Parameter: Treatment Value: None
  misc_feature: MA Experiment ID: 20000794 Result: Up-regulated in Transcription
  misc_feature: MA Experiment 20000794 PARAMETER Experiment Name: At_Petals_P Parameter: Age (day) Value: 23-25 days
  misc_feature: MA Experiment 20000794 PARAMETER Experiment Name: At_Petals_P Parameter: Plant Line Value: WS
  misc_feature: MA Experiment 20000794 PARAMETER Experiment Name: At_Petals_P Parameter: Tissue Value: Petals vs. Whole plant
  misc_feature: MA Experiment ID: 20001248 Result: Up-regulated in Transcription
  misc_feature: MA Experiment 20001248 PARAMETER Experiment Name: At_Far-red-induction_P Parameter: Age (day) Value: 7
  misc_feature: MA Experiment 20001248 PARAMETER Experiment Name: At_Far-red-induction_P Parameter: Light Value: Far-red vs. White
  misc_feature: MA Experiment 20001248 PARAMETER Experiment Name: At_Far-red-induction_P Parameter: Organism Value: A. thaliana
  misc_feature: MA Experiment 20001248 PARAMETER Experiment Name: At_Far-red-induction_P Parameter: Plant Line Value: Columbia
  misc_feature: MA Experiment 20001248 PARAMETER Experiment Name: At_Far-red-induction_P Parameter: Timepoint (hr) Value: 4
  misc_feature: MA Experiment 20001248 PARAMETER Experiment Name: At_Far-red-induction_P Parameter: Tissue Value: Whole Plant
  misc_feature: MA Experiment ID: 20001450 Result: Up-regulated in Transcription
  misc_feature: MA Experiment 20001450 PARAMETER Experiment Name: At_Far-red-induction_P Parameter: Age (day) Value: 7
  misc_feature: MA Experiment 20001450 PARAMETER Experiment Name: At_Far-red-induction_P Parameter: Light Value: Far-red vs. White
  misc_feature: MA Experiment 20001450 PARAMETER Experiment Name: At_Far-red-induction_P Parameter: Organism Value: A. thaliana
  misc_feature: MA Experiment 20001450 PARAMETER Experiment Name: At_Far-red-induction_P Parameter: Plant Line Value: Columbia
  misc_feature: MA Experiment 20001450 PARAMETER Experiment Name: At_Far-red-induction_P Parameter: Timepoint (hr) Value: 8
  misc_feature: MA Experiment 20001450 PARAMETER Experiment Name: At_Far-red-induction_P Parameter: Tissue Value: Whole Plant
  misc_feature: MA Experiment ID: 20001451 Result: Up-regulated in Transcription
  misc_feature: MA Experiment 20001451 PARAMETER Experiment Name: At_Far-red-induction_P Parameter: Age (day) Value: 7
  misc_feature: MA Experiment 20001451 PARAMETER Experiment Name: At_Far-red-induction_P Parameter: Light Value: Far-red vs. White
  misc_feature: MA Experiment 20001451 PARAMETER Experiment Name: At_Far-red-induction_P Parameter: Organism Value: A. thaliana
  misc_feature: MA Experiment 20001451 PARAMETER Experiment Name: At_Far-red-induction_P Parameter: Plant Line Value: Columbia
  misc_feature: MA Experiment 20001451 PARAMETER Experiment Name: At_Far-red-induction_P Parameter: Timepoint (hr) Value: 24
  misc_feature: MA Experiment 20001451 PARAMETER Experiment Name: At_Far-red-induction_P Parameter: Tissue Value: Whole Plant
  misc_feature: MA Experiment ID: 20001554 Result: Up-regulated in Transcription
  misc_feature: MA Experiment 20001554 PARAMETER Experiment Name: At_Drought_Soil_Dry_P Parameter: Age (day) Value: 21
  misc_feature: MA Experiment 20001554 PARAMETER Experiment Name: At_Drought_Soil_Dry_P Parameter: Organism Value: A. thaliana
  misc_feature: MA Experiment 20001554 PARAMETER Experiment Name: At_Drought_Soil_Dry_P Parameter: Plant Line Value: WS
  misc_feature: MA Experiment 20001554 PARAMETER Experiment Name: At_Drought_Soil_Dry_P Parameter: Post Timepoint (hr) Value: None
  misc_feature: MA Experiment 20001554 PARAMETER Experiment Name: At_Drought_Soil_Dry_P Parameter: Post-Treatment Value: None
  misc_feature: MA Experiment 20001554 PARAMETER Experiment Name: At_Drought_Soil_Dry_P Parameter: Timepoint (day) Value: 7
  misc_feature: MA Experiment 20001554 PARAMETER Experiment Name: At_Drought_Soil_Dry_P Parameter: Treatment Value: Drought vs. No Drought
  misc_feature: MA Experiment ID: 20001559 Result: Up-regulated in Transcription
  misc_feature: MA Experiment 20001559 PARAMETER Experiment Name: At_Drought_Soil_Dry_P Parameter: Age (day) Value: 28
  misc_feature: MA Experiment 20001559 PARAMETER Experiment Name: At_Drought_Soil_Dry_P Parameter: Organism Value: A. thaliana
  misc_feature: MA Experiment 20001559 PARAMETER Experiment Name: At_Drought_Soil_Dry_P Parameter: Plant Line Value: WS
  misc_feature: MA Experiment 20001559 PARAMETER Experiment Name: At_Drought_Soil_Dry_P Parameter: Post Timepoint (hr) Value: 29
  misc_feature: MA Experiment 20001559 PARAMETER Experiment Name: At_Drought_Soil_Dry_P Parameter: Post-Treatment Value: Re-Water vs. No Drought
  misc_feature: MA Experiment 20001559 PARAMETER Experiment Name: At_Drought_Soil_Dry_P Parameter: Timepoint (day) Value: 14
  misc_feature: MA Experiment 20001559 PARAMETER Experiment Name: At_Drought_Soil_Dry_P Parameter: Treatment Value: Drought vs. No Drought
  misc_feature: MA Experiment ID: 20001757 Result: Down-regulated in Transcription
  misc_feature: MA Experiment 20001757 PARAMETER Experiment Name: At_50mM_NH4NO3_L-to-H_P Parameter: Timepoint (hr) Value: 6
  misc_feature: MA Experiment 20001757 PARAMETER Experiment Name: At_50mM_NH4NO3_L-to-H_P Parameter: Tissue Value: Leaf
  misc_feature: MA Experiment 20001757 PARAMETER Experiment Name: At_50mM_NH4NO3_L-to-H_P Parameter: Treatment Value: 50mM NH4NO3 vs 100mM Mannitol
  misc_feature: MA Experiment ID: 20001904 Result: Up-regulated in Transcription
  misc_feature: MA Experiment 20001904 PARAMETER Experiment Name: At_Drought_Reproduction_P Parameter: Age (day) Value: 37
  misc_feature: MA Experiment 20001904 PARAMETER Experiment Name: At_Drought_Reproduction_P Parameter: Organism Value: A. thaliana
  misc_feature: MA Experiment 20001904 PARAMETER Experiment Name: At_Drought_Reproduction_P Parameter: Plant Line Value: WS
  misc_feature: MA Experiment 20001904 PARAMETER Experiment Name: At_Drought_Reproduction_P Parameter: Timepoint (day) Value: 7
  misc_feature: MA Experiment 20001904 PARAMETER Experiment Name: At_Drought_Reproduction_P Parameter: Tissue Value: Rosettes
  misc_feature: MA Experiment 20001904 PARAMETER Experiment Name: At_Drought_Reproduction_P Parameter: Treatment Value: Drought vs. No Drought
  misc_feature: MA Experiment ID: 20001905 Result: Up-regulated in Transcription
  misc_feature: MA Experiment 20001905 PARAMETER Experiment Name: At_Drought_Reproduction_P Parameter: Age (day) Value: 40
  misc_feature: MA Experiment 20001905 PARAMETER Experiment Name: At_Drought_Reproduction_P Parameter: Organism Value: A. thaliana
  misc_feature: MA Experiment 20001905 PARAMETER Experiment Name: At_Drought_Reproduction_P Parameter: Plant Line Value: WS
  misc_feature: MA Experiment 20001905 PARAMETER Experiment Name: At_Drought_Reproduction_P Parameter: Timepoint (day) Value: 10
  misc_feature: MA Experiment 20001905 PARAMETER Experiment Name: At_Drought_Reproduction_P Parameter: Tissue Value: Rosettes
  misc_feature: MA Experiment 20001905 PARAMETER Experiment Name: At_Drought_Reproduction_P Parameter: Treatment Value: Drought vs. No Drought
  misc_feature: MA Experiment ID: 20001906 Result: Up-regulated in Transcription
  misc_feature: MA Experiment 20001906 PARAMETER Experiment Name: At_Drought_Reproduction_P Parameter: Age (day) Value: 35
  misc_feature: MA Experiment 20001906 PARAMETER Experiment Name: At_Drought_Reproduction_P Parameter: Organism Value: A. thaliana
  misc_feature: MA Experiment 20001906 PARAMETER Experiment Name: At_Drought_Reproduction_P Parameter: Plant Line Value: WS
  misc_feature: MA Experiment 20001906 PARAMETER Experiment Name: At_Drought_Reproduction_P Parameter: Timepoint (day) Value: 5
  misc_feature: MA Experiment 20001906 PARAMETER Experiment Name: At_Drought_Reproduction_P Parameter: Tissue Value: Siliques
  misc_feature: MA Experiment 20001906 PARAMETER Experiment Name: At_Drought_Reproduction_P Parameter: Treatment Value: Drought vs. No Drought
  misc_feature: MA Experiment ID: 20001911 Result: Up-regulated in Transcription
  misc_feature: MA Experiment 20001911 PARAMETER Experiment Name: At_Drought_Reproduction_P Parameter: Age (day) Value: 40
  misc_feature: MA Experiment 20001911 PARAMETER Experiment Name: At_Drought_Reproduction_P Parameter: Organism Value: A. thaliana
  misc_feature: MA Experiment 20001911 PARAMETER Experiment Name: At_Drought_Reproduction_P Parameter: Plant Line Value: WS
  misc_feature: MA Experiment 20001911 PARAMETER Experiment Name: At_Drought_Reproduction_P Parameter: Timepoint (day) Value: 10
  misc_feature: MA Experiment 20001911 PARAMETER Experiment Name: At_Drought_Reproduction_P Parameter: Tissue Value: Flowers
  misc_feature: MA Experiment 20001911 PARAMETER Experiment Name: At_Drought_Reproduction_P Parameter: Treatment Value: Drought vs. No Drought
aagctttttttacaaaagacgtacacgtctctctctctcactccctctttaagatcagaagctcatttcttcgatacgatcaaccattagagatgggttcggcgaacaacgagtacgagtttctgagtgagattgggctgacttctcacaacttgggatcttacgttgctggcaaatggcaagccaacggacctcttgtttcaactctcaatcctgctaacaatcagccaattgctcaagttgtggaagcttctctagaggattacgagcaaggtttgaaagcttgcgaggaagcagctaaaatatggatgcaggttacggctcctaagagaggtgatatcgtcagacagattggggatgcactaagatccaaacttgactatcttggtcgtcttctttctcttgaaatgggaaagatccttgctgaaggtattggagaagttcaggaagtaattgacatgtgtgattttgctgttggtttgagccgacaactcaatggatcggttataccttcagaacgccctaaccacatgatgttggagatgtggaatcctcttggcattgttggtgttatcacagcgtttaattttccctgtgcagttcttggttggaatgcttgtattgctcttgtctgtggaaactgtgtagtctggaaaggtgctccaactacaccgttaataactatcgcaatgaccaagctagtagctgaagttttagagaaaaacaacttacccggtgccatttttacggccatgtgtggtggtgctgaaattggtgaagcaatagccaaagacacacgcattcccttagtatcctttactggaagctccagggtgggctcaatggtacaacaaacagtgaatgcgagatctgggaaaactttgcttgagttgagtggaaacaatgcaatcatagtcatggacgatgctgatatacagttagcggctcgatctgttctattcgctgcggttggaactgctggtcaacgttgcacaacttgccgtaggctgcttttgcatgagagtgtctatgacaaagtactcgagcaactgcttacctcatacaaacaagtcaaaatcggcaatcctcttgagaaagggacattgttaggaccattacatactcctgaatcaaaaaagaactttgagaaaggaattgaagtcatcaaatcccagggtggtaaaatactaacgggaggtaaagcagtcgaaggtgaaggaaactttgtggagcctacgataatcgagatatcagcagatgctgctgtcgtcaaagaagagctatttgctccggttctatatgttctaaagtttaagtcatttggagaggctgttgcgataaacaactcggttcctcaaggtctaagcagctcgatattcactcggaaccctgaaaacatcttcaggtggatcggaccactgggaagtgactgtggcattgtgaatgtgaacataccgacgaatggagctgagattggtggagcttttggaggcgagaaagcgactggtggtggtcgtgaagctggaagcgactcatggaaacagtacatgcgtcgatcgacttgtaccatcaactatggaaacgagttacctctagcgcaaggaattaacttcggttagatttttcagagatttactcgttaattaataatgttatgttggttcgatttcgatacttgtattgtatgccttgttctctccaagcctttgacttaagatgattacgcttttaatatatataaaaaaatattgaatatattttgattgttaatttgaag

SEQ ID NO: 24266 - protein, 538 aa, Arabidopsis thaliana
  peptide (1)..(538): Ceres Seq. ID no. 13610498
  misc_feature (31)..(538): Homolog of NCBI NO: 11995457 NR Description: aldehyde dehydrogenase [Oryza sativa]
  misc_feature (31)..(538): Homolog of NCBI NO: 25090068 NR Description: Aldehyde dehydrogenase family 7 member A1
  misc_feature (31)..(538): Homolog of NCBI NO: 118514 NR Description: Aldehyde dehydrogenase family 7 member A1
  misc_feature (31)..(520): Homolog of NCBI NO: 25090053 NR Description: Aldehyde dehydrogenase family 7 member A1
  misc_feature (31)..(538): Homolog of NCBI NO: 15221042 NR Description: aldehyde dehydrogenase, putative (ALDH)
  misc_feature (31)..(538): Homolog of NCBI NO: 11995457 NR Description: aldehyde dehydrogenase [Oryza sativa]
  misc_feature (31)..(538): Homolog of NCBI NO: 25090068 NR Description: Aldehyde dehydrogenase family 7 member A1
  misc_feature (31)..(538): Homolog of NCBI NO: 118514 NR Description: Aldehyde dehydrogenase family 7 member A1
  misc_feature (31)..(520): Homolog of NCBI NO: 25090053 NR Description: Aldehyde dehydrogenase family 7 member A1
  misc_feature (31)..(538): Homolog of NCBI NO: 15221042 NR Description: aldehyde dehydrogenase, putative (ALDH)
AFFTKDVHVSLSHSLFKIRSSFLRYDQPLEMGSANNEYEFLSEIGLTSHNLGSYVAGKWQANGPLVSTLNPANNQPIAQVVEASLEDYEQGLKACEEAAKIWMQVTAPKRGDIVRQIGDALRSKLDYLGRLLSLEMGKILAEGIGEVQEVIDMCDFAVGLSRQLNGSVIPSERPNHMMLEMWNPLGIVGVITAFNFPCAVLGWNACIALVCGNCVVWKGAPTTPLITIAMTKLVAEVLEKNNLPGAIFTAMCGGAEIGEAIAKDTRIPLVSFTGSSRVGSMVQQTVNARSGKTLLELSGNNAIIVMDDADIQLAARSVLFAAVGTAGQRCTTCRRLLLHESVYDKVLEQLLTSYKQVKIGNPLEKGTLLGPLHTPESKKNFEKGIEVIKSQGGKILTGGKAVEGEGNFVEPTIIEISADAAVVKEELFAPVLYVLKFKSFGEAVAINNSVPQGLSSSIFTRNPENIFRWIGPLGSDCGIVNVNIPTNGAEIGGAFGGEKATGGGREAGSDSWKQYMRRSTCTINYGNELPLAQGINFG

SEQ ID NO: 24267 - protein, 508 aa, Arabidopsis thaliana
  peptide (1)..(508): Ceres Seq. ID no. 13610499
  misc_feature (1)..(508): Homolog of NCBI NO: 11995457 NR Description: aldehyde dehydrogenase [Oryza sativa]
  misc_feature (1)..(508): Homolog of NCBI NO: 25090068 NR Description: Aldehyde dehydrogenase family 7 member A1
  misc_feature (1)..(508): Homolog of NCBI NO: 118514 NR Description: Aldehyde dehydrogenase family 7 member A1
  misc_feature (1)..(490): Homolog of NCBI NO: 25090053 NR Description: Aldehyde dehydrogenase family 7 member A1
  misc_feature (1)..(508): Homolog of NCBI NO: 15221042 NR Description: aldehyde dehydrogenase, putative (ALDH)
  misc_feature (1)..(490): Homolog of NCBI NO: 25090053 NR Description: Aldehyde dehydrogenase family 7 member A1
  misc_feature (1)..(508): Homolog of NCBI NO: 15221042 NR Description: aldehyde dehydrogenase, putative (ALDH)
  misc_feature (1)..(508): Homolog of NCBI NO: 11995457 NR Description: aldehyde dehydrogenase [Oryza sativa]
  misc_feature (1)..(508): Homolog of NCBI NO: 25090068 NR Description: Aldehyde dehydrogenase family 7 member A1
  misc_feature (1)..(508): Homolog of NCBI NO: 118514 NR Description: Aldehyde dehydrogenase family 7 member A1
MGSANNEYEFLSEIGLTSHNLGSYVAGKWQANGPLVSTLNPANNQPIAQVVEASLEDYEQGLKACEEAAKIWMQVTAPKRGDIVRQIGDALRSKLDYLGRLLSLEMGKILAEGIGEVQEVIDMCDFAVGLSRQLNGSVIPSERPNHMMLEMWNPLGIVGVITAFNFPCAVLGWNACIALVCGNCVVWKGAPTTPLITIAMTKLVAEVLEKNNLPGAIFTAMCGGAEIGEAIAKDTRIPLVSFTGSSRVGSMVQQTVNARSGKTLLELSGNNAIIVMDDADIQLAARSVLFAAVGTAGQRCTTCRRLLLHESVYDKVLEQLLTSYKQVKIGNPLEKGTLLGPLHTPESKKNFEKGIEVIKSQGGKILTGGKAVEGEGNFVEPTIIEISADAAVVKEELFAPVLYVLKFKSFGEAVAINNSVPQGLSSSIFTRNPENIFRWIGPLGSDCGIVNVNIPTNGAEIGGAFGGEKATGGGREAGSDSWKQYMRRSTCTINYGNELPLAQGINFG

SEQ ID NO: 24268 - protein, 436 aa, Arabidopsis thaliana
  peptide (1)..(436): Ceres Seq. ID no. 13610500
  misc_feature (1)..(436): Homolog of NCBI NO: 11995457 NR Description: aldehyde dehydrogenase [Oryza sativa]
  misc_feature (1)..(436): Homolog of NCBI NO: 25090068 NR Description: Aldehyde dehydrogenase family 7 member A1
  misc_feature (1)..(436): Homolog of NCBI NO: 118514 NR Description: Aldehyde dehydrogenase family 7 member A1
  misc_feature (1)..(418): Homolog of NCBI NO: 25090053 NR Description: Aldehyde dehydrogenase family 7 member A1
  misc_feature (1)..(436): Homolog of NCBI NO: 15221042 NR Description: aldehyde dehydrogenase, putative (ALDH)
  misc_feature (1)..(436): Homolog of NCBI NO: 11995457 NR Description: aldehyde dehydrogenase [Oryza sativa]
  misc_feature (1)..(436): Homolog of NCBI NO: 25090068 NR Description: Aldehyde dehydrogenase family 7 member A1
  misc_feature (1)..(436): Homolog of NCBI NO: 118514 NR Description: Aldehyde dehydrogenase family 7 member A1
  misc_feature (1)..(418): Homolog of NCBI NO: 25090053 NR Description: Aldehyde dehydrogenase family 7 member A1
  misc_feature (1)..(436): Homolog of NCBI NO: 15221042 NR Description: aldehyde dehydrogenase, putative (ALDH)
MQVTAPKRGDIVRQIGDALRSKLDYLGRLLSLEMGKILAEGIGEVQEVIDMCDFAVGLSRQLNGSVIPSERPNHMMLEMWNPLGIVGVITAFNFPCAVLGWNACIALVCGNCVVWKGAPTTPLITIAMTKLVAEVLEKNNLPGAIFTAMCGGAEIGEAIAKDTRIPLVSFTGSSRVGSMVQQTVNARSGKTLLELSGNNAIIVMDDADIQLAARSVLFAAVGTAGQRCTTCRRLLLHESVYDKVLEQLLTSYKQVKIGNPLEKGTLLGPLHTPESKKNFEKGIEVIKSQGGKILTGGKAVEGEGNFVEPTIIEISADAAVVKEELFAPVLYVLKFKSFGEAVAINNSVPQGLSSSIFTRNPENIFRWIGPLGSDCGIVNVNIPTNGAEIGGAFGGEKATGGGREAGSDSWKQYMRRSTCTINYGNELPLAQGINFG

SEQ ID NO: 24269 - DNA, 1267 bp, Arabidopsis thaliana
  misc_feature (1)..(1267): Ceres Seq. ID no. 12322044
  misc_feature: MA Experiment ID: 108572 Result: Up-regulated in Transcription
  misc_feature: MA Experiment 108572 PARAMETER Experiment Name: At_Drought_cDNA_P Parameter: Timepoint (hr) Value: 1
  misc_feature: MA Experiment 108572 PARAMETER Experiment Name: At_Drought_cDNA_P Parameter: Tissue Value: Aerial
  misc_feature: MA Experiment 108572 PARAMETER Experiment Name: At_Drought_cDNA_P Parameter: Treatment Value: Drought vs. No Drought
  misc_feature: MA Experiment ID: 20000224 Result: Down-regulated in Transcription
  misc_feature: MA Experiment ID: 20001451 Result: Up-regulated in Transcription
  misc_feature: MA Experiment 20001451 PARAMETER Experiment Name: At_Far-red-induction_P Parameter: Age (day) Value: 7
  misc_feature: MA Experiment 20001451 PARAMETER Experiment Name: At_Far-red-induction_P Parameter: Light Value: Far-red vs. White
  misc_feature: MA Experiment 20001451 PARAMETER Experiment Name: At_Far-red-induction_P Parameter: Organism Value: A. thaliana
  misc_feature: MA Experiment 20001451 PARAMETER Experiment Name: At_Far-red-induction_P Parameter: Plant Line Value: Columbia
  misc_feature: MA Experiment 20001451 PARAMETER Experiment Name: At_Far-red-induction_P Parameter: Timepoint (hr) Value: 24
  misc_feature: MA Experiment 20001451 PARAMETER Experiment Name: At_Far-red-induction_P Parameter: Tissue Value: Whole Plant
aaacttgtttctcccgagagatatctatcatcacaatctccttccttcgtgttcatcaatctcccgccgcgcttcagacaagaaacaatgtctgggctgctggatggaatccccgaagcagtggctctgagatgcctggctcatgtgcctttacaccttcatcccaatttagaactcgtctctcgctcctggcgagctgctatccgcagtcatgagctcttcagagtccgtaaagagctccgatcttctgagcatctcctctgcgtctgtgctttcgatcctgagaacatctggcaagtctacagtcccaactgtgatcgctggctcaccctccctctccttccttctcgtatccgccaccttgcccatttcggtgctgtcactactgccggcatgctctttgtcttaggcggtggcagcgacgctgtcagccctgttaccggggatcacgacggtacctttgctactgaccaggtctggtcttacgactttgtacagagacagtggactcctcgcgcttcaatgctcgtgcctcgtgctatgttcgcctgctgcgttcttcaagggaagattgttgttgctggcggattcaccacttgcaggaaatccatatctggagcggagatgtatgatcctgagaatgacgtctggacatccatcccagatctccaccagactcataactctgcctgctcgggtctagtggtaaacgggaaagtccacgtcttgcacaaaggcttgtccacggtgcaggttcttgagagcgttaaactcgggtgggatgtcaaagactatggctggccgcaaggtccaatggtggtcgttgaggacgtgctttacgtgatgagccatgggctggtgttcaagcaagaaggtgacacgtggaagatggttgcatcggcctcagagtttaagcggaggatcggaatggcgatgacgagtttgagtgatgaggttttgatcgtaggaggagtgatcggacctgataggctcaattgggacatcaagcccttgtcagacgtcgacgctttgacagttgggaatgatcgtccggcctggaggagtgtggcgccgatgacaaggtgtcgtgggacgatccttggctgcacgcagttgacaatctgatggatgggaatgtggcttcattatgacgtctttcagttcttttttgttttgtattttcttcctgtttgttaactgttgtgagcattattgtttttaaatcttctttgagaaatgaaaataaacgaatagcagctatgtcttg

SEQ ID NO: 24270 - protein, 374 aa, Arabidopsis thaliana
  peptide (1)..(374): Ceres Seq. ID no. 12322045
  misc_feature (120)..(176): Pfam Name: Kelch motif Pfam Description: Kelch motif
  misc_feature (26)..(357): Homolog of NCBI NO: 37534254 NR Description: unknown protein [Oryza sativa (japonica
  misc_feature (24)..(115): Homolog of NCBI NO: 15239366 NR Description: putative protein; protein id: At5g60570.1
  misc_feature (159)..(267): Homolog of NCBI NO: 15239366 NR Description: putative protein; protein id: At5g60570.1
  misc_feature (19)..(321): Homolog of NCBI NO: 7487225 NR Description: hypothetical protein T1F15.5 - Arabidopsis
  misc_feature (19)..(321): Homolog of NCBI NO: 15220452 NR Description: unknown protein; protein id: At1g67480.1
  misc_feature (37)..(268): Homolog of NCBI NO: 25518477 NR Description: hypothetical protein F3O9.5 - Arabidopsis
  misc_feature (6)..(290): Homolog of NCBI NO: 32489068 NR Description: OSJNBb0089B03.12 [Oryza sativa (japonica
  misc_feature (28)..(268): Homolog of NCBI NO: 22329607 NR Description: Kelch repeat containing F-box protein family
  misc_feature (95)..(374): Homolog of NCBI NO: 37533892 NR Description: putative protein [Oryza sativa (japonica
  misc_feature (30)..(374): Homolog of NCBI NO: 15229392 NR Description: Kelch repeat containing F-box protein family
KLVSPERYLSSQSPSFVFINLPPRFRQETMSGLLDGIPEAVALRCLAHVPLHLHPNLELVSRSWRAAIRSHELFRVRKELRSSEHLLCVCAFDPENIWQVYSPNCDRWLTLPLLPSRIRHLAHFGAVTTAGMLFVLGGGSDAVSPVTGDHDGTFATDQVWSYDFVQRQWTPRASMLVPRAMFACCVLQGKIVVAGGFTTCRKSISGAEMYDPENDVWTSIPDLHQTHNSACSGLVVNGKVHVLHKGLSTVQVLESVKLGWDVKDYGWPQGPMVVVEDVLYVMSHGLVFKQEGDTWKMVASASEFKRRIGMAMTSLSDEVLIVGGVIGPDRLNWDIKPLSDVDALTVGNDRPAWRSVAPMTRCRGTILGCTQLTI

SEQ ID NO: 24271 - protein, 345 aa, Arabidopsis thaliana
  peptide (1)..(345): Ceres Seq. ID no. 12322046
  misc_feature (91)..(147): Pfam Name: Kelch motif Pfam Description: Kelch motif
  misc_feature (1)..(328): Homolog of NCBI NO: 37534254 NR Description: unknown protein [Oryza sativa (japonica
  misc_feature (1)..(86): Homolog of NCBI NO: 15239366 NR Description: putative protein; protein id: At5g60570.1
  misc_feature (130)..(238): Homolog of NCBI NO: 15239366 NR Description: putative protein; protein id: At5g60570.1
  misc_feature (1)..(292): Homolog of NCBI NO: 7487225 NR Description: hypothetical protein T1F15.5 - Arabidopsis
  misc_feature (1)..(292): Homolog of NCBI NO: 15220452 NR Description: unknown protein; protein id: At1g67480.1
  misc_feature (8)..(239): Homolog of NCBI NO: 25518477 NR Description: hypothetical protein F3O9.5 - Arabidopsis
  misc_feature (1)..(261): Homolog of NCBI NO: 32489068 NR Description: OSJNBb0089B03.12 [Oryza sativa (japonica
  misc_feature (1)..(239): Homolog of NCBI NO: 22329607 NR Description: Kelch repeat containing F-box protein family
  misc_feature (66)..(345): Homolog of NCBI NO: 37533892 NR Description: putative protein [Oryza sativa (japonica
  misc_feature (1)..(345): Homolog of NCBI NO: 15229392 NR Description: Kelch repeat containing F-box protein family
MSGLLDGIPEAVALRCLAHVPLHLHPNLELVSRSWRAAIRSHELFRVRKELRSSEHLLCVCAFDPENIWQVYSPNCDRWLTLPLLPSRIRHLAHFGAVTTAGMLFVLGGGSDAVSPVTGDHDGTFATDQVWSYDFVQRQWTPRASMLVPRAMFACCVLQGKIVVAGGFTTCRKSISGAEMYDPENDVWTSIPDLHQTHNSACSGLVVNGKVHVLHKGLSTVQVLESVKLGWDVKDYGWPQGPMVVVEDVLYVMSHGLVFKQEGDTWKMVASASEFKRRIGMAMTSLSDEVLIVGGVIGPDRLNWDIKPLSDVDALTVGNDRPAWRSVAPMTRCRGTILGCTQLTI

SEQ ID NO: 24272 - protein, 243 aa, Arabidopsis thaliana
  peptide (1)..(243): Ceres Seq. ID no. 12322047
  misc_feature (1)..(45): Pfam Name: Kelch motif Pfam Description: Kelch motif
  misc_feature (1)..(149): Homolog of NCBI NO: 19071626 NR Description: putative Kelch motif containing protein
  misc_feature (1)..(226): Homolog of NCBI NO: 37534254 NR Description: unknown protein [Oryza sativa (japonica
  misc_feature (28)..(136): Homolog of NCBI NO: 15239366 NR Description: putative protein; protein id: At5g60570.1
  misc_feature (1)..(190): Homolog of NCBI NO: 7487225 NR Description: hypothetical protein T1F15.5 - Arabidopsis
  misc_feature (1)..(190): Homolog of NCBI NO: 15220452 NR Description: unknown protein; protein id: At1g67480.1
  misc_feature (1)..(137): Homolog of NCBI NO: 25518477 NR Description: hypothetical protein F3O9.5 - Arabidopsis
  misc_feature (1)..(159): Homolog of NCBI NO: 32489068 NR Description: OSJNBb0089B03.12 [Oryza sativa (japonica
  misc_feature (1)..(137): Homolog of NCBI NO: 22329607 NR Description: Kelch repeat containing F-box protein family
  misc_feature (1)..(243): Homolog of NCBI NO: 37533892 NR Description: putative protein [Oryza sativa (japonica
  misc_feature (1)..(243): Homolog of NCBI NO: 15229392 NR Description: Kelch repeat containing F-box protein family
MLFVLGGGSDAVSPVTGDHDGTFATDQVWSYDFVQRQWTPRASMLVPRAMFACCVLQGKIVVAGGFTTCRKSISGAEMYDPENDVWTSIPDLHQTHNSACSGLVVNGKVHVLHKGLSTVQVLESVKLGWDVKDYGWPQGPMVVVEDVLYVMSHGLVFKQEGDTWKMVASASEFKRRIGMAMTSLSDEVLIVGGVIGPDRLNWDIKPLSDVDALTVGNDRPAWRSVAPMTRCRGTILGCTQLTI

SEQ ID NO: 24273 - DNA, 1091 bp, Arabidopsis thaliana
  misc_feature (1)..(1091): Ceres Seq. ID no. 12335534
  misc_feature: MA Experiment ID: 20000182 Result: Up-regulated in Transcription
  misc_feature: MA Experiment 20000182 PARAMETER Experiment Name: At_2mM_SA_P Parameter: Age (day) Value: 14
  misc_feature: MA Experiment 20000182 PARAMETER Experiment Name: At_2mM_SA_P Parameter: Organism Value: A. thaliana
  misc_feature: MA Experiment 20000182 PARAMETER Experiment Name: At_2mM_SA_P Parameter: Plant Line Value: WS
  misc_feature: MA Experiment 20000182 PARAMETER Experiment Name: At_2mM_SA_P Parameter: Timepoint (hr) Value: 6
  misc_feature: MA Experiment 20000182 PARAMETER Experiment Name: At_2mM_SA_P Parameter: Tissue Value: Aerial
  misc_feature: MA Experiment 20000182 PARAMETER Experiment Name: At_2mM_SA_P Parameter: Treatment Value: 2mM SA vs. No Treatment
  misc_feature: MA Experiment ID: 20000227 Result: Down-regulated in Transcription
  misc_feature: MA Experiment 20000227 PARAMETER Experiment Name: At_Root-Tips-vs-Tops_P Parameter: Tissue Value: Root Tips vs. Root Tops
aacttttgccgagaaaatcagagacagaagaagaagaaaagcgaaaaaaagcaaaacatgaaggcgacgacgaagactccgatccacgtggtgtggtcatgggttaggagacaacctccgaaggtgaaggcttttctcgccgtggtcactggcatggcggctttggttcttctcagattcattgttcacgatcacgacaatctcttcgttgccgctgaggctgttcattccatcgggatctgtgtgctcatctacaaactcatgaaggagaagacctgtgccggattgtcactgaaatctcaggagcttacggcgatatttttagctgttaggctgtattgtagcattgtaatggaatatgatatacataccattcttgacttggctactttgggaacaactctctgggttatatttatgattcgtttcaagttaagagctagttacatggaggacaaagacaactttcctctctattatgtgcttgcgccctgtgttgcattagctgtgttcatccatccatcgacctctcataacataataaacagaatttcatgggctttatgtgtataccttgaagctgtttcagtactacctcagctacgagtgatgcagaacacaaagattgttgaaccgttcacggctcattatgtttttgcacttggagtagcaaggttcctcagctgtgcccactgggttttacaggttgtggacacgcggggacggttgcttgtagcattgggttatggattgtggccatcaatggttctgatctcagaaattgttcaaactttcatcttggcagatttctgttactactacgtcaaaagcgttttcggaggccagcttgttctccggctaccgtctggagtagtataagttcaaaagatagaaatactccaacgatgtcctgcgatgagcttgacggaaattctaattgggaaagatagctcaatttttctttacctctgatttcatcgtttatgtgtcttgaggtttcaccaagtgtctcggttacgaattaattttacagtgttgtatattttgcctatcaagggatttaacgtctttcaggtcgataagttatcttt

SEQ ID NO: 24274 - protein, 292 aa, Arabidopsis thaliana
  peptide (1)..(292): Ceres Seq. ID no. 12335535
  misc_feature (67)..(278): Pfam Name: ER lumen protein retaining receptor Pfam Description: ER lumen protein retaining receptor
  misc_feature (28)..(288): Homolog of NCBI NO: 15230808 NR Description: ER lumen protein retaining receptor, putative
  misc_feature (20)..(279): Homolog of NCBI NO: 25518365 NR Description: hypothetical protein T20H2.24 - Arabidopsis
  misc_feature (25)..(279): Homolog of NCBI NO: 25412019 NR Description: probable ER lumen protein retaining receptor
  misc_feature (20)..(292): Homolog of NCBI NO: 15223724 NR Description: ER lumen protein-retaining receptor; protein id:
  misc_feature (20)..(292): Homolog of NCBI NO: 9369358 NR Description: F10A5.5 [Arabidopsis thaliana]
  misc_feature (20)..(292): Homolog of NCBI NO: 15222871 NR Description: ER lumen protein retaining receptor, putative
  misc_feature (25)..(292): Homolog of NCBI NO: 13430654 NR Description: putative ER lumen protein retaining receptor
  misc_feature (25)..(292): Homolog of NCBI NO: 21537286 NR Description: putative ER lumen protein retaining receptor
  misc_feature (25)..(292): Homolog of NCBI NO: 18399619 NR Description: putative ER lumen protein retaining receptor
  misc_feature (20)..(292): Homolog of NCBI NO: 18420309 NR Description: expressed protein
NFCRENQRQKKKKSEKKQNMKATTKTPIHVVWSWVRRQPPKVKAFLAVVTGMAALVLLRFIVHDHDNLFVAAEAVHSIGICVLIYKLMKEKTCAGLSLKSQELTAIFLAVRLYCSIVMEYDIHTILDLATLGTTLWVIFMIRFKLRASYMEDKDNFPLYYVLAPCVALAVFIHPSTSHNIINRISWALCVYLEAVSVLPQLRVMQNTKIVEPFTAHYVFALGVARFLSCAHWVLQVVDTRGRLLVALGYGLWPSMVLISEIVQTFILADFCYYYVKSVFGGQLVLRLPSGVV

SEQ ID NO: 24275 - protein, 273 aa, Arabidopsis thaliana
  peptide (1)..(273): Ceres Seq. ID no. 12335536
  misc_feature (48)..(259): Pfam Name: ER lumen protein retaining receptor Pfam Description: ER lumen protein retaining receptor
  misc_feature (9)..(269): Homolog of NCBI NO: 15230808 NR Description: ER lumen protein retaining receptor, putative
  misc_feature (1)..(260): Homolog of NCBI NO: 25518365 NR Description: hypothetical protein T20H2.24 - Arabidopsis
  misc_feature (6)..(260): Homolog of NCBI NO: 25412019 NR Description: probable ER lumen protein retaining receptor
  misc_feature (1)..(273): Homolog of NCBI NO: 15223724 NR Description: ER lumen protein-retaining receptor; protein id:
  misc_feature (1)..(273): Homolog of NCBI NO: 9369358 NR Description: F10A5.5 [Arabidopsis thaliana]
  misc_feature (1)..(273): Homolog of NCBI NO: 15222871 NR Description: ER lumen protein retaining receptor, putative
  misc_feature (6)..(273): Homolog of NCBI NO: 13430654 NR Description: putative ER lumen protein retaining receptor
  misc_feature (6)..(273): Homolog of NCBI NO: 21537286 NR Description: putative ER lumen protein retaining receptor
  misc_feature (6)..(273): Homolog of NCBI NO: 18399619 NR Description: putative ER lumen protein retaining receptor
  misc_feature (1)..(273): Homolog of NCBI NO: 18420309 NR Description: expressed protein
MKATTKTPIHVVWSWVRRQPPKVKAFLAVVTGMAALVLLRFIVHDHDNLFVAAEAVHSIGICVLIYKLMKEKTCAGLSLKSQELTAIFLAVRLYCSIVMEYDIHTILDLATLGTTLWVIFMIRFKLRASYMEDKDNFPLYYVLAPCVALAVFIHPSTSHNIINRISWALCVYLEAVSVLPQLRVMQNTKIVEPFTAHYVFALGVARFLSCAHWVLQVVDTRGRLLVALGYGLWPSMVLISEIVQTFILADFCYYYVKSVFGGQLVLRLPSGVV

SEQ ID NO: 24276 - protein, 241 aa, Arabidopsis thaliana
  peptide (1)..(241): Ceres Seq. ID no. 12335537
  misc_feature (16)..(227): Pfam Name: ER lumen protein retaining receptor Pfam Description: ER lumen protein retaining receptor
  misc_feature (1)..(237): Homolog of NCBI NO: 15230808 NR Description: ER lumen protein retaining receptor, putative
  misc_feature (1)..(228): Homolog of NCBI NO: 25518365 NR Description: hypothetical protein T20H2.24 - Arabidopsis
  misc_feature (1)..(228): Homolog of NCBI NO: 25412019 NR Description: probable ER lumen protein retaining receptor
  misc_feature (1)..(241): Homolog of NCBI NO: 15223724 NR Description: ER lumen protein-retaining receptor; protein id:
  misc_feature (1)..(241): Homolog of NCBI NO: 9369358 NR Description: F10A5.5 [Arabidopsis thaliana]
  misc_feature (1)..(241): Homolog of NCBI NO: 15222871 NR Description: ER lumen protein retaining receptor, putative
  misc_feature (1)..(241): Homolog of NCBI NO: 13430654 NR Description: putative ER lumen protein retaining receptor
  misc_feature (1)..(241): Homolog of NCBI NO: 21537286 NR Description: putative ER lumen protein retaining receptor
  misc_feature (1)..(241): Homolog of NCBI NO: 18399619 NR Description: putative ER lumen protein retaining receptor
  misc_feature (1)..(241): Homolog of NCBI NO: 18420309 NR Description: expressed protein
MAALVLLRFIVHDHDNLFVAAEAVHSIGICVLIYKLMKEKTCAGLSLKSQELTAIFLAVRLYCSIVMEYDIHTILDLATLGTTLWVIFMIRFKLRASYMEDKDNFPLYYVLAPCVALAVFIHPSTSHNIINRISWALCVYLEAVSVLPQLRVMQNTKIVEPFTAHYVFALGVARFLSCAHWVLQVVDTRGRLLVALGYGLWPSMVLISEIVQTFILADFCYYYVKSVFGGQLVLRLPSGVV

SEQ ID NO: 24277 - DNA, 994 bp, Arabidopsis thaliana
  misc_feature (1)..(994): Ceres Seq. ID no. 13486834
  misc_feature: MA Experiment ID: 108434 Result: Down-regulated in Transcription
  misc_feature: MA Experiment 108434 PARAMETER Experiment Name: At_Root_Tips_cDNA_P Parameter: Tissue Value: Root Tips
  misc_feature: MA Experiment ID: 108572 Result: Up-regulated in Transcription
  misc_feature: MA Experiment 108572 PARAMETER Experiment Name: At_Drought_cDNA_P Parameter: Timepoint (hr) Value: 1
  misc_feature: MA Experiment 108572 PARAMETER Experiment Name: At_Drought_cDNA_P Parameter: Tissue Value: Aerial
  misc_feature: MA Experiment 108572 PARAMETER Experiment Name: At_Drought_cDNA_P Parameter: Treatment Value: Drought vs. No Drought
  misc_feature: MA Experiment ID: 108574 Result: Up-regulated in Transcription
  misc_feature: MA Experiment 108574 PARAMETER Experiment Name: At_Wounding__cDNA_P Parameter: Timepoint (hr) Value: 1
  misc_feature: MA Experiment 108574 PARAMETER Experiment Name: At_Wounding__cDNA_P Parameter: Tissue Value: Aerial
  misc_feature: MA Experiment 108574 PARAMETER Experiment Name: At_Wounding__cDNA_P Parameter: Treatment Value: Wounding vs. No Wounding
  misc_feature: MA Experiment ID: 108577 Result: Down-regulated in Transcription
  misc_feature: MA Experiment 108577 PARAMETER Experiment Name: At_42deg_Heat_cDNA_P Parameter: Temperature (deg C) Value: 42 vs. 22
  misc_feature: MA Experiment 108577 PARAMETER Experiment Name: At_42deg_Heat_cDNA_P Parameter: Timepoint (hr) Value: 6
  misc_feature: MA Experiment 108577 PARAMETER Experiment Name: At_42deg_Heat_cDNA_P Parameter: Tissue Value: Aerial
  misc_feature: MA Experiment ID: 108579 Result: Up-regulated in Transcription
  misc_feature: MA Experiment 108579 PARAMETER Experiment Name: At_4deg_Cold_cDNA_P Parameter: Temperature (deg C) Value: 4 vs. 22
  misc_feature: MA Experiment 108579 PARAMETER Experiment Name: At_4deg_Cold_cDNA_P Parameter: Timepoint (hr) Value: 6
  misc_feature: MA Experiment 108579 PARAMETER Experiment Name: At_4deg_Cold_cDNA_P Parameter: Tissue Value: Aerial
  misc_feature: MA Experiment ID: 20000111 Result: Down-regulated in Transcription
  misc_feature: MA Experiment 20000111 PARAMETER Experiment Name: At_42deg_Heat_cDNA_P Parameter: Temperature (deg C) Value: 42 vs. 22
  misc_feature: MA Experiment 20000111 PARAMETER Experiment Name: At_42deg_Heat_cDNA_P Parameter: Timepoint (hr) Value: 6
  misc_feature: MA Experiment 20000111 PARAMETER Experiment Name: At_42deg_Heat_cDNA_P Parameter: Tissue Value: Aerial
  misc_feature: MA Experiment ID: 20000112 Result: Down-regulated in Transcription
  misc_feature: MA Experiment 20000112 PARAMETER Experiment Name: At_42deg_Heat_cDNA_P Parameter: Temperature (deg C) Value: 42 vs. 22
  misc_feature: MA Experiment 20000112 PARAMETER Experiment Name: At_42deg_Heat_cDNA_P Parameter: Timepoint (hr) Value: 2
  misc_feature: MA Experiment 20000112 PARAMETER Experiment Name: At_42deg_Heat_cDNA_P Parameter: Tissue Value: Aerial
  misc_feature: MA Experiment ID: 20000113 Result: Down-regulated in Transcription
  misc_feature: MA Experiment 20000113 PARAMETER Experiment Name: At_42deg_Heat_cDNA_P Parameter: Temperature (deg C) Value: 42 vs. 22
  misc_feature: MA Experiment 20000113 PARAMETER Experiment Name: At_42deg_Heat_cDNA_P Parameter: Timepoint (hr) Value: 8
  misc_feature: MA Experiment 20000113 PARAMETER Experiment Name: At_42deg_Heat_cDNA_P Parameter: Tissue Value: Aerial
  misc_feature: MA Experiment ID: 20000173 Result: Down-regulated in Transcription
  misc_feature: MA Experiment 20000173 PARAMETER Experiment Name: At_42deg_Heat_P Parameter: Age (day) Value: 14
  misc_feature: MA Experiment 20000173 PARAMETER Experiment Name: At_42deg_Heat_P Parameter: Organism Value: A. thaliana
  misc_feature: MA Experiment 20000173 PARAMETER Experiment Name: At_42deg_Heat_P Parameter: Plant Line Value: WS
  misc_feature: MA Experiment 20000173 PARAMETER Experiment Name: At_42deg_Heat_P Parameter: Temperature (deg C) Value: 42 vs. 22
  misc_feature: MA Experiment 20000173 PARAMETER Experiment Name: At_42deg_Heat_P Parameter: Timepoint (hr) Value: 6
  misc_feature: MA Experiment 20000173 PARAMETER Experiment Name: At_42deg_Heat_P Parameter: Tissue Value: Aerial
  misc_feature: MA Experiment ID: 20000184 Result: Down-regulated in Transcription
  misc_feature: MA Experiment 20000184 PARAMETER Experiment Name: At_Shoots__P Parameter: Age (day) Value: 7
  misc_feature: MA Experiment 20000184 PARAMETER Experiment Name: At_Shoots__P Parameter: Tissue Value: Shoots vs. Whole Plant
  misc_feature: MA Experiment ID: 20000211 Result: Up-regulated in Transcription
  misc_feature: MA Experiment 20000211 PARAMETER Experiment Name: At_0.001percent_MeJA__P Parameter: Age (day) Value: 14
  misc_feature: MA Experiment 20000211 PARAMETER Experiment Name: At_0.001percent_MeJA__P Parameter: Organism Value: A. thaliana
  misc_feature: MA Experiment 20000211 PARAMETER Experiment Name: At_0.001percent_MeJA__P Parameter: Plant Line Value: WS
  misc_feature: MA Experiment 20000211 PARAMETER Experiment Name: At_0.001percent_MeJA__P Parameter: Timepoint (hr) Value: 1
  misc_feature: MA Experiment 20000211 PARAMETER Experiment Name: At_0.001percent_MeJA__P Parameter: Tissue Value: Aerial
  misc_feature: MA Experiment 20000211 PARAMETER Experiment Name: At_0.001percent_MeJA__P Parameter: Treatment Value: 0.001percent MeJA vs. No Treatment
  misc_feature: MA Experiment ID: 20000224 Result: Up-regulated in Transcription
  misc_feature: MA Experiment ID: 20000234 Result: Down-regulated in Transcription
  misc_feature: MA Experiment 20000234 PARAMETER Experiment Name: At_Siliques_P Parameter: Age (day) Value: 21
  misc_feature: MA Experiment 20000234 PARAMETER Experiment Name: At_Siliques_P Parameter: Organism Value: A. thaliana
  misc_feature: MA Experiment 20000234 PARAMETER Experiment Name: At_Siliques_P Parameter: Plant Line Value: WS
  misc_feature: MA Experiment 20000234 PARAMETER Experiment Name: At_Siliques_P Parameter: Tissue Value: Less Than 5mm Siliques vs. Whole Plant
  misc_feature: MA Experiment ID: 20000235 Result: Down-regulated in Transcription
  misc_feature: MA Experiment 20000235 PARAMETER Experiment Name: At_Siliques_P Parameter: Age (day) Value: 21
  misc_feature: MA Experiment 20000235 PARAMETER Experiment Name: At_Siliques_P Parameter: Organism Value: A. thaliana
  misc_feature: MA Experiment 20000235 PARAMETER Experiment Name: At_Siliques_P Parameter: Plant Line Value: WS
  misc_feature: MA Experiment 20000235 PARAMETER Experiment Name: At_Siliques_P Parameter: Tissue Value: 5-10mm Siliques vs. Whole Plant
  misc_feature: MA Experiment ID: 20000264 Result: Down-regulated in Transcription
  misc_feature: MA Experiment 20000264 PARAMETER Experiment Name: At_Open_Flower_P Parameter: Age (day) Value: 21
  misc_feature: MA Experiment 20000264 PARAMETER Experiment Name: At_Open_Flower_P Parameter: Plant Line Value: WS
  misc_feature: MA Experiment 20000264 PARAMETER Experiment Name: At_Open_Flower_P Parameter: Tissue Value: Open Flower vs. Whole Plant
  misc_feature: MA Experiment ID: 20000265 Result: Down-regulated in Transcription
  misc_feature: MA Experiment 20000265 PARAMETER Experiment Name: At_Open_Flower_P Parameter: Age (day) Value: 21
  misc_feature: MA Experiment 20000265 PARAMETER Experiment Name: At_Open_Flower_P Parameter: Plant Line Value: WS
  misc_feature: MA Experiment 20000265 PARAMETER Experiment Name: At_Open_Flower_P Parameter: Tissue Value: Closed Flower vs. Whole Plant
  misc_feature: MA Experiment ID: 20000286 Result: Down-regulated in Transcription
  misc_feature: MA Experiment 20000286 PARAMETER Experiment Name: At_Open_Flower_P Parameter: Age (day) Value: 21
  misc_feature: MA Experiment 20000286 PARAMETER Experiment Name: At_Open_Flower_P Parameter: Plant Line Value: WS
  misc_feature: MA Experiment 20000286 PARAMETER Experiment Name: At_Open_Flower_P Parameter: Tissue Value: Half Open vs. Whole Plant
  misc_feature: MA Experiment ID: 20000308 Result: Up-regulated in Transcription
  misc_feature: MA Experiment 20000308 PARAMETER Experiment Name: At_100mM_NaCl__P Parameter: Age (day) Value: 17
  misc_feature: MA Experiment 20000308 PARAMETER Experiment Name: At_100mM_NaCl__P Parameter: Organism Value: A. thaliana
  misc_feature: MA Experiment 20000308 PARAMETER Experiment Name: At_100mM_NaCl__P Parameter: Plant Line Value: WS
  misc_feature: MA Experiment 20000308 PARAMETER Experiment Name: At_100mM_NaCl__P Parameter: Timepoint (hr) Value: 72
  misc_feature: MA Experiment 20000308 PARAMETER Experiment Name: At_100mM_NaCl__P Parameter: Tissue Value: Whole Plant
  misc_feature: MA Experiment 20000308 PARAMETER Experiment Name: At_100mM_NaCl__P Parameter: Treatment Value: 100mM NaCl vs. No Treatment
  misc_feature: MA Experiment ID: 20000438 Result: Down-regulated in Transcription
  misc_feature: MA Experiment 20000438 PARAMETER Experiment Name: At_Shoots__P Parameter: Age (day) Value: 14
  misc_feature: MA Experiment 20000438 PARAMETER Experiment Name: At_Shoots__P Parameter: Tissue Value: Shoots vs. Whole Plant
  misc_feature: MA Experiment ID: 20000527 Result: Down-regulated in Transcription
  misc_feature: MA Experiment 20000527 PARAMETER Experiment Name: At_10percent_PEG_P Parameter: Age (day) Value: 20
  misc_feature: MA Experiment 20000527 PARAMETER Experiment Name: At_10percent_PEG_P Parameter: Organism Value: A. thaliana
  misc_feature: MA Experiment 20000527 PARAMETER Experiment Name: At_10percent_PEG_P Parameter: Plant Line Value: WS
  misc_feature: MA Experiment 20000527 PARAMETER Experiment Name: At_10percent_PEG_P Parameter: Timepoint (day) Value: 20
  misc_feature: MA Experiment 20000527 PARAMETER Experiment Name: At_10percent_PEG_P Parameter: Tissue Value: Whole Plant
  misc_feature: MA Experiment 20000527 PARAMETER Experiment Name: At_10percent_PEG_P Parameter: Treatment Value: 10percent PEG vs. No Treatment
  misc_feature: MA Experiment ID: 20000794 Result: Down-regulated in Transcription
  misc_feature: MA Experiment 20000794 PARAMETER Experiment Name: At_Petals_P Parameter: Age (day) Value: 23-25 days
  misc_feature: MA Experiment 20000794 PARAMETER Experiment Name: At_Petals_P Parameter: Plant Line Value: WS
  misc_feature: MA Experiment 20000794 PARAMETER Experiment Name: At_Petals_P Parameter: Tissue Value: Petals vs. Whole plant
  misc_feature: MA Experiment ID: 20001248 Result: Down-regulated in Transcription
  misc_feature: MA Experiment 20001248 PARAMETER Experiment Name: At_Far-red-induction_P Parameter: Age (day) Value: 7
  misc_feature: MA Experiment 20001248 PARAMETER Experiment Name: At_Far-red-induction_P Parameter: Light Value: Far-red vs. White
  misc_feature: MA Experiment 20001248 PARAMETER Experiment Name: At_Far-red-induction_P Parameter: Organism Value: A. thaliana
  misc_feature: MA Experiment 20001248 PARAMETER Experiment Name: At_Far-red-induction_P Parameter: Plant Line Value: Columbia
  misc_feature: MA Experiment 20001248 PARAMETER Experiment Name: At_Far-red-induction_P Parameter: Timepoint (hr) Value: 4
  misc_feature: MA Experiment 20001248 PARAMETER Experiment Name: At_Far-red-induction_P Parameter: Tissue Value: Whole Plant
  misc_feature: MA Experiment ID: 20001450 Result: Down-regulated in Transcription
  misc_feature: MA Experiment 20001450 PARAMETER Experiment Name: At_Far-red-induction_P Parameter: Age (day) Value: 7
  misc_feature: MA Experiment 20001450 PARAMETER Experiment Name: At_Far-red-induction_P Parameter: Light Value: Far-red vs. White
  misc_feature: MA Experiment 20001450 PARAMETER Experiment Name: At_Far-red-induction_P Parameter: Organism Value: A. thaliana
  misc_feature: MA Experiment 20001450 PARAMETER Experiment Name: At_Far-red-induction_P Parameter: Plant Line Value: Columbia
  misc_feature: MA Experiment 20001450 PARAMETER Experiment Name: At_Far-red-induction_P Parameter: Timepoint (hr) Value: 8
  misc_feature: MA Experiment 20001450 PARAMETER Experiment Name: At_Far-red-induction_P Parameter: Tissue Value: Whole Plant
  misc_feature: MA Experiment ID: 20001451 Result: Down-regulated in Transcription
  misc_feature: MA Experiment 20001451 PARAMETER Experiment Name: At_Far-red-induction_P Parameter: Age (day) Value: 7
  misc_feature: MA Experiment 20001451 PARAMETER Experiment Name: At_Far-red-induction_P Parameter: Light Value: Far-red vs. White
  misc_feature: MA Experiment 20001451 PARAMETER Experiment Name: At_Far-red-induction_P Parameter: Organism Value: A. thaliana
  misc_feature: MA Experiment 20001451 PARAMETER Experiment Name: At_Far-red-induction_P Parameter: Plant Line Value: Columbia
  misc_feature: MA Experiment 20001451 PARAMETER Experiment Name: At_Far-red-induction_P Parameter: Timepoint (hr) Value: 24
  misc_feature: MA Experiment 20001451 PARAMETER Experiment Name: At_Far-red-induction_P Parameter: Tissue Value: Whole Plant
tgactgctctatttctcaatctctctcctaaatcaatcaatctttgtattttcatttagccagaacaaaaaaaatggtggagcaaaagagatacgctctgtttctagcgactttggactcagagttcgtgaagaaaacttacggaggataccacaacgtgttcgtgacgacgttcggagacgaaggagagcattgggactcctttagagtcgtcagcggagagtttcctgacgagaaagatctggagaaatacgatggcttcgttatcagcggaagctctcacgatgcctttgagaatgatgattggatccttaagctctgtgatattgtcaagaaaattgatgagatgaagaagaaaattcttggcatctgctttggtcatcagatcatagccagggtaaggggaggaacagtcggaagagcaaagaagggaccagaacttaaacttggagacataaccatcgtcaaggatgcgattacgcctggaagttacttcggaaacgagattcctgatagcatagcgatcatcaaatgtcaccaggacgaagtgttggtgctgcccgaaactgctaaagtgcttgcgtattccaagaactacgaggtggagatgtattcgattgaggatcatttgttctgtatccaaggacatcctgagtataacaaagagattctcttcgagattgttgatcgtgttcttgctctaggctacgtcaagcaagaatttgctgatgcggctaaggcaacgatggagaataggggagcagacaggaagctttgggagacgatttgcaagaacttcctcaaaggcagagttccaactaactagtttcactcccaaattatctatttggctcttgtcatattgaaacaatttgtggatttatgatcttgctttatttttattcaatgtataacgacatattaatctcggcgtgacttatttgtgttataccagttgataaatgaataagaagaacctaagctatttaaagcc

SEQ ID NO: 24278 - protein, 250 aa, Arabidopsis thaliana
  peptide (1)..(250): Ceres Seq. ID no. 13486835
  misc_feature (1)..(245): Homolog of NCBI NO: 21555885 NR Description: unknown [Arabidopsis thaliana]
  misc_feature (1)..(217): Homolog of NCBI NO: 15224078 NR Description: defense-related protein, putative [Arabidopsis
  misc_feature (1)..(245): Homolog of NCBI NO: 17381294 NR Description: AT4g30550/F17I23_110 [Arabidopsis thaliana]
  misc_feature (1)..(245): Homolog of NCBI NO: 15234767 NR Description: glutamine amidotransferase class-I
  misc_feature (3)..(246): Homolog of NCBI NO: 15224079 NR Description: defense-related protein, putative [Arabidopsis
  misc_feature (1)..(250): Homolog of NCBI NO: 14009290 NR Description: defense-related protein [Brassica carinata]
  misc_feature (1)..(250): Homolog of NCBI NO: 21593315 NR Description: defense-related protein [Arabidopsis thaliana]
  misc_feature (1)..(250): Homolog of NCBI NO: 15234763 NR Description: glutamine amidotransferase class-I
  misc_feature (7)..(250): Homolog of NCBI NO: 13174241 NR Description: putative glutamine synthetase [Oryza sativa]
  misc_feature (1)..(246): Homolog of NCBI NO: 15234765 NR Description: glutamine amidotransferase class-I
MVEQKRYALFLATLDSEFVKKTYGGYHNVFVTTFGDEGEHWDSFRVVSGEFPDEKDLEKYDGFVISGSSHDAFENDDWILKLCDIVKKIDEMKKKILGICFGHQIIARVRGGTVGRAKKGPELKLGDITIVKDAITPGSYFGNEIPDSIAIIKCHQDEVLVLPETAKVLAYSKNYEVEMYSIEDHLFCIQGHPEYNKEILFEIVDRVLALGYVKQEFADAAKATMENRGADRKLWETICKNFLKGRVPTN

SEQ ID NO: 24279 - protein, 159 aa, Arabidopsis thaliana
  peptide (1)..(159): Ceres Seq. ID no. 13486836
  misc_feature (1)..(159): Homolog of NCBI NO: 13174241 NR Description: putative glutamine synthetase [Oryza sativa]
  misc_feature (1)..(155): Homolog of NCBI NO: 15234765 NR Description: glutamine amidotransferase class-I
  misc_feature (1)..(154): Homolog of NCBI NO: 21555885 NR Description: unknown [Arabidopsis thaliana]
  misc_feature (1)..(126): Homolog of NCBI NO: 15224078 NR Description: defense-related protein, putative [Arabidopsis
  misc_feature (1)..(154): Homolog of NCBI NO: 17381294 NR Description: AT4g30550/F17I23_110 [Arabidopsis thaliana]
  misc_feature (1)..(154): Homolog of NCBI NO: 15234767 NR Description: glutamine amidotransferase class-I
  misc_feature (1)..(155): Homolog of NCBI NO: 15224079 NR Description: defense-related protein, putative [Arabidopsis
  misc_feature (1)..(159): Homolog of NCBI NO: 14009290 NR Description: defense-related protein [Brassica carinata]
  misc_feature (1)..(159): Homolog of NCBI NO: 21593315 NR Description: defense-related protein [Arabidopsis thaliana]
  misc_feature (1)..(159): Homolog of NCBI NO: 15234763 NR Description: glutamine amidotransferase class-I
MKKKILGICFGHQIIARVRGGTVGRAKKGPELKLGDITIVKDAITPGSYFGNEIPDSIAIIKCHQDEVLVLPETAKVLAYSKNYEVEMYSIEDHLFCIQGHPEYNKEILFEIVDRVLALGYVKQEFADAAKATMENRGADRKLWETICKNFLKGRVPTN

SEQ ID NO: 24280 - DNA, 1345 bp, Arabidopsis thaliana
  misc_feature (1)..(1345): Ceres Seq. ID no. 12327396
  misc_feature: MA Experiment ID: 108433 Result: Up-regulated in Transcription
  misc_feature: MA Experiment 108433 PARAMETER Experiment Name: At_rhl_Mutant2_cDNA_P Parameter: Age (day) Value: 7
  misc_feature: MA Experiment 108433 PARAMETER Experiment Name: At_rhl_Mutant2_cDNA_P Parameter: Organism Value: A. thaliana
  misc_feature: MA Experiment 108433 PARAMETER Experiment Name: At_rhl_Mutant2_cDNA_P Parameter: Plant Line Value: rhl Mutant vs. wt landsburg
  misc_feature: MA Experiment 108433 PARAMETER Experiment Name: At_rhl_Mutant2_cDNA_P Parameter: Tissue Value: Roots
  misc_feature: MA Experiment ID: 108434 Result: Down-regulated in Transcription
  misc_feature: MA Experiment 108434 PARAMETER Experiment Name: At_Root_Tips_cDNA_P Parameter: Tissue Value: Root Tips
  misc_feature: MA Experiment ID: 108569 Result: Up-regulated in Transcription
  misc_feature: MA Experiment 108569 PARAMETER Experiment Name: At_0.001%_MeJA__cDNA_P Parameter: Timepoint (hr) Value: 6
  misc_feature: MA Experiment 108569 PARAMETER Experiment Name: At_0.001%_MeJA__cDNA_P Parameter: Tissue Value: Aerial
  misc_feature: MA Experiment 108569 PARAMETER Experiment Name: At_0.001%_MeJA__cDNA_P Parameter: Treatment Value: 0.001% MeJA vs. No Treatment
  misc_feature: MA Experiment ID: 108573 Result: Up-regulated in Transcription
  misc_feature: MA Experiment 108573 PARAMETER Experiment Name: At_Drought_cDNA_P Parameter: Timepoint (hr) Value: 6
  misc_feature: MA Experiment 108573 PARAMETER Experiment Name: At_Drought_cDNA_P Parameter: Tissue Value: Aerial
  misc_feature: MA Experiment 108573 PARAMETER Experiment Name: At_Drought_cDNA_P Parameter: Treatment Value: Drought vs. No Drought
  misc_feature: MA Experiment ID: 108585 Result: Up-regulated in Transcription
  misc_feature: MA Experiment 108585 PARAMETER Experiment Name: At_5mM_NaNP_cDNA_P Parameter: Timepoint (hr) Value: 6
  misc_feature: MA Experiment 108585 PARAMETER Experiment Name: At_5mM_NaNP_cDNA_P Parameter: Tissue Value: Aerial
  misc_feature: MA Experiment 108585 PARAMETER Experiment Name: At_5mM_NaNP_cDNA_P Parameter: Treatment Value: null
  misc_feature: MA Experiment ID: 108594 Result: Down-regulated in Transcription
  misc_feature: MA Experiment 108594 PARAMETER Experiment Name: At_Ler-rhl_Root_cDNA_P Parameter: Plant Line Value: null
  misc_feature: MA Experiment ID: 108595 Result: Down-regulated in Transcription
  misc_feature: MA Experiment 108595 PARAMETER Experiment Name: At_Ler-pi_Ovule_cDNA_P Parameter: Plant Line Value: null
  misc_feature: MA Experiment ID: 108668 Result: Up-regulated in Transcription
  misc_feature: MA Experiment 108668 PARAMETER Experiment Name: At_2mM_SA_cDNA_P Parameter: Plant Line Value: WS
  misc_feature: MA Experiment 108668 PARAMETER Experiment Name: At_2mM_SA_cDNA_P Parameter: Timepoint (hr) Value: 6
  misc_feature: MA Experiment 108668 PARAMETER Experiment Name: At_2mM_SA_cDNA_P Parameter: Treatment Value: 2mM SA vs. No Treatment
  misc_feature: MA Experiment ID: 20000070 Result: Up-regulated in Transcription
  misc_feature: MA Experiment 20000070 PARAMETER Experiment Name: At_100uM_ABA_Mutants_cDNA_P Parameter: Plant Line Value: CS24
  misc_feature: MA Experiment 20000070 PARAMETER Experiment Name: At_100uM_ABA_Mutants_cDNA_P Parameter: Timepoint (hr) Value: 6
  misc_feature: MA Experiment 20000070 PARAMETER Experiment Name: At_100uM_ABA_Mutants_cDNA_P Parameter: Tissue Value: Aerial
  misc_feature: MA Experiment 20000070 PARAMETER Experiment Name: At_100uM_ABA_Mutants_cDNA_P Parameter: Treatment Value: 100uM ABA vs. No Treatment
  misc_feature: MA Experiment ID: 20000086 Result: Up-regulated in Transcription
  misc_feature: MA Experiment 20000086 PARAMETER Experiment Name: At_100uM_ABA_Mutants_cDNA_P Parameter: Plant Line Value: CS22
  misc_feature: MA Experiment 20000086 PARAMETER Experiment Name: At_100uM_ABA_Mutants_cDNA_P Parameter: Timepoint (hr) Value: 6
  misc_feature: MA Experiment 20000086 PARAMETER Experiment Name: At_100uM_ABA_Mutants_cDNA_P Parameter: Tissue Value: Aerial
  misc_feature: MA Experiment 20000086 PARAMETER Experiment Name: At_100uM_ABA_Mutants_cDNA_P Parameter: Treatment Value: 100uM ABA vs. No Treatment
  misc_feature: MA Experiment ID: 20000088 Result: Up-regulated in Transcription
  misc_feature: MA Experiment 20000088 PARAMETER Experiment Name: At_100uM_ABA_Mutants_cDNA_P Parameter: Plant Line Value: Landsberg
  misc_feature: MA Experiment 20000088 PARAMETER Experiment Name: At_100uM_ABA_Mutants_cDNA_P Parameter: Timepoint (hr) Value: 6
  misc_feature: MA Experiment 20000088 PARAMETER Experiment Name: At_100uM_ABA_Mutants_cDNA_P Parameter: Tissue Value: Aerial
  misc_feature: MA Experiment 20000088 PARAMETER Experiment Name: At_100uM_ABA_Mutants_cDNA_P Parameter: Treatment Value: 100uM ABA vs. No Treatment
  misc_feature: MA Experiment ID: 20000089 Result: Up-regulated in Transcription
  misc_feature: MA Experiment ID: 20000090 Result: Up-regulated in Transcription
  misc_feature: MA Experiment ID: 20000117 Result: Up-regulated in Transcription
  misc_feature: MA Experiment 20000117 PARAMETER Experiment Name: At_100uM_ABA_Mutants_cDNA_P Parameter: Plant Line Value: Columbia
  misc_feature: MA Experiment 20000117 PARAMETER Experiment Name: At_100uM_ABA_Mutants_cDNA_P Parameter: Timepoint (hr) Value: 6
  misc_feature: MA Experiment 20000117 PARAMETER Experiment Name: At_100uM_ABA_Mutants_cDNA_P Parameter: Tissue Value: Aerial
  misc_feature: MA Experiment 20000117 PARAMETER Experiment Name: At_100uM_ABA_Mutants_cDNA_P Parameter: Treatment Value: 100uM ABA vs. No Treatment
  misc_feature: MA Experiment ID: 20000173 Result: Down-regulated in Transcription
  misc_feature: MA Experiment 20000173 PARAMETER Experiment Name: At_42deg_Heat_P Parameter: Age (day) Value: 14
  misc_feature: MA Experiment 20000173 PARAMETER Experiment Name: At_42deg_Heat_P Parameter: Organism Value: A. thaliana
  misc_feature: MA Experiment 20000173 PARAMETER Experiment Name: At_42deg_Heat_P Parameter: Plant Line Value: WS
  misc_feature: MA Experiment 20000173 PARAMETER Experiment Name: At_42deg_Heat_P Parameter: Temperature (deg C) Value: 42 vs. 22
  misc_feature: MA Experiment 20000173 PARAMETER Experiment Name: At_42deg_Heat_P Parameter: Timepoint (hr) Value: 6
  misc_feature: MA Experiment 20000173 PARAMETER Experiment Name: At_42deg_Heat_P Parameter: Tissue Value: Aerial
  misc_feature: MA Experiment ID: 20000182 Result: Up-regulated in Transcription
  misc_feature: MA Experiment 20000182 PARAMETER Experiment Name: At_2mM_SA_P Parameter: Age (day) Value: 14
  misc_feature: MA Experiment 20000182 PARAMETER Experiment Name: At_2mM_SA_P Parameter: Organism Value: A. thaliana
  misc_feature: MA Experiment 20000182 PARAMETER Experiment Name: At_2mM_SA_P Parameter: Plant Line Value: WS
  misc_feature: MA Experiment 20000182 PARAMETER Experiment Name: At_2mM_SA_P Parameter: Timepoint (hr) Value: 6
  misc_feature: MA Experiment 20000182 PARAMETER Experiment Name: At_2mM_SA_P Parameter: Tissue Value: Aerial
  misc_feature: MA Experiment 20000182 PARAMETER Experiment Name: At_2mM_SA_P Parameter: Treatment Value: 2mM SA vs. No Treatment
  misc_feature: MA Experiment ID: 20000184 Result: Down-regulated in Transcription
  misc_feature: MA Experiment 20000184 PARAMETER Experiment Name: At_Shoots__P Parameter: Age (day) Value: 7
  misc_feature: MA Experiment 20000184 PARAMETER Experiment Name: At_Shoots__P Parameter: Tissue Value: Shoots vs. Whole Plant
  misc_feature: MA Experiment ID: 20000185 Result: Down-regulated in Transcription
  misc_feature: MA Experiment 20000185 PARAMETER Experiment Name: At_Roots__P Parameter: Age (day) Value: 7 vs. 21
  misc_feature: MA Experiment 20000185 PARAMETER Experiment Name: At_Roots__P Parameter: Organism Value: A. thaliana
  misc_feature: MA Experiment 20000185 PARAMETER Experiment Name: At_Roots__P Parameter: Tissue Value: Roots vs. Whole Plant
  misc_feature: MA Experiment ID: 20000224 Result: Down-regulated in Transcription
  misc_feature: MA Experiment ID: 20000227 Result: Down-regulated in Transcription
  misc_feature: MA Experiment 20000227 PARAMETER Experiment Name: At_Root-Tips-vs-Tops_P Parameter: Tissue Value: Root Tips vs. Root Tops
  misc_feature: MA Experiment ID: 20000438 Result: Down-regulated in Transcription
  misc_feature: MA Experiment 20000438 PARAMETER Experiment Name: At_Shoots__P Parameter: Age (day) Value: 14
  misc_feature: MA Experiment 20000438 PARAMETER Experiment Name: At_Shoots__P Parameter: Tissue Value: Shoots vs. Whole Plant
  misc_feature: MA Experiment ID: 20001248 Result: Up-regulated in Transcription
  misc_feature: MA Experiment 20001248 PARAMETER Experiment Name: At_Far-red-induction_P Parameter: Age (day) Value: 7
  misc_feature: MA Experiment 20001248 PARAMETER Experiment Name: At_Far-red-induction_P Parameter: Light Value: Far-red vs. White
  misc_feature: MA Experiment 20001248 PARAMETER Experiment Name: At_Far-red-induction_P Parameter: Organism Value: A. thaliana
  misc_feature: MA Experiment 20001248 PARAMETER Experiment Name: At_Far-red-induction_P Parameter: Plant Line Value: Columbia
  misc_feature: MA Experiment 20001248 PARAMETER Experiment Name: At_Far-red-induction_P Parameter: Timepoint (hr) Value: 4
  misc_feature: MA Experiment 20001248 PARAMETER Experiment Name: At_Far-red-induction_P Parameter: Tissue Value: Whole Plant
  misc_feature: MA Experiment ID: 20001451 Result: Down-regulated in Transcription
  misc_feature: MA Experiment 20001451 PARAMETER Experiment Name: At_Far-red-induction_P Parameter: Age (day) Value: 7
  misc_feature: MA Experiment 20001451 PARAMETER Experiment Name: At_Far-red-induction_P Parameter: Light Value: Far-red vs. White
  misc_feature: MA Experiment 20001451 PARAMETER Experiment Name: At_Far-red-induction_P Parameter: Organism Value: A. thaliana
  misc_feature: MA Experiment 20001451 PARAMETER Experiment Name: At_Far-red-induction_P Parameter: Plant Line Value: Columbia
  misc_feature: MA Experiment 20001451 PARAMETER Experiment Name: At_Far-red-induction_P Parameter: Timepoint (hr) Value: 24
  misc_feature: MA Experiment 20001451 PARAMETER Experiment Name: At_Far-red-induction_P Parameter: Tissue Value: Whole Plant
attttggtttttactgataactactctgtgagaagtttagttagctcgtgtgagagaagggtgtaatgagctgttttggttggtgtgggagtgaggattttcgcaacgctactgacactggcccaaggccagcgcataacccagcaggttacaatggaggccactatcaaagagctgatccacccatgaaccagcctgttattcccatgcagcctatttctgtaccagccattccagtggatgaattgagagatataactgataactatggttcaaagaccttgatcggcgagggttcttatggaagagtgttttatggtgttcttaaaagcggtggtgcagctgccatcaagaaacttgactctagtaagcagccagatcaagaatttctttcccagatatcaatggtttcgagattgcgacacgacaatgttactgcacttatgggctattgtgttgatggccctctccgtgttcttgcttatgaatttgctcctaaaggatctcttcatgatactcttcatggcaaaaaaggtgccaaaggagcacttagaggtcctgttatgacgtggcaacaaagagtcaaaatcgctgttggtgcagccagaggacttgagtatttgcatgagaaggtgagccctcaggttatccaccgagacatcaaatccagcaacgtacttctgtttgatgatgatgttgccaaaattggtgattttgatctgtctgatcaagcccctgacatggctgctcgccttcactcaactcgtgtgctaggaacctttggctaccacgctccagaatatgcaatgacaggaacgttgagctcaaagagcgatgtgtacagttttggcgttgttctgctggagctcctaactggtcgtaaaccagtcgatcataccttaccgcgtggacaacaaagtctagtgacatgggcaactcctaaactaagtgaagacaaagtgaagcaatgcgttgatgcaagactactcggagagtaccctcccaaagctgttggcaagctagctgcagtggctgcactctgtgtgcaatatgaggcaaattttagaccaaacatgagcattgtggtgaaggcacttcaacctcttttaaaccctcctcgttctgctcctcagactccacataggaacccctactgatcaaatattcaatcccctatatctcatcttctgatcatgatgattcatcaaatgtgtattattcattttggttgtgtattgtgtaaatttatgggaccttatctcattaactcttcattctcaagtcccacttttcaagacatgtgtatgtctctcctctatatcaatatattttatgtttccctgtg

SEQ ID NO: 24281 - protein, 363 aa, Arabidopsis thaliana
  peptide (1)..(363): Ceres Seq. ID no. 12327397
  misc_feature (1)..(355): Homolog of NCBI NO: 15226492 NR Description: putative protein kinase
  misc_feature (1)..(355): Homolog of NCBI NO: 3668069 NR Description: Pto kinase interactor 1 [Lycopersicon esculentum]
  misc_feature (1)..(28): Homolog of NCBI NO: 25405922 NR Description: protein F21D18.6 [imported] - Arabidopsis
  misc_feature (28)..(363): Homolog of NCBI NO: 25405922 NR Description: protein F21D18.6 [imported] - Arabidopsis
  misc_feature (1)..(363): Homolog of NCBI NO: 8778965 NR Description: Similar to Pto kinase interactor 1 from esculentum gb|U28007. It contains a Eukaryotic protein kinase
  misc_feature (1)..(349): Homolog of NCBI NO: 15221113 NR Description: Pto kinase interactor 1, putative; protein id:
  misc_feature (1)..(363): Homolog of NCBI NO: 22331138 NR Description: putative protein kinase
  misc_feature (1)..(341): Homolog of NCBI NO: 25405922 NR Description: protein F21D18.6 [imported] - Arabidopsis
  misc_feature (1)..(363): Homolog of NCBI NO: 15451196 NR Description: similar to Pto kinase interactor 1 gb|AAC61805.1
  misc_feature (1)..(363): Homolog of NCBI NO: 15221111 NR Description: Pto kinase interactor 1, putative
MSCFGWCGSEDFRNATDTGPRPAHNPAGYNGGHYQRADPPMNQPVIPMQPISVPAIPVDELRDITDNYGSKTLIGEGSYGRVFYGVLKSGGAAAIKKLDSSKQPDQEFLSQISMVSRLRHDNVTALMGYCVDGPLRVLAYEFAPKGSLHDTLHGKKGAKGALRGPVMTWQQRVKIAVGAARGLEYLHEKVSPQVIHRDIKSSNVLLFDDDVAKIGDFDLSDQAPDMAARLHSTRVLGTFGYHAPEYAMTGTLSSKSDVYSFGVVLLELLTGRKPVDHTLPRGQQSLVTWATPKLSEDKVKQCVDARLLGEYPPKAVGKLAAVAALCVQYEANFRPNMSIVVKALQPLLNPPRSAPQTPHRNPY

SEQ ID NO: 24282 - protein, 323 aa, Arabidopsis thaliana
  peptide (1)..(323): Ceres Seq. ID no. 12327398
  misc_feature (1)..(302): Homolog of NCBI NO: 1586940 NR Description: Ser/Thr kinase
  misc_feature (1)..(315): Homolog of NCBI NO: 15226492 NR Description: putative protein kinase
  misc_feature (1)..(315): Homolog of NCBI NO: 3668069 NR Description: Pto kinase interactor 1 [Lycopersicon esculentum]
  misc_feature (1)..(323): Homolog of NCBI NO: 25405922 NR Description: protein F21D18.6 [imported] - Arabidopsis
  misc_feature (1)..(323): Homolog of NCBI NO: 8778965 NR Description: Similar to Pto kinase interactor 1 from esculentum gb|U28007. It contains a Eukaryotic protein kinase
  misc_feature (1)..(309): Homolog of NCBI NO: 15221113 NR Description: Pto kinase interactor 1, putative; protein id:
  misc_feature (1)..(323): Homolog of NCBI NO: 22331138 NR Description: putative protein kinase
  misc_feature (1)..(301): Homolog of NCBI NO: 25405922 NR Description: protein F21D18.6 [imported] - Arabidopsis
  misc_feature (1)..(323): Homolog of NCBI NO: 15451196 NR Description: similar to Pto kinase interactor 1 gb|AAC61805.1
  misc_feature (1)..(323): Homolog of NCBI NO: 15221111 NR Description: Pto kinase interactor 1, putative
MNQPVIPMQPISVPAIPVDELRDITDNYGSKTLIGEGSYGRVFYGVLKSGGAAAIKKLDSSKQPDQEFLSQISMVSRLRHDNVTALMGYCVDGPLRVLAYEFAPKGSLHDTLHGKKGAKGALRGPVMTWQQRVKIAVGAARGLEYLHEKVSPQVIHRDIKSSNVLLFDDDVAKIGDFDLSDQAPDMAARLHSTRVLGTFGYHAPEYAMTGTLSSKSDVYSFGVVLLELLTGRKPVDHTLPRGQQSLVTWATPKLSEDKVKQCVDARLLGEYPPKAVGKLAAVAALCVQYEANFRPNMSIVVKALQPLLNPPRSAPQTPHRNPY

SEQ ID NO: 24283 - protein, 316 aa, Arabidopsis thaliana
  peptide (1)..(316): Ceres Seq. ID no. 12327399
  misc_feature (1)..(295): Homolog of NCBI NO: 1586940 NR Description: Ser/Thr kinase
  misc_feature (1)..(308): Homolog of NCBI NO: 15226492 NR Description: putative protein kinase
  misc_feature (1)..(308): Homolog of NCBI NO: 3668069 NR Description: Pto kinase interactor 1 [Lycopersicon esculentum]
  misc_feature (1)..(316): Homolog of NCBI NO: 25405922 NR Description: protein F21D18.6 [imported] - Arabidopsis
  misc_feature (1)..(316): Homolog of NCBI NO: 8778965 NR Description: Similar to Pto kinase interactor 1 from esculentum gb|U28007. It contains a Eukaryotic protein kinase
  misc_feature (1)..(302): Homolog of NCBI NO: 15221113 NR Description: Pto kinase interactor 1, putative; protein id:
  misc_feature (1)..(316): Homolog of NCBI NO: 22331138 NR Description: putative protein kinase
  misc_feature (1)..(294): Homolog of NCBI NO: 25405922 NR Description: protein F21D18.6 [imported] - Arabidopsis
  misc_feature (1)..(316): Homolog of NCBI NO: 15451196 NR Description: similar to Pto kinase interactor 1 gb|AAC61805.1
  misc_feature (1)..(316): Homolog of NCBI NO: 15221111 NR Description: Pto kinase interactor 1, putative
MQPISVPAIPVDELRDITDNYGSKTLIGEGSYGRVFYGVLKSGGAAAIKKLDSSKQPDQEFLSQISMVSRLRHDNVTALMGYCVDGPLRVLAYEFAPKGSLHDTLHGKKGAKGALRGPVMTWQQRVKIAVGAARGLEYLHEKVSPQVIHRDIKSSNVLLFDDDVAKIGDFDLSDQAPDMAARLHSTRVLGTFGYHAPEYAMTGTLSSKSDVYSFGVVLLELLTGRKPVDHTLPRGQQSLVTWATPKLSEDKVKQCVDARLLGEYPPKAVGKLAAVAALCVQYEANFRPNMSIVVKALQPLLNPPRSAPQTPHRNPY

SEQ ID NO: 24284 - DNA, 1303 bp, Arabidopsis thaliana
  misc_feature (1)..(1303): Ceres Seq. ID no. 12579851
  misc_feature: MA Experiment ID: 108434 Result: Down-regulated in Transcription
  misc_feature: MA Experiment 108434 PARAMETER Experiment Name: At_Root_Tips_cDNA_P Parameter: Tissue Value: Root Tips
  misc_feature: MA Experiment ID: 108435 Result: Up-regulated in Transcription
  misc_feature: MA Experiment 108435 PARAMETER Experiment Name: At_stm_Mutants_cDNA_P Parameter: Plant Line Value: wt Landsburg vs stm
  misc_feature: MA Experiment 108435 PARAMETER Experiment Name: At_stm_Mutants_cDNA_P Parameter: Tissue Value: Shoot Apical Meristem Region
  misc_feature: MA Experiment ID: 108464 Result: Up-regulated in Transcription
  misc_feature: MA Experiment 108464 PARAMETER Experiment Name: At_Germinating_Seeds_cDNA_P Parameter: Age (day) Value: 4 vs. 0
  misc_feature: MA Experiment 108464 PARAMETER Experiment Name: At_Germinating_Seeds_cDNA_P Parameter: Tissue Value: Germinating Seeds
  misc_feature: MA Experiment ID: 108469 Result: Down-regulated in Transcription
  misc_feature: MA Experiment ID: 108488 Result: Up-regulated in Transcription
  misc_feature: MA Experiment ID: 108569 Result: Up-regulated in Transcription
  misc_feature: MA Experiment 108569 PARAMETER Experiment Name: At_0.001%_MeJA__cDNA_P Parameter: Timepoint (hr) Value: 6
  misc_feature: MA Experiment 108569 PARAMETER Experiment Name: At_0.001%_MeJA__cDNA_P Parameter: Tissue Value: Aerial
  misc_feature: MA Experiment 108569 PARAMETER Experiment Name: At_0.001%_MeJA__cDNA_P Parameter: Treatment Value: 0.001% MeJA vs. No Treatment
  misc_feature: MA Experiment ID: 108572 Result: Up-regulated in Transcription
  misc_feature: MA Experiment 108572 PARAMETER Experiment Name: At_Drought_cDNA_P Parameter: Timepoint (hr) Value: 1
  misc_feature: MA Experiment 108572 PARAMETER Experiment Name: At_Drought_cDNA_P Parameter: Tissue Value: Aerial
  misc_feature: MA Experiment 108572 PARAMETER Experiment Name: At_Drought_cDNA_P Parameter: Treatment Value: Drought vs. No Drought
  misc_feature: MA Experiment ID: 108577 Result: Down-regulated in Transcription
  misc_feature: MA Experiment 108577 PARAMETER Experiment Name: At_42deg_Heat_cDNA_P Parameter: Temperature (deg C) Value: 42 vs. 22
  misc_feature: MA Experiment 108577 PARAMETER Experiment Name: At_42deg_Heat_cDNA_P Parameter: Timepoint (hr) Value: 6
  misc_feature: MA Experiment 108577 PARAMETER Experiment Name: At_42deg_Heat_cDNA_P Parameter: Tissue Value: Aerial
  misc_feature: MA Experiment ID: 108579 Result: Up-regulated in Transcription
  misc_feature: MA Experiment 108579 PARAMETER Experiment Name: At_4deg_Cold_cDNA_P Parameter: Temperature (deg C) Value: 4 vs. 22
  misc_feature: MA Experiment 108579 PARAMETER Experiment Name: At_4deg_Cold_cDNA_P Parameter: Timepoint (hr) Value: 6
  misc_feature: MA Experiment 108579 PARAMETER Experiment Name: At_4deg_Cold_cDNA_P Parameter: Tissue Value: Aerial
  misc_feature: MA Experiment ID: 108595 Result: Down-regulated in Transcription
  misc_feature: MA Experiment 108595 PARAMETER Experiment Name: At_Ler-pi_Ovule_cDNA_P Parameter: Plant Line Value: null
  misc_feature: MA Experiment ID: 108668 Result: Down-regulated in Transcription
  misc_feature: MA Experiment 108668 PARAMETER Experiment Name: At_2mM_SA_cDNA_P Parameter: Plant Line Value: WS
  misc_feature: MA Experiment 108668 PARAMETER Experiment Name: At_2mM_SA_cDNA_P Parameter: Timepoint (hr) Value: 6
  misc_feature: MA Experiment 108668 PARAMETER Experiment Name: At_2mM_SA_cDNA_P Parameter: Treatment Value: 2mM SA vs. No Treatment
  misc_feature: MA Experiment ID: 20000090 Result: Down-regulated in Transcription
  misc_feature: MA Experiment ID: 20000113 Result: Down-regulated in Transcription
  misc_feature: MA Experiment 20000113 PARAMETER Experiment Name: At_42deg_Heat_cDNA_P Parameter: Temperature (deg C) Value: 42 vs. 22
  misc_feature: MA Experiment 20000113 PARAMETER Experiment Name: At_42deg_Heat_cDNA_P Parameter: Timepoint (hr) Value: 8
  misc_feature: MA Experiment 20000113 PARAMETER Experiment Name: At_42deg_Heat_cDNA_P Parameter: Tissue Value: Aerial
  misc_feature: MA Experiment ID: 20000182 Result: Down-regulated in Transcription
  misc_feature: MA Experiment 20000182 PARAMETER Experiment Name: At_2mM_SA_P Parameter: Age (day) Value: 14
  misc_feature: MA Experiment 20000182 PARAMETER Experiment Name: At_2mM_SA_P Parameter: Organism Value: A. thaliana
  misc_feature: MA Experiment 20000182 PARAMETER Experiment Name: At_2mM_SA_P Parameter: Plant Line Value: WS
  misc_feature: MA Experiment 20000182 PARAMETER Experiment Name: At_2mM_SA_P Parameter: Timepoint (hr) Value: 6
  misc_feature: MA Experiment 20000182 PARAMETER Experiment Name: At_2mM_SA_P Parameter: Tissue Value: Aerial
  misc_feature: MA Experiment 20000182 PARAMETER Experiment Name: At_2mM_SA_P Parameter: Treatment Value: 2mM SA vs. No Treatment
  misc_feature: MA Experiment ID: 20000234 Result: Down-regulated in Transcription
  misc_feature: MA Experiment 20000234 PARAMETER Experiment Name: At_Siliques_P Parameter: Age (day) Value: 21
  misc_feature: MA Experiment 20000234 PARAMETER Experiment Name: At_Siliques_P Parameter: Organism Value: A. thaliana
  misc_feature: MA Experiment 20000234 PARAMETER Experiment Name: At_Siliques_P Parameter: Plant Line Value: WS
  misc_feature: MA Experiment 20000234 PARAMETER Experiment Name: At_Siliques_P Parameter: Tissue Value: Less Than 5mm Siliques vs. Whole Plant
  misc_feature: MA Experiment ID: 20000264 Result: Down-regulated in Transcription
  misc_feature: MA Experiment 20000264 PARAMETER Experiment Name: At_Open_Flower_P Parameter: Age (day) Value: 21
  misc_feature: MA Experiment 20000264 PARAMETER Experiment Name: At_Open_Flower_P Parameter: Plant Line Value: WS
  misc_feature: MA Experiment 20000264 PARAMETER Experiment Name: At_Open_Flower_P Parameter: Tissue Value: Open Flower vs. Whole Plant
  misc_feature: MA Experiment ID: 20000265 Result: Down-regulated in Transcription
  misc_feature: MA Experiment 20000265 PARAMETER Experiment Name: At_Open_Flower_P Parameter: Age (day) Value: 21
  misc_feature: MA Experiment 20000265 PARAMETER Experiment Name: At_Open_Flower_P Parameter: Plant Line Value: WS
  misc_feature: MA Experiment 20000265 PARAMETER Experiment Name: At_Open_Flower_P Parameter: Tissue Value: Closed Flower vs. Whole Plant
  misc_feature: MA Experiment ID: 20000269 Result: Up-regulated in Transcription
  misc_feature: MA Experiment 20000269 PARAMETER Experiment Name: At_1mM_KNO3_L-vs-H_Roots_P Parameter: Age (day) Value: 7,10,12
  misc_feature: MA Experiment 20000269 PARAMETER Experiment Name: At_1mM_KNO3_L-vs-H_Roots_P Parameter: Organism Value: A. thaliana
  misc_feature: MA Experiment 20000269 PARAMETER Experiment Name: At_1mM_KNO3_L-vs-H_Roots_P Parameter: Plant Line Value: WS
  misc_feature: MA Experiment 20000269 PARAMETER Experiment Name: At_1mM_KNO3_L-vs-H_Roots_P Parameter: Timepoint (day) Value: 7,10,12
  misc_feature: MA Experiment 20000269 PARAMETER Experiment Name: At_1mM_KNO3_L-vs-H_Roots_P Parameter: Tissue Value: Roots
  misc_feature: MA Experiment 20000269 PARAMETER Experiment Name: At_1mM_KNO3_L-vs-H_Roots_P Parameter: Treatment Value: 1mM KNO3 vs. 50mM KNO3
  misc_feature: MA Experiment ID: 20000286 Result: Down-regulated in Transcription
  misc_feature: MA Experiment 20000286 PARAMETER Experiment Name: At_Open_Flower_P Parameter: Age (day) Value: 21
  misc_feature: MA Experiment 20000286 PARAMETER Experiment Name: At_Open_Flower_P Parameter: Plant Line Value: WS
  misc_feature: MA Experiment 20000286 PARAMETER Experiment Name: At_Open_Flower_P Parameter: Tissue Value: Half Open vs. Whole Plant
  misc_feature: MA Experiment ID: 20000436 Result: Down-regulated in Transcription
  misc_feature: MA Experiment 20000436 PARAMETER Experiment Name: At_Drought_P Parameter: Age (day) Value: 7
  misc_feature: MA Experiment 20000436 PARAMETER Experiment Name: At_Drought_P Parameter: Organism Value: A. thaliana
  misc_feature: MA Experiment 20000436 PARAMETER Experiment Name: At_Drought_P Parameter: Plant Line Value: WS
  misc_feature: MA Experiment 20000436 PARAMETER Experiment Name: At_Drought_P Parameter: Timepoint (hr) Value: 12
  misc_feature: MA Experiment 20000436 PARAMETER Experiment Name: At_Drought_P Parameter: Tissue Value: Whole Plant
  misc_feature: MA Experiment 20000436 PARAMETER Experiment Name: At_Drought_P Parameter: Treatment Value: Drought vs. No Drought
  misc_feature: MA Experiment ID: 20000437 Result: Down-regulated in Transcription
  misc_feature: MA Experiment 20000437 PARAMETER Experiment Name: At_Drought_P Parameter: Age (day) Value: 8
  misc_feature: MA Experiment 20000437 PARAMETER Experiment Name: At_Drought_P Parameter: Organism Value: A. thaliana
  misc_feature: MA Experiment 20000437 PARAMETER Experiment Name: At_Drought_P Parameter: Plant Line Value: WS
  misc_feature: MA Experiment 20000437 PARAMETER Experiment Name: At_Drought_P Parameter: Timepoint (hr) Value: 24
  misc_feature: MA Experiment 20000437 PARAMETER Experiment Name: At_Drought_P Parameter: Tissue Value: Whole Plant
  misc_feature: MA Experiment 20000437 PARAMETER Experiment Name: At_Drought_P Parameter: Treatment Value: Drought vs. No Drought
  misc_feature: MA Experiment ID: 20000439 Result: Down-regulated in Transcription
  misc_feature: MA Experiment 20000439 PARAMETER Experiment Name: At_Roots__P Parameter: Age (day) Value: 14 vs. 21
  misc_feature: MA Experiment 20000439 PARAMETER Experiment Name: At_Roots__P Parameter: Organism Value: A. thaliana
  misc_feature: MA Experiment 20000439 PARAMETER Experiment Name: At_Roots__P Parameter: Tissue Value: Roots vs. Whole Plant
  misc_feature: MA Experiment ID: 20000445 Result: Down-regulated in Transcription
  misc_feature: MA Experiment 20000445 PARAMETER Experiment Name: At_100uM_NAA__P Parameter: Age (day) Value: 14
  misc_feature: MA Experiment 20000445 PARAMETER Experiment Name: At_100uM_NAA__P Parameter: Organism Value: A. thaliana
  misc_feature: MA Experiment 20000445 PARAMETER Experiment Name: At_100uM_NAA__P Parameter: Plant Line Value: WS
  misc_feature: MA Experiment 20000445 PARAMETER Experiment Name: At_100uM_NAA__P Parameter: Timepoint (hr) Value: 6
  misc_feature: MA Experiment 20000445 PARAMETER Experiment Name: At_100uM_NAA__P Parameter: Tissue Value: Aerial
  misc_feature: MA Experiment 20000445 PARAMETER Experiment Name: At_100uM_NAA__P Parameter: Treatment Value: 100uM NAA vs. No Treatment
  misc_feature: MA Experiment ID: 20000451 Result: Up-regulated in Transcription
  misc_feature: MA Experiment 20000451 PARAMETER Experiment Name: At_CS6879_Shoots-Roots_P Parameter: Age (day) Value: 14
  misc_feature: MA Experiment 20000451 PARAMETER Experiment Name: At_CS6879_Shoots-Roots_P Parameter: Organism Value: A. thaliana
  misc_feature: MA Experiment 20000451 PARAMETER Experiment Name: At_CS6879_Shoots-Roots_P Parameter: Plant Line Value: CS6879 vs. WS
  misc_feature: MA Experiment 20000451 PARAMETER Experiment Name: At_CS6879_Shoots-Roots_P Parameter: Tissue Value: Roots
  misc_feature: MA Experiment ID: 20000527 Result: Up-regulated in Transcription
  misc_feature: MA Experiment 20000527 PARAMETER Experiment Name: At_10percent_PEG_P Parameter: Age (day) Value: 20
  misc_feature: MA Experiment 20000527 PARAMETER Experiment Name: At_10percent_PEG_P Parameter: Organism Value: A. thaliana
  misc_feature: MA Experiment 20000527 PARAMETER Experiment Name: At_10percent_PEG_P Parameter: Plant Line Value: WS
  misc_feature: MA Experiment 20000527 PARAMETER Experiment Name: At_10percent_PEG_P Parameter: Timepoint (day) Value: 20
  misc_feature: MA Experiment 20000527 PARAMETER Experiment Name: At_10percent_PEG_P Parameter: Tissue Value: Whole Plant
  misc_feature: MA Experiment 20000527 PARAMETER Experiment Name: At_10percent_PEG_P Parameter: Treatment Value: 10percent PEG vs. No Treatment
  misc_feature: MA Experiment ID: 20000794 Result: Down-regulated in Transcription
  misc_feature: MA Experiment 20000794 PARAMETER Experiment Name: At_Petals_P Parameter: Age (day) Value: 23-25 days
  misc_feature: MA Experiment 20000794 PARAMETER Experiment Name: At_Petals_P Parameter: Plant Line Value: WS
  misc_feature: MA Experiment 20000794 PARAMETER Experiment Name: At_Petals_P Parameter: Tissue Value: Petals vs. Whole plant
  misc_feature: MA Experiment ID: 20001248 Result: Down-regulated in Transcription
  misc_feature: MA Experiment 20001248 PARAMETER Experiment Name: At_Far-red-induction_P Parameter: Age (day) Value: 7
  misc_feature: MA Experiment 20001248 PARAMETER Experiment Name: At_Far-red-induction_P Parameter: Light Value: Far-red vs. White
  misc_feature: MA Experiment 20001248 PARAMETER Experiment Name: At_Far-red-induction_P Parameter: Organism Value: A. thaliana
  misc_feature: MA Experiment 20001248 PARAMETER Experiment Name: At_Far-red-induction_P Parameter: Plant Line Value: Columbia
  misc_feature: MA Experiment 20001248 PARAMETER Experiment Name: At_Far-red-induction_P Parameter: Timepoint (hr) Value: 4
  misc_feature: MA Experiment 20001248 PARAMETER Experiment Name: At_Far-red-induction_P Parameter: Tissue Value: Whole Plant
  misc_feature: MA Experiment ID: 20001450 Result: Down-regulated in Transcription
  misc_feature: MA Experiment 20001450 PARAMETER Experiment Name: At_Far-red-induction_P Parameter: Age (day) Value: 7
  misc_feature: MA Experiment 20001450 PARAMETER Experiment Name: At_Far-red-induction_P Parameter: Light Value: Far-red vs. White
  misc_feature: MA Experiment 20001450 PARAMETER Experiment Name: At_Far-red-induction_P Parameter: Organism Value: A. thaliana
  misc_feature: MA Experiment 20001450 PARAMETER Experiment Name: At_Far-red-induction_P Parameter: Plant Line Value: Columbia
  misc_feature: MA Experiment 20001450 PARAMETER Experiment Name: At_Far-red-induction_P Parameter: Timepoint (hr) Value: 8
  misc_feature: MA Experiment 20001450 PARAMETER Experiment Name: At_Far-red-induction_P Parameter: Tissue Value: Whole Plant
  misc_feature: MA Experiment ID: 20001451 Result: Down-regulated in Transcription
  misc_feature: MA Experiment 20001451 PARAMETER Experiment Name: At_Far-red-induction_P Parameter: Age (day) Value: 7
  misc_feature: MA Experiment 20001451 PARAMETER Experiment Name: At_Far-red-induction_P Parameter: Light Value: Far-red vs. White
  misc_feature: MA Experiment 20001451 PARAMETER Experiment Name: At_Far-red-induction_P Parameter: Organism Value: A. thaliana
  misc_feature: MA Experiment 20001451 PARAMETER Experiment Name: At_Far-red-induction_P Parameter: Plant Line Value: Columbia
  misc_feature: MA Experiment 20001451 PARAMETER Experiment Name: At_Far-red-induction_P Parameter: Timepoint (hr) Value: 24
  misc_feature: MA Experiment 20001451 PARAMETER Experiment Name: At_Far-red-induction_P Parameter: Tissue Value: Whole Plant
  misc_feature: MA Experiment ID: 20001555 Result: Up-regulated in Transcription
  misc_feature: MA Experiment 20001555 PARAMETER Experiment Name: At_Drought_Soil_Dry_P Parameter: Age (day) Value: 24
  misc_feature: MA Experiment 20001555 PARAMETER Experiment Name: At_Drought_Soil_Dry_P Parameter: Organism Value: A. thaliana
  misc_feature: MA Experiment 20001555 PARAMETER Experiment Name: At_Drought_Soil_Dry_P Parameter: Plant Line Value: WS
  misc_feature: MA Experiment 20001555 PARAMETER Experiment Name: At_Drought_Soil_Dry_P Parameter: Post Timepoint (hr) Value: None
  misc_feature: MA Experiment 20001555 PARAMETER Experiment Name: At_Drought_Soil_Dry_P Parameter: Post-Treatment Value: None
  misc_feature: MA Experiment 20001555 PARAMETER Experiment Name: At_Drought_Soil_Dry_P Parameter: Timepoint (day) Value: 10
  misc_feature: MA Experiment 20001555 PARAMETER Experiment Name: At_Drought_Soil_Dry_P Parameter: Treatment Value: Drought vs. No Drought
  misc_feature: MA Experiment ID: 20001558 Result: Down-regulated in Transcription
  misc_feature: MA Experiment 20001558 PARAMETER Experiment Name: At_Drought_Soil_Dry_P Parameter: Age (day) Value: 27
  misc_feature: MA Experiment 20001558 PARAMETER Experiment Name: At_Drought_Soil_Dry_P Parameter: Organism Value: A. thaliana
  misc_feature: MA Experiment 20001558 PARAMETER Experiment Name: At_Drought_Soil_Dry_P Parameter: Plant Line Value: WS
  misc_feature: MA Experiment 20001558 PARAMETER Experiment Name: At_Drought_Soil_Dry_P Parameter: Post Timepoint (hr) Value: 6
  misc_feature: MA Experiment 20001558 PARAMETER Experiment Name: At_Drought_Soil_Dry_P Parameter: Post-Treatment Value: Re-Water vs. No Drought
  misc_feature: MA Experiment 20001558 PARAMETER Experiment Name: At_Drought_Soil_Dry_P Parameter: Timepoint (day) Value: 13
  misc_feature: MA Experiment 20001558 PARAMETER Experiment Name: At_Drought_Soil_Dry_P Parameter: Treatment Value: Drought vs. No Drought
  misc_feature: MA Experiment ID: 20001756 Result: Up-regulated in Transcription
  misc_feature: MA Experiment 20001756 PARAMETER Experiment Name: At_50mM_NH4NO3_L-to-H_P Parameter: Timepoint (hr) Value: 4
  misc_feature: MA Experiment 20001756 PARAMETER Experiment Name: At_50mM_NH4NO3_L-to-H_P Parameter: Tissue Value: Leaf
  misc_feature: MA Experiment 20001756 PARAMETER Experiment Name: At_50mM_NH4NO3_L-to-H_P Parameter: Treatment Value: 50mM NH4NO3 vs 100mM Mannitol
  misc_feature: MA Experiment ID: 20001757 Result: Up-regulated in Transcription
  misc_feature: MA Experiment 20001757 PARAMETER Experiment Name: At_50mM_NH4NO3_L-to-H_P Parameter: Timepoint (hr) Value: 6
  misc_feature: MA Experiment 20001757 PARAMETER Experiment Name: At_50mM_NH4NO3_L-to-H_P Parameter: Tissue Value: Leaf
  misc_feature: MA Experiment 20001757 PARAMETER Experiment Name: At_50mM_NH4NO3_L-to-H_P Parameter: Treatment Value: 50mM NH4NO3 vs 100mM Mannitol
  misc_feature: MA Experiment ID: 20001905 Result: Down-regulated in Transcription
  misc_feature: MA Experiment 20001905 PARAMETER Experiment Name: At_Drought_Reproduction_P Parameter: Age (day) Value: 40
  misc_feature: MA Experiment 20001905 PARAMETER Experiment Name: At_Drought_Reproduction_P Parameter: Organism Value: A. thaliana
  misc_feature: MA Experiment 20001905 PARAMETER Experiment Name: At_Drought_Reproduction_P Parameter: Plant Line Value: WS
  misc_feature: MA Experiment 20001905 PARAMETER Experiment Name: At_Drought_Reproduction_P Parameter: Timepoint (day) Value: 10
  misc_feature: MA Experiment 20001905 PARAMETER Experiment Name: At_Drought_Reproduction_P Parameter: Tissue Value: Rosettes
  misc_feature: MA Experiment 20001905 PARAMETER Experiment Name: At_Drought_Reproduction_P Parameter: Treatment Value: Drought vs. No Drought
  misc_feature: MA Experiment ID: 20001910 Result: Down-regulated in Transcription
  misc_feature: MA Experiment 20001910 PARAMETER Experiment Name: At_Drought_Reproduction_P Parameter: Age (day) Value: 37
  misc_feature: MA Experiment 20001910 PARAMETER Experiment Name: At_Drought_Reproduction_P Parameter: Organism Value: A. thaliana
  misc_feature: MA Experiment 20001910 PARAMETER Experiment Name: At_Drought_Reproduction_P Parameter: Plant Line Value: WS
  misc_feature: MA Experiment 20001910 PARAMETER Experiment Name: At_Drought_Reproduction_P Parameter: Timepoint (day) Value: 7
  misc_feature: MA Experiment 20001910 PARAMETER Experiment Name: At_Drought_Reproduction_P Parameter: Tissue Value: Flowers
  misc_feature: MA Experiment 20001910 PARAMETER Experiment Name: At_Drought_Reproduction_P Parameter: Treatment Value: Drought vs. No Drought
  misc_feature: MA Experiment ID: 20001911 Result: Down-regulated in Transcription
  misc_feature: MA Experiment 20001911 PARAMETER Experiment Name: At_Drought_Reproduction_P Parameter: Age (day) Value: 40
  misc_feature: MA Experiment 20001911 PARAMETER Experiment Name: At_Drought_Reproduction_P Parameter: Organism Value: A. thaliana
  misc_feature: MA Experiment 20001911 PARAMETER Experiment Name: At_Drought_Reproduction_P Parameter: Plant Line Value: WS
  misc_feature: MA Experiment 20001911 PARAMETER Experiment Name: At_Drought_Reproduction_P Parameter: Timepoint (day) Value: 10
  misc_feature: MA Experiment 20001911 PARAMETER Experiment Name: At_Drought_Reproduction_P Parameter: Tissue Value: Flowers
  misc_feature: MA Experiment 20001911 PARAMETER Experiment Name: At_Drought_Reproduction_P Parameter: Treatment Value: Drought vs. No Drought
aaactcaagtttcttgcaattacctacttacaacaaagcaactcgactcgaacaaacacatccatggctccttctgcgcaacctcttcctgtgagtgtttcggatgaaaaatatgcgaatgtcaagtgggaagagttggcattcaagtttgttcgtacggattatatgtatgttgcgaagtgcaatcatggagagagttttcaagaggggaagattcttccttttgctgatttgcaacttaacccttgcgctgctgttcttcagtatggccagggtttatatgaaggactgaaagcttacaggacagaagatggtcggattctgctattccgaccagaccaaaacggtctccgccttcaagccggagctgacagactctatatgccttatccttcggtcgatcaattcgtctccgccatcaaacaagttgctcttgccaacaagaaatggattcctcctccggggaaaggaacattgtatattaggcctatcttgtttgggagtggtccgattcttggttcatttcccattcctgagaccaccttcacagcttttgcctgtcctgttggacgttatcataaggataactctggtttgaatctgaaaatcgaagatcagtttcgtcgagcttttcctagtggaactggtggtgtgaagagcatcacaaactattgtcctgtttggataccattggcagaggcgaaaaaacaaggtttctctgatattttgtttttggatgctgcaactggcaaaaacattgaagaacttttcgcagctaatgtttttatgctcaagggcaatgttgtatcgacaccaacaattgcaggaactattttgcccggagtcactcgaaactgcgtaatggaattgtgtcgtgatttcggctaccaggtcgaggaacgtacgattcctctagtggactttctcgatgcggacgaagctttctgtactggcactgcttccattgtgactagtattgcatccgtaacctttaaagacaaaaagaccggattcaaaacaggggaagaaacattggctgcgaagctatacgagacgttaagtgatatccagacgggtcgggtcgaggataccaagggatggacggtggagattgaccgccagggctgaaagttgaaactgtaacttgatgctaaatatgtgtgtgtgtgtatacaaaacttatgtaagaaacatctgaagatgtctctgatctttgtgattgtgatgatcatgcatgtcctatcgttgcgatgtattttataaatgttcgtctgtaagttatttaataactatggctttttgc

SEQ ID NO: 24285 - protein, 375 aa, Arabidopsis thaliana
  peptide (1)..(375): Ceres Seq. ID no. 12579852
  misc_feature (69)..(354): Pfam Name: Aminotransferase class IV Pfam Description: Aminotransferase class IV
  misc_feature (39)..(373): Homolog of NCBI NO: 34902362 NR Description: Putative aminotransferase
  misc_feature (34)..(372): Homolog of NCBI NO: 27311239 NR Description: Unknown protein [Oryza sativa (japonica
  misc_feature (35)..(371): Homolog of NCBI NO: 30681524 NR Description: branched-chain amino acid aminotransferase
  misc_feature (56)..(372): Homolog of NCBI NO: 7450517 NR Description: branched-chain amino acid aminotransferase
  misc_feature (3)..(372): Homolog of NCBI NO: 14280354 NR Description: branched-chain amino acid aminotransferase
  misc_feature (35)..(372): Homolog of NCBI NO: 15218409 NR Description: tat-binding protein, putative
  misc_feature (21)..(372): Homolog of NCBI NO: 15222881 NR Description: branched-chain amino acid aminotransferase,
  misc_feature (22)..(372): Homolog of NCBI NO: 21617893 NR Description: branched-chain amino acid aminotransferase,
  misc_feature (22)..(372): Homolog of NCBI NO: 15222882 NR Description: branched-chain amino acid aminotransferase,
  misc_feature (22)..(375): Homolog of NCBI NO: 15230923 NR Description: branched-chain amino acid aminotransferase,
KLKFLAITYLQQSNSTRTNTSMAPSAQPLPVSVSDEKYANVKWEELAFKFVRTDYMYVAKCNHGESFQEGKILPFADLQLNPCAAVLQYGQGLYEGLKAYRTEDGRILLFRPDQNGLRLQAGADRLYMPYPSVDQFVSAIKQVALANKKWIPPPGKGTLYIRPILFGSGPILGSFPIPETTFTAFACPVGRYHKDNSGLNLKIEDQFRRAFPSGTGGVKSITNYCPVWIPLAEAKKQGFSDILFLDAATGKNIEELFAANVFMLKGNVVSTPTIAGTILPGVTRNCVMELCRDFGYQVEERTIPLVDFLDADEAFCTGTASIVTSIASVTFKDKKTGFKTGEETLAAKLYETLSDIQTGRVEDTKGWTVEIDRQG

SEQ ID NO: 24286 - protein, 354 aa, Arabidopsis thaliana
  peptide (1)..(354): Ceres Seq. ID no. 12579853
  misc_feature (48)..(333): Pfam Name: Aminotransferase class IV Pfam Description: Aminotransferase class IV
  misc_feature (18)..(352): Homolog of NCBI NO: 34902362 NR Description: Putative aminotransferase
  misc_feature (13)..(351): Homolog of NCBI NO: 27311239 NR Description: Unknown protein [Oryza sativa (japonica
  misc_feature (14)..(350): Homolog of NCBI NO: 30681524 NR Description: branched-chain amino acid aminotransferase
  misc_feature (35)..(351): Homolog of NCBI NO: 7450517 NR Description: branched-chain amino acid aminotransferase
  misc_feature (1)..(351): Homolog of NCBI NO: 14280354 NR Description: branched-chain amino acid aminotransferase
  misc_feature (14)..(351): Homolog of NCBI NO: 15218409 NR Description: tat-binding protein, putative
  misc_feature (1)..(351): Homolog of NCBI NO: 15222881 NR Description: branched-chain amino acid aminotransferase,
  misc_feature (1)..(351): Homolog of NCBI NO: 21617893 NR Description: branched-chain amino acid aminotransferase,
  misc_feature (1)..(351): Homolog of NCBI NO: 15222882 NR Description: branched-chain amino acid aminotransferase,
  misc_feature (1)..(354): Homolog of NCBI NO: 15230923 NR Description: branched-chain amino acid aminotransferase,
MAPSAQPLPVSVSDEKYANVKWEELAFKFVRTDYMYVAKCNHGESFQEGKILPFADLQLNPCAAVLQYGQGLYEGLKAYRTEDGRILLFRPDQNGLRLQAGADRLYMPYPSVDQFVSAIKQVALANKKWIPPPGKGTLYIRPILFGSGPILGSFPIPETTFTAFACPVGRYHKDNSGLNLKIEDQFRRAFPSGTGGVKSITNYCPVWIPLAEAKKQGFSDILFLDAATGKNIEELFAANVFMLKGNVVSTPTIAGTILPGVTRNCVMELCRDFGYQVEERTIPLVDFLDADEAFCTGTASIVTSIASVTFKDKKTGFKTGEETLAAKLYETLSDIQTGRVEDTKGWTVEIDRQG

SEQ ID NO: 24287 - protein, 320 aa, Arabidopsis thaliana
  peptide (1)..(320): Ceres Seq. ID no. 12579854
  misc_feature (14)..(299): Pfam Name: Aminotransferase class IV Pfam Description: Aminotransferase class IV
  misc_feature (1)..(318): Homolog of NCBI NO: 34902362 NR Description: Putative aminotransferase
  misc_feature (1)..(317): Homolog of NCBI NO: 27311239 NR Description: Unknown protein [Oryza sativa (japonica
  misc_feature (1)..(316): Homolog of NCBI NO: 30681524 NR Description: branched-chain amino acid aminotransferase
  misc_feature (1)..(317): Homolog of NCBI NO: 7450517 NR Description: branched-chain amino acid aminotransferase
  misc_feature (1)..(317): Homolog of NCBI NO: 14280354 NR Description: branched-chain amino acid aminotransferase
  misc_feature (1)..(317): Homolog of NCBI NO: 15218409 NR Description: tat-binding protein, putative
  misc_feature (1)..(317): Homolog of NCBI NO: 15222881 NR Description: branched-chain amino acid aminotransferase,
  misc_feature (1)..(317): Homolog of NCBI NO: 21617893 NR Description: branched-chain amino acid aminotransferase,
  misc_feature (1)..(317): Homolog of NCBI NO: 15222882 NR Description: branched-chain amino acid aminotransferase,
  misc_feature (1)..(320): Homolog of NCBI NO: 15230923 NR Description: branched-chain amino acid aminotransferase,
MYVAKCNHGESFQEGKILPFADLQLNPCAAVLQYGQGLYEGLKAYRTEDGRILLFRPDQNGLRLQAGADRLYMPYPSVDQFVSAIKQVALANKKWIPPPGKGTLYIRPILFGSGPILGSFPIPETTFTAFACPVGRYHKDNSGLNLKIEDQFRRAFPSGTGGVKSITNYCPVWIPLAEAKKQGFSDILFLDAATGKNIEELFAANVFMLKGNVVSTPTIAGTILPGVTRNCVMELCRDFGYQVEERTIPLVDFLDADEAFCTGTASIVTSIASVTFKDKKTGFKTGEETLAAKLYETLSDIQTGRVEDTKGWTVEIDRQG

SEQ ID NO: 24288 - DNA, 1847 bp, Arabidopsis thaliana
  misc_feature (1)..(1847): Ceres Seq. ID no. 13497503
  misc_feature: MA Experiment ID: 108461 Result: Down-regulated in Transcription
  misc_feature: MA Experiment 108461 PARAMETER Experiment Name: At_Germinating_Seeds_cDNA_P Parameter: Age (day) Value: 1 vs. 0
  misc_feature: MA Experiment 108461 PARAMETER Experiment Name: At_Germinating_Seeds_cDNA_P Parameter: Tissue Value: Germinating Seeds
  misc_feature: MA Experiment ID: 108462 Result: Down-regulated in Transcription
  misc_feature: MA Experiment 108462 PARAMETER Experiment Name: At_Germinating_Seeds_cDNA_P Parameter: Age (day) Value: 2 vs. 0
  misc_feature: MA Experiment 108462 PARAMETER Experiment Name: At_Germinating_Seeds_cDNA_P Parameter: Tissue Value: Germinating Seeds
  misc_feature: MA Experiment ID: 108463 Result: Down-regulated in Transcription
  misc_feature: MA Experiment 108463 PARAMETER Experiment Name: At_Germinating_Seeds_cDNA_P Parameter: Age (day) Value: 3 vs. 0
  misc_feature: MA Experiment 108463 PARAMETER Experiment Name: At_Germinating_Seeds_cDNA_P Parameter: Tissue Value: Germinating Seeds
  misc_feature: MA Experiment ID: 108464 Result: Down-regulated in Transcription
  misc_feature: MA Experiment 108464 PARAMETER Experiment Name: At_Germinating_Seeds_cDNA_P Parameter: Age (day) Value: 4 vs. 0
  misc_feature: MA Experiment 108464 PARAMETER Experiment Name: At_Germinating_Seeds_cDNA_P Parameter: Tissue Value: Germinating Seeds
  misc_feature: MA Experiment ID: 108572 Result: Up-regulated in Transcription
  misc_feature: MA Experiment 108572 PARAMETER Experiment Name: At_Drought_cDNA_P Parameter: Timepoint (hr) Value: 1
  misc_feature: MA Experiment 108572 PARAMETER Experiment Name: At_Drought_cDNA_P Parameter: Tissue Value: Aerial
  misc_feature: MA Experiment 108572 PARAMETER Experiment Name: At_Drought_cDNA_P Parameter: Treatment Value: Drought vs. No Drought
  misc_feature: MA Experiment ID: 108573 Result: Up-regulated in Transcription
  misc_feature: MA Experiment 108573 PARAMETER Experiment Name: At_Drought_cDNA_P Parameter: Timepoint (hr) Value: 6
  misc_feature: MA Experiment 108573 PARAMETER Experiment Name: At_Drought_cDNA_P Parameter: Tissue Value: Aerial
  misc_feature: MA Experiment 108573 PARAMETER Experiment Name: At_Drought_cDNA_P Parameter: Treatment Value: Drought vs. No Drought
  misc_feature: MA Experiment ID: 108595 Result: Up-regulated in Transcription
  misc_feature: MA Experiment 108595 PARAMETER Experiment Name: At_Ler-pi_Ovule_cDNA_P Parameter: Plant Line Value: null
  misc_feature: MA Experiment ID: 108607 Result: Up-regulated in Transcription
  misc_feature: MA Experiment 108607 PARAMETER Experiment Name: At_100uM_ABA_cDNA_P Parameter: Timepoint (hr) Value: 4
  misc_feature: MA Experiment 108607 PARAMETER Experiment Name: At_100uM_ABA_cDNA_P Parameter: Tissue Value: Aerial
  misc_feature: MA Experiment 108607 PARAMETER Experiment Name: At_100uM_ABA_cDNA_P Parameter: Treatment Value: 100uM ABA vs. No Treatment
  misc_feature: MA Experiment ID: 108608 Result: Up-regulated in Transcription
  misc_feature: MA Experiment 108608 PARAMETER Experiment Name: At_100uM_ABA_cDNA_P Parameter: Timepoint (hr) Value: 1
  misc_feature: MA Experiment 108608 PARAMETER Experiment Name: At_100uM_ABA_cDNA_P Parameter: Tissue Value: Aerial
  misc_feature: MA Experiment 108608 PARAMETER Experiment Name: At_100uM_ABA_cDNA_P Parameter: Treatment Value: 100uM ABA vs. No Treatment
  misc_feature: MA Experiment ID: 20000070 Result: Up-regulated in Transcription
  misc_feature: MA Experiment 20000070 PARAMETER Experiment Name: At_100uM_ABA_Mutants_cDNA_P Parameter: Plant Line Value: CS24
  misc_feature: MA Experiment 20000070 PARAMETER Experiment Name: At_100uM_ABA_Mutants_cDNA_P Parameter: Timepoint (hr) Value: 6
  misc_feature: MA Experiment 20000070 PARAMETER Experiment Name: At_100uM_ABA_Mutants_cDNA_P Parameter: Tissue Value: Aerial
  misc_feature: MA Experiment 20000070 PARAMETER Experiment Name: At_100uM_ABA_Mutants_cDNA_P Parameter: Treatment Value: 100uM ABA vs. No Treatment
  misc_feature: MA Experiment ID: 20000224 Result: Up-regulated in Transcription
aaagaacaacaaaacagaggaagaagaagaagaagatgaagcttctggctctgtttccatttctagcgatcgtgatccaactcagctgttgggagctaggaacagatgcattaccgagcggtgggttcgtgaggacgaaaggtgttcagtttagtctcaatggctatccatattacgctaatggcttcaatgcctactggctcatgtacgtagcctccgatccatcccaacggtctaagatctccaccgctttccaagatgcttctcgccatggattgaccgttgctcgaacctgggctttcagcgatggcggttacagggctcttcagtattcccctggctcctacaacgaggatatgtttcagggtttggattttgcgttagctgaggcaagaaggcatggtataaagataatactcagctttgccaataactacgagagcttcggagggaggaagcaatatgtggattgggctcgaagcagaggccgtcccgtttcttctgaagacgacttcttcactgactctcttgttaaagatttctacaagaaccatatcaaggctgtgctgaacagattcaatacctttaccaaagttcattacaaagatgacccaaccattatggcttgggagctcatgaacgagccccgttgcccctctgatccttccggaagagccattcaggcttggattactgaaatggctgctcatgtgaaatcactagacagaaaccatctgcttgaagctggcctcgaaggtttctatggtcagtcttcacctcaaagcaagactcttaacccacctggccagtttggaaccgatttcatcgccaataaccgcattcccggcattgatttcgtcacggttcactcttaccctgatgaatggtttccagactcaagcgagcaatcccaaatggatttcttgaacaaatggctagacgcacacatccaagacgcacagaacgttcttcacaaaccaataatattagcagagtttggtaaatcaatgaagaaaccaggttataccccagcgcagagagacatcgtcttcaacaccgtgtacagcaagatttacgggtctgcaaaacgaggaggtgcagcagcaggaggattgttctggcaacttctggtaaacggaattgataattttcaagatgggtatgggatcatacttagccaaagctcgtcgaccgttaacgtcatttcacagcaatcgcggaagttgactttgattaggaaaatcttcgctaggatgatcaatgtggagaaatggaagagagcgagaggtcagggacaagttgggaaacgaggtcacaaaatcaataactgaaatgatactaattaaaccacttttttatagcgaatggaacgatctcagctcgtccacgaaagttatagtgatagatttcataatatatagttttttggccggaatgaatgaactttattagtgcgacgaaaattattagtaataacccgtcaaaactcaaaaggttggttatttagtaatgggctttacttattaggcccactatgaaatacaagggcctagaatttctccagccacatgtgagttataacatgggcaaaaccattcaacaatgtttgttttggattctgtgaaagagatgactatcgttgataatttgaaggatgaagaagattcagaacaataaaacgtcgtcggcgtttgatttcagacatcgccggagagaacaagactctccatttgttacttccatggcttatgtgggtaggtcttggcgtaaacttgtattttatattctcgatttgtacggtttaatgattaaagaagaaaatagacaaaaaaaaattatttagctcc

SEQ ID NO: 24289 - protein, 442 aa, Arabidopsis thaliana
  peptide (1)..(442): Ceres Seq. ID no. 13497504
  misc_feature (47)..(386): Pfam Name: Cellulase (glycosyl hydrolase family 5) Pfam Description: Cellulase (glycosyl hydrolase family 5)
  misc_feature (20)..(408): Homolog of NCBI NO: 22382040 NR Description: inactive endo-beta-mannanase [Lycopersicon
  misc_feature (20)..(408): Homolog of NCBI NO: 21307619 NR Description: mannan endo-1,4-beta-mannosidase [Lycopersicon
  misc_feature (20)..(409): Homolog of NCBI NO: 15529113 NR Description: endo-beta-mannanase [Lycopersicon esculentum]
  misc_feature (41)..(411): Homolog of NCBI NO: 37544517 NR Description: mannan endo-1,4-beta-mannosidase precursor
  misc_feature (20)..(432): Homolog of NCBI NO: 10129675 NR Description: (1-4)-beta-mannan endohydrolase [Coffea arabica]
  misc_feature (12)..(411): Homolog of NCBI NO: 15228394 NR Description: glycosyl hydrolase family 5/cellulase
  misc_feature (15)..(409): Homolog of NCBI NO: 10178872 NR Description: (1-4)-beta-mannan endohydrolase [Coffea arabica]
  misc_feature (12)..(412): Homolog of NCBI NO: 15228393 NR Description: glycosyl hydrolase family 5/cellulase
  misc_feature (21)..(432): Homolog of NCBI NO: 34912090 NR Description: putative mannan endo-1,4-beta-mannosidase
  misc_feature (12)..(442): Homolog of NCBI NO: 15239973 NR Description: glycosyl hydrolase family 5/cellulase
RTTKQRKKKKKMKLLALFPFLAIVIQLSCWELGTDALPSGGFVRTKGVQFSLNGYPYYANGFNAYWLMYVASDPSQRSKISTAFQDASRHGLTVARTWAFSDGGYRALQYSPGSYNEDMFQGLDFALAEARRHGIKIILSFANNYESFGGRKQYVDWARSRGRPVSSEDDFFTDSLVKDFYKNHIKAVLNRFNTFTKVHYKDDPTIMAWELMNEPRCPSDPSGRAIQAWITEMAAHVKSLDRNHLLEAGLEGFYGQSSPQSKTLNPPGQFGTDFIANNRIPGIDFVTVHSYPDEWFPDSSEQSQMDFLNKWLDAHIQDAQNVLHKPIILAEFGKSMKKPGYTPAQRDIVFNTVYSKIYGSAKRGGAAAGGLFWQLLVNGIDNFQDGYGIILSQSSSTVNVISQQSRKLTLIRKIFARMINVEKWKRARGQGQVGKRGHKINN

SEQ ID NO: 24290 - protein, 431 aa, Arabidopsis thaliana
  peptide (1)..(431): Ceres Seq. ID no. 13497505
  misc_feature (36)..(375): Pfam Name: Cellulase (glycosyl hydrolase family 5) Pfam Description: Cellulase (glycosyl hydrolase family 5)
  misc_feature (9)..(397): Homolog of NCBI NO: 22382040 NR Description: inactive endo-beta-mannanase [Lycopersicon
  misc_feature (9)..(397): Homolog of NCBI NO: 21307619 NR Description: mannan endo-1,4-beta-mannosidase [Lycopersicon
  misc_feature (9)..(398): Homolog of NCBI NO: 15529113 NR Description: endo-beta-mannanase [Lycopersicon esculentum]
  misc_feature (30)..(400): Homolog of NCBI NO: 37544517 NR Description: mannan endo-1,4-beta-mannosidase precursor
  misc_feature (9)..(421): Homolog of NCBI NO: 10129675 NR Description: (1-4)-beta-mannan endohydrolase [Coffea arabica]
  misc_feature (1)..(400): Homolog of NCBI NO: 15228394 NR Description: glycosyl hydrolase family 5/cellulase
  misc_feature (4)..(398): Homolog of NCBI NO: 10178872 NR Description: (1-4)-beta-mannan endohydrolase [Coffea arabica]
  misc_feature (1)..(401): Homolog of NCBI NO: 15228393 NR Description: glycosyl hydrolase family 5/cellulase
  misc_feature (10)..(421): Homolog of NCBI NO: 34912090 NR Description: putative mannan endo-1,4-beta-mannosidase
  misc_feature (1)..(431): Homolog of NCBI NO: 15239973 NR Description: glycosyl hydrolase family 5/cellulase
MKLLALFPFLAIVIQLSCWELGTDALPSGGFVRTKGVQFSLNGYPYYANGFNAYWLMYVASDPSQRSKISTAFQDASRHGLTVARTWAFSDGGYRALQYSPGSYNEDMFQGLDFALAEARRHGIKIILSFANNYESFGGRKQYVDWARSRGRPVSSEDDFFTDSLVKDFYKNHIKAVLNRFNTFTKVHYKDDPTIMAWELMNEPRCPSDPSGRAIQAWITEMAAHVKSLDRNHLLEAGLEGFYGQSSPQSKTLNPPGQFGTDFIANNRIPGIDFVTVHSYPDEWFPDSSEQSQMDFLNKWLDAHIQDAQNVLHKPIILAEFGKSMKKPGYTPAQRDIVFNTVYSKIYGSAKRGGAAAGGLFWQLLVNGIDNFQDGYGIILSQSSSTVNVISQQSRKLTLIRKIFARMINVEKWKRARGQGQVGKRGHKINN

SEQ ID NO: 24291 - protein, 375 aa, Arabidopsis thaliana
  peptide (1)..(375): Ceres Seq. ID no. 13497506
  misc_feature (1)..(319): Pfam Name: Cellulase (glycosyl hydrolase family 5) Pfam Description: Cellulase (glycosyl hydrolase family 5)
  misc_feature (1)..(341): Homolog of NCBI NO: 22382040 NR Description: inactive endo-beta-mannanase [Lycopersicon
  misc_feature (1)..(341): Homolog of NCBI NO: 21307619 NR Description: mannan endo-1,4-beta-mannosidase [Lycopersicon
  misc_feature (1)..(342): Homolog of NCBI NO: 15529113 NR Description: endo-beta-mannanase [Lycopersicon esculentum]
  misc_feature (1)..(344): Homolog of NCBI NO: 37544517 NR Description: mannan endo-1,4-beta-mannosidase precursor
  misc_feature (1)..(365): Homolog of NCBI NO: 10129675 NR Description: (1-4)-beta-mannan endohydrolase [Coffea arabica]
  misc_feature (1)..(344): Homolog of NCBI NO: 15228394 NR Description: glycosyl hydrolase family 5/cellulase
  misc_feature (1)..(342): Homolog of NCBI NO: 10178872 NR Description: (1-4)-beta-mannan endohydrolase [Coffea arabica]
  misc_feature (1)..(345): Homolog of NCBI NO: 15228393 NR Description: glycosyl hydrolase family 5/cellulase
  misc_feature (1)..(365): Homolog of NCBI NO: 34912090 NR Description: putative mannan endo-1,4-beta-mannosidase
  misc_feature (1)..(375): Homolog of NCBI NO: 15239973 NR Description: glycosyl hydrolase family 5/cellulase
MYVASDPSQRSKISTAFQDASRHGLTVARTWAFSDGGYRALQYSPGSYNEDMFQGLDFALAEARRHGIKIILSFANNYESFGGRKQYVDWARSRGRPVSSEDDFFTDSLVKDFYKNHIKAVLNRFNTFTKVHYKDDPTIMAWELMNEPRCPSDPSGRAIQAWITEMAAHVKSLDRNHLLEAGLEGFYGQSSPQSKTLNPPGQFGTDFIANNRIPGIDFVTVHSYPDEWFPDSSEQSQMDFLNKWLDAHIQDAQNVLHKPIILAEFGKSMKKPGYTPAQRDIVFNTVYSKIYGSAKRGGAAAGGLFWQLLVNGIDNFQDGYGIILSQSSSTVNVISQQSRKLTLIRKIFARMINVEKWKRARGQGQVGKRGHKINN

SEQ ID NO: 24292 - DNA, 1209 bp, Arabidopsis thaliana
  misc_feature (1)..(1209): Ceres Seq. ID no. 13490874
  misc_feature: MA Experiment ID: 108434 Result: Up-regulated in Transcription
  misc_feature: MA Experiment 108434 PARAMETER Experiment Name: At_Root_Tips_cDNA_P Parameter: Tissue Value: Root Tips
  misc_feature: MA Experiment ID: 108435 Result: Up-regulated in Transcription
  misc_feature: MA Experiment 108435 PARAMETER Experiment Name: At_stm_Mutants_cDNA_P Parameter: Plant Line Value: wt Landsburg vs stm
  misc_feature: MA Experiment 108435 PARAMETER Experiment Name: At_stm_Mutants_cDNA_P Parameter: Tissue Value: Shoot Apical Meristem Region
  misc_feature: MA Experiment ID: 108462 Result: Down-regulated in Transcription
  misc_feature: MA Experiment 108462 PARAMETER Experiment Name: At_Germinating_Seeds_cDNA_P Parameter: Age (day) Value: 2 vs. 0
  misc_feature: MA Experiment 108462 PARAMETER Experiment Name: At_Germinating_Seeds_cDNA_P Parameter: Tissue Value: Germinating Seeds
  misc_feature: MA Experiment ID: 108463 Result: Down-regulated in Transcription
  misc_feature: MA Experiment 108463 PARAMETER Experiment Name: At_Germinating_Seeds_cDNA_P Parameter: Age (day) Value: 3 vs. 0
  misc_feature: MA Experiment 108463 PARAMETER Experiment Name: At_Germinating_Seeds_cDNA_P Parameter: Tissue Value: Germinating Seeds
  misc_feature: MA Experiment ID: 108464 Result: Down-regulated in Transcription
  misc_feature: MA Experiment 108464 PARAMETER Experiment Name: At_Germinating_Seeds_cDNA_P Parameter: Age (day) Value: 4 vs. 0
  misc_feature: MA Experiment 108464 PARAMETER Experiment Name: At_Germinating_Seeds_cDNA_P Parameter: Tissue Value: Germinating Seeds
  misc_feature: MA Experiment ID: 108561 Result: Down-regulated in Transcription
  misc_feature: MA Experiment 108561 PARAMETER Experiment Name: At_100uM_ABA_cDNA_P Parameter: Timepoint (hr) Value: 6
  misc_feature: MA Experiment 108561 PARAMETER Experiment Name: At_100uM_ABA_cDNA_P Parameter: Tissue Value: Aerial
  misc_feature: MA Experiment 108561 PARAMETER Experiment Name: At_100uM_ABA_cDNA_P Parameter: Treatment Value: 100uM ABA vs. No Treatment
  misc_feature: MA Experiment ID: 20000087 Result: Down-regulated in Transcription
  misc_feature: MA Experiment 20000087 PARAMETER Experiment Name: At_100uM_ABA_Mutants_cDNA_P Parameter: Plant Line Value: WS
  misc_feature: MA Experiment 20000087 PARAMETER Experiment Name: At_100uM_ABA_Mutants_cDNA_P Parameter: Timepoint (hr) Value: 6
  misc_feature: MA Experiment 20000087 PARAMETER Experiment Name: At_100uM_ABA_Mutants_cDNA_P Parameter: Tissue Value: Aerial
  misc_feature: MA Experiment 20000087 PARAMETER Experiment Name: At_100uM_ABA_Mutants_cDNA_P Parameter: Treatment Value: 100uM ABA vs. No Treatment
  misc_feature: MA Experiment ID: 20000328 Result: Down-regulated in Transcription
  misc_feature: MA Experiment 20000328 PARAMETER Experiment Name: At_42deg_Heat_Sub_P Parameter: Age (day) Value: 14
  misc_feature: MA Experiment 20000328 PARAMETER Experiment Name: At_42deg_Heat_Sub_P Parameter: Organism Value: A. thaliana
  misc_feature: MA Experiment 20000328 PARAMETER Experiment Name: At_42deg_Heat_Sub_P Parameter: Plant Line Value: WS
  misc_feature: MA Experiment 20000328 PARAMETER Experiment Name: At_42deg_Heat_Sub_P Parameter: Temperature (deg C) Value: 42 vs. 22
  misc_feature: MA Experiment 20000328 PARAMETER Experiment Name: At_42deg_Heat_Sub_P Parameter: Timepoint (hr) Value: 6
  misc_feature: MA Experiment 20000328 PARAMETER Experiment Name: At_42deg_Heat_Sub_P Parameter: Tissue Value: Aerial
  misc_feature: MA Experiment ID: 20000355 Result: Up-regulated in Transcription
  misc_feature: MA Experiment 20000355 PARAMETER Experiment Name: At_Siliques_Sub_P Parameter: Age (day) Value: 21
  misc_feature: MA Experiment 20000355 PARAMETER Experiment Name: At_Siliques_Sub_P Parameter: Organism Value: A. thaliana
  misc_feature: MA Experiment 20000355 PARAMETER Experiment Name: At_Siliques_Sub_P Parameter: Plant Line Value: WS
  misc_feature: MA Experiment 20000355 PARAMETER Experiment Name: At_Siliques_Sub_P Parameter: Tissue Value: Less Than 5mm Siliques vs. Whole Plant
aaacactctccgaaacagagaacattttgagtttttatctaaagctaaatcctttgagcaacaatggtgaaggcaacaaaagcagagaagaagatagcgtatgacacaaaactatgtcagcttatcgacgaatacactcagatcttagtcgttgcggcggacaacgtcggatcgactcagcttcagaacatcaggaaaggtcttcgtggagactcagtggttctcatgggtaagaacactatgatgaaacgttccgttagaatccactccgagaactctggaaacactgcaattttgaatctgcttcccctccttcagggaaacgttggtttgatcttcactaaaggtgatctcaaggaagtgagcgaggaggttgccaaatacaaggttggtgctcctgctcgtgtgggtttagttgctcctattgatgtggttgttcaacctggcaacactggtcttgacccatctcaaacatcgttcttccaggtgcttaacattcccactaagattaacaagggtactgttgaaattatcacccctgtggagcttatcaagcaaggtgacaaggttgggtcttctgaggctgcccttctagctaagcttggcattaggcctttctcgtatggtctagttgttcagtcggtttatgataatggatcagtcttcagtccagaggttcttgatcttactgaagatcaacttgttgaaaagtttgcttctggtatctctatggtcacttccttggctctagctgtttcttaccctacccttgcggctgcaccgcatatgttcatcaatgcctacaagaatgctttagctattgctgttgctactgactacactttccctcaagcagagaaggtcaaggaattcttaaaggatcccagcaagtttgttgttgctgcagcggcagtgtctgcggatgcaggtggtggtagtgctcaagctggagctgcagctaaggtagaggagaagaaagaagaatcagacgaagaagactatgagggtggtttcggtttgtttgacgaagagtaggttttgtctataaggttttacctttttttgtggtggcttatagttataatctaagtgttgcttcgtttgtagtaaggctgatctcaaatgtttttggtttcaagacaattcagattttatgtttggaaagacttttatctaccaacttcaaaagaaatgttagtttttttcttt

SEQ ID NO: 24293 - protein, 323 aa, Arabidopsis thaliana
  peptide (1)..(323): Ceres Seq. ID no. 13490875
  misc_feature (5)..(109): Pfam Name: Ribosomal protein L10 Pfam Description: Ribosomal protein L10
  misc_feature (2)..(320): Homolog of NCBI NO: 15225613 NR Description: 60S acidic ribosomal protein P0 (RPP0A)
  misc_feature (5)..(321): Homolog of NCBI NO: 6984134 NR Description: 60S acidic ribosomal protein PO [Euphorbia esula]
  misc_feature (1)..(323): Homolog of NCBI NO: 21554645 NR Description: putative 60S acidic ribosomal protein P0
  misc_feature (1)..(323): Homolog of NCBI NO: 15232603 NR Description: 60S acidic ribosomal protein P0 (RPP0B)
  misc_feature (1)..(323): Homolog of NCBI NO: 21593316 NR Description: 60S acidic ribosomal protein P0-C [Arabidopsis
  misc_feature (1)..(323): Homolog of NCBI NO: 15229706 NR Description: 60S acidic ribosomal protein P0 (RPP0C)
MVKATKAEKKIAYDTKLCQLIDEYTQILVVAADNVGSTQLQNIRKGLRGDSVVLMGKNTMMKRSVRIHSENSGNTAILNLLPLLQGNVGLIFTKGDLKEVSEEVAKYKVGAPARVGLVAPIDVVVQPGNTGLDPSQTSFFQVLNIPTKINKGTVEIITPVELIKQGDKVGSSEAALLAKLGIRPFSYGLVVQSVYDNGSVFSPEVLDLTEDQLVEKFASGISMVTSLALAVSYPTLAAAPHMFINAYKNALAIAVATDYTFPQAEKVKEFLKDPSKFVVAAAAVSADAGGGSAQAGAAAKVEEKKEESDEEDYEGGFGLFDEE

SEQ ID NO: 24294 - protein, 269 aa, Arabidopsis thaliana
  peptide (1)..(269): Ceres Seq. ID no. 13490876
  misc_feature (1)..(55): Pfam Name: Ribosomal protein L10 Pfam Description: Ribosomal protein L10
  misc_feature (1)..(266): Homolog of NCBI NO: 15225613 NR Description: 60S acidic ribosomal protein P0 (RPP0A)
  misc_feature (1)..(267): Homolog of NCBI NO: 6984134 NR Description: 60S acidic ribosomal protein PO [Euphorbia esula]
  misc_feature (1)..(269): Homolog of NCBI NO: 21554645 NR Description: putative 60S acidic ribosomal protein P0
  misc_feature (1)..(269): Homolog of NCBI NO: 15232603 NR Description: 60S acidic ribosomal protein P0 (RPP0B)
  misc_feature (1)..(269): Homolog of NCBI NO: 21593316 NR Description: 60S acidic ribosomal protein P0-C [Arabidopsis
  misc_feature (1)..(269): Homolog of NCBI NO: 15229706 NR Description: 60S acidic ribosomal protein P0 (RPP0C)
MGKNTMMKRSVRIHSENSGNTAILNLLPLLQGNVGLIFTKGDLKEVSEEVAKYKVGAPARVGLVAPIDVVVQPGNTGLDPSQTSFFQVLNIPTKINKGTVEIITPVELIKQGDKVGSSEAALLAKLGIRPFSYGLVVQSVYDNGSVFSPEVLDLTEDQLVEKFASGISMVTSLALAVSYPTLAAAPHMFINAYKNALAIAVATDYTFPQAEKVKEFLKDPSKFVVAAAAVSADAGGGSAQAGAAAKVEEKKEESDEEDYEGGFGLFDEE

SEQ ID NO: 24295 - protein, 264 aa, Arabidopsis thaliana
  peptide (1)..(264): Ceres Seq. ID no. 13490877
  misc_feature (176)..(261): Pfam Name: 60s Acidic ribosomal protein Pfam Description: 60s Acidic ribosomal protein
  misc_feature (1)..(261): Homolog of NCBI NO: 15225613 NR Description: 60S acidic ribosomal protein P0 (RPP0A)
  misc_feature (1)..(262): Homolog of NCBI NO: 6984134 NR Description: 60S acidic ribosomal protein PO [Euphorbia esula]
  misc_feature (1)..(264): Homolog of NCBI NO: 21554645 NR Description: putative 60S acidic ribosomal protein P0
  misc_feature (1)..(264): Homolog of NCBI NO: 15232603 NR Description: 60S acidic ribosomal protein P0 (RPP0B)
  misc_feature (1)..(264): Homolog of NCBI NO: 21593316 NR Description: 60S acidic ribosomal protein P0-C [Arabidopsis
  misc_feature (1)..(264): Homolog of NCBI NO: 15229706 NR Description: 60S acidic ribosomal protein P0 (RPP0C)
MMKRSVRIHSENSGNTAILNLLPLLQGNVGLIFTKGDLKEVSEEVAKYKVGAPARVGLVAPIDVVVQPGNTGLDPSQTSFFQVLNIPTKINKGTVEIITPVELIKQGDKVGSSEAALLAKLGIRPFSYGLVVQSVYDNGSVFSPEVLDLTEDQLVEKFASGISMVTSLALAVSYPTLAAAPHMFINAYKNALAIAVATDYTFPQAEKVKEFLKDPSKFVVAAAAVSADAGGGSAQAGAAAKVEEKKEESDEEDYEGGFGLFDEE

SEQ ID NO: 24296 - DNA, 1290 bp, Arabidopsis thaliana
  misc_feature (1)..(1290): Ceres Seq. ID no. 12321823
  misc_feature: MA Experiment ID: 108434 Result: Up-regulated in Transcription
  misc_feature: MA Experiment 108434 PARAMETER Experiment Name: At_Root_Tips_cDNA_P Parameter: Tissue Value: Root Tips
  misc_feature: MA Experiment ID: 108461 Result: Up-regulated in Transcription
  misc_feature: MA Experiment 108461 PARAMETER Experiment Name: At_Germinating_Seeds_cDNA_P Parameter: Age (day) Value: 1 vs. 0
  misc_feature: MA Experiment 108461 PARAMETER Experiment Name: At_Germinating_Seeds_cDNA_P Parameter: Tissue Value: Germinating Seeds
  misc_feature: MA Experiment ID: 108462 Result: Up-regulated in Transcription
  misc_feature: MA Experiment 108462 PARAMETER Experiment Name: At_Germinating_Seeds_cDNA_P Parameter: Age (day) Value: 2 vs. 0
  misc_feature: MA Experiment 108462 PARAMETER Experiment Name: At_Germinating_Seeds_cDNA_P Parameter: Tissue Value: Germinating Seeds
  misc_feature: MA Experiment ID: 108463 Result: Up-regulated in Transcription
  misc_feature: MA Experiment 108463 PARAMETER Experiment Name: At_Germinating_Seeds_cDNA_P Parameter: Age (day) Value: 3 vs. 0
  misc_feature: MA Experiment 108463 PARAMETER Experiment Name: At_Germinating_Seeds_cDNA_P Parameter: Tissue Value: Germinating Seeds
  misc_feature: MA Experiment ID: 108464 Result: Up-regulated in Transcription
  misc_feature: MA Experiment 108464 PARAMETER Experiment Name: At_Germinating_Seeds_cDNA_P Parameter: Age (day) Value: 4 vs. 0
  misc_feature: MA Experiment 108464 PARAMETER Experiment Name: At_Germinating_Seeds_cDNA_P Parameter: Tissue Value: Germinating Seeds
  misc_feature: MA Experiment ID: 108561 Result: Up-regulated in Transcription
  misc_feature: MA Experiment 108561 PARAMETER Experiment Name: At_100uM_ABA_cDNA_P Parameter: Timepoint (hr) Value: 6
  misc_feature: MA Experiment 108561 PARAMETER Experiment Name: At_100uM_ABA_cDNA_P Parameter: Tissue Value: Aerial
  misc_feature: MA Experiment 108561 PARAMETER Experiment Name: At_100uM_ABA_cDNA_P Parameter: Treatment Value: 100uM ABA vs. No Treatment
  misc_feature: MA Experiment ID: 108572 Result: Up-regulated in Transcription
  misc_feature: MA Experiment 108572 PARAMETER Experiment Name: At_Drought_cDNA_P Parameter: Timepoint (hr) Value: 1
  misc_feature: MA Experiment 108572 PARAMETER Experiment Name: At_Drought_cDNA_P Parameter: Tissue Value: Aerial
  misc_feature: MA Experiment 108572 PARAMETER Experiment Name: At_Drought_cDNA_P Parameter: Treatment Value: Drought vs. No Drought
  misc_feature: MA Experiment ID: 108573 Result: Up-regulated in Transcription
  misc_feature: MA Experiment 108573 PARAMETER Experiment Name: At_Drought_cDNA_P Parameter: Timepoint (hr) Value: 6
  misc_feature: MA Experiment 108573 PARAMETER Experiment Name: At_Drought_cDNA_P Parameter: Tissue Value: Aerial
  misc_feature: MA Experiment 108573 PARAMETER Experiment Name: At_Drought_cDNA_P Parameter: Treatment Value: Drought vs. No Drought
  misc_feature: MA Experiment ID: 108595 Result: Up-regulated in Transcription
  misc_feature: MA Experiment 108595 PARAMETER Experiment Name: At_Ler-pi_Ovule_cDNA_P Parameter: Plant Line Value: null
  misc_feature: MA Experiment ID: 108607 Result: Up-regulated in Transcription
  misc_feature: MA Experiment 108607 PARAMETER Experiment Name: At_100uM_ABA_cDNA_P Parameter: Timepoint (hr) Value: 4
  misc_feature: MA Experiment 108607 PARAMETER Experiment Name: At_100uM_ABA_cDNA_P Parameter: Tissue Value: Aerial
  misc_feature: MA Experiment 108607 PARAMETER Experiment Name: At_100uM_ABA_cDNA_P Parameter: Treatment Value: 100uM ABA vs. No Treatment
  misc_feature: MA Experiment ID: 108609 Result: Up-regulated in Transcription
  misc_feature: MA Experiment 108609 PARAMETER Experiment Name: At_100uM_ABA_cDNA_P Parameter: Timepoint (hr) Value: 24
  misc_feature: MA Experiment 108609 PARAMETER Experiment Name: At_100uM_ABA_cDNA_P Parameter: Tissue Value: Aerial
  misc_feature: MA Experiment 108609 PARAMETER Experiment Name: At_100uM_ABA_cDNA_P Parameter: Treatment Value: 100uM ABA vs. No Treatment
  misc_feature: MA Experiment ID: 20000069 Result: Up-regulated in Transcription
  misc_feature: MA Experiment 20000069 PARAMETER Experiment Name: At_100uM_ABA_Mutants_cDNA_P Parameter: Plant Line Value: CS23
  misc_feature: MA Experiment 20000069 PARAMETER Experiment Name: At_100uM_ABA_Mutants_cDNA_P Parameter: Timepoint (hr) Value: 6
  misc_feature: MA Experiment 20000069 PARAMETER Experiment Name: At_100uM_ABA_Mutants_cDNA_P Parameter: Tissue Value: Aerial
  misc_feature: MA Experiment 20000069 PARAMETER Experiment Name: At_100uM_ABA_Mutants_cDNA_P Parameter: Treatment Value: 100uM ABA vs. No Treatment
  misc_feature: MA Experiment ID: 20000072 Result: Up-regulated in Transcription
  misc_feature: MA Experiment 20000072 PARAMETER Experiment Name: At_100uM_ABA_Mutants_cDNA_P Parameter: Plant Line Value: CS8105
  misc_feature: MA Experiment 20000072 PARAMETER Experiment Name: At_100uM_ABA_Mutants_cDNA_P Parameter: Timepoint (hr) Value: 6
  misc_feature: MA Experiment 20000072 PARAMETER Experiment Name: At_100uM_ABA_Mutants_cDNA_P Parameter: Tissue Value: Aerial
  misc_feature: MA Experiment 20000072 PARAMETER Experiment Name: At_100uM_ABA_Mutants_cDNA_P Parameter: Treatment Value: 100uM ABA vs. No Treatment
  misc_feature: MA Experiment ID: 20000179 Result: Up-regulated in Transcription
  misc_feature: MA Experiment 20000179 PARAMETER Experiment Name: At_Germinating_Seeds_P Parameter: Age (hr) Value: 6 vs. 0
  misc_feature: MA Experiment 20000179 PARAMETER Experiment Name: At_Germinating_Seeds_P Parameter: Tissue Value: Germinating Seeds
  misc_feature: MA Experiment ID: 20000180 Result: Up-regulated in Transcription
  misc_feature: MA Experiment 20000180 PARAMETER Experiment Name: At_Germinating_Seeds_P Parameter: Age (hr) Value: 24 vs. 0
  misc_feature: MA Experiment 20000180 PARAMETER Experiment Name: At_Germinating_Seeds_P Parameter: Tissue Value: Germinating Seeds
  misc_feature: MA Experiment ID: 20000185 Result: Down-regulated in Transcription
  misc_feature: MA Experiment 20000185 PARAMETER Experiment Name: At_Roots__P Parameter: Age (day) Value: 7 vs. 21
  misc_feature: MA Experiment 20000185 PARAMETER Experiment Name: At_Roots__P Parameter: Organism Value: A. thaliana
  misc_feature: MA Experiment 20000185 PARAMETER Experiment Name: At_Roots__P Parameter: Tissue Value: Roots vs. Whole Plant
  misc_feature: MA Experiment ID: 20000439 Result: Down-regulated in Transcription
  misc_feature: MA Experiment 20000439 PARAMETER Experiment Name: At_Roots__P Parameter: Age (day) Value: 14 vs. 21
  misc_feature: MA Experiment 20000439 PARAMETER Experiment Name: At_Roots__P Parameter: Organism Value: A. thaliana
  misc_feature: MA Experiment 20000439 PARAMETER Experiment Name: At_Roots__P Parameter: Tissue Value: Roots vs. Whole Plant
  misc_feature: MA Experiment ID: 20000453 Result: Up-regulated in Transcription
  misc_feature: MA Experiment 20000453 PARAMETER Experiment Name: At_100uM_ABA_P Parameter: Age (day) Value: 15
  misc_feature: MA Experiment 20000453 PARAMETER Experiment Name: At_100uM_ABA_P Parameter: Organism Value: A. thaliana
  misc_feature: MA Experiment 20000453 PARAMETER Experiment Name: At_100uM_ABA_P Parameter: Plant Line Value: WS
  misc_feature: MA Experiment 20000453 PARAMETER Experiment Name: At_100uM_ABA_P Parameter: Timepoint (hr) Value: 24
  misc_feature: MA Experiment 20000453 PARAMETER Experiment Name: At_100uM_ABA_P Parameter: Tissue Value: Aerial
  misc_feature: MA Experiment 20000453 PARAMETER Experiment Name: At_100uM_ABA_P Parameter: Treatment Value: 100uM ABA vs. No Treatment
  misc_feature: MA Experiment ID: 20001757 Result: Down-regulated in Transcription
  misc_feature: MA Experiment 20001757 PARAMETER Experiment Name: At_50mM_NH4NO3_L-to-H_P Parameter: Timepoint (hr) Value: 6
  misc_feature: MA Experiment 20001757 PARAMETER Experiment Name: At_50mM_NH4NO3_L-to-H_P Parameter: Tissue Value: Leaf
  misc_feature: MA Experiment 20001757 PARAMETER Experiment Name: At_50mM_NH4NO3_L-to-H_P Parameter: Treatment Value: 50mM NH4NO3 vs 100mM Mannitol
  misc_feature: MA Experiment ID: 20001904 Result: Up-regulated in Transcription
  misc_feature: MA Experiment 20001904 PARAMETER Experiment Name: At_Drought_Reproduction_P Parameter: Age (day) Value: 37
  misc_feature: MA Experiment 20001904 PARAMETER Experiment Name: At_Drought_Reproduction_P Parameter: Organism Value: A. thaliana
  misc_feature: MA Experiment 20001904 PARAMETER Experiment Name: At_Drought_Reproduction_P Parameter: Plant Line Value: WS
  misc_feature: MA Experiment 20001904 PARAMETER Experiment Name: At_Drought_Reproduction_P Parameter: Timepoint (day) Value: 7
  misc_feature: MA Experiment 20001904 PARAMETER Experiment Name: At_Drought_Reproduction_P Parameter: Tissue Value: Rosettes
  misc_feature: MA Experiment 20001904 PARAMETER Experiment Name: At_Drought_Reproduction_P Parameter: Treatment Value: Drought vs. No Drought
  misc_feature: MA Experiment ID: 20001906 Result: Up-regulated in Transcription
  misc_feature: MA Experiment 20001906 PARAMETER Experiment Name: At_Drought_Reproduction_P Parameter: Age (day) Value: 35
  misc_feature: MA Experiment 20001906 PARAMETER Experiment Name: At_Drought_Reproduction_P Parameter: Organism Value: A. thaliana
  misc_feature: MA Experiment 20001906 PARAMETER Experiment Name: At_Drought_Reproduction_P Parameter: Plant Line Value: WS
  misc_feature: MA Experiment 20001906 PARAMETER Experiment Name: At_Drought_Reproduction_P Parameter: Timepoint (day) Value: 5
  misc_feature: MA Experiment 20001906 PARAMETER Experiment Name: At_Drought_Reproduction_P Parameter: Tissue Value: Siliques
  misc_feature: MA Experiment 20001906 PARAMETER Experiment Name: At_Drought_Reproduction_P Parameter: Treatment Value: Drought vs. No Drought
  misc_feature: MA Experiment ID: 20001908 Result: Up-regulated in Transcription
  misc_feature: MA Experiment 20001908 PARAMETER Experiment Name: At_Drought_Reproduction_P Parameter: Age (day) Value: 40
  misc_feature: MA Experiment 20001908 PARAMETER Experiment Name: At_Drought_Reproduction_P Parameter: Organism Value: A. thaliana
  misc_feature: MA Experiment 20001908 PARAMETER Experiment Name: At_Drought_Reproduction_P Parameter: Plant Line Value: WS
  misc_feature: MA Experiment 20001908 PARAMETER Experiment Name: At_Drought_Reproduction_P Parameter: Timepoint (day) Value: 10
  misc_feature: MA Experiment 20001908 PARAMETER Experiment Name: At_Drought_Reproduction_P Parameter: Tissue Value: Siliques
  misc_feature: MA Experiment 20001908 PARAMETER Experiment Name: At_Drought_Reproduction_P Parameter: Treatment Value: Drought vs. No Drought
gattttttcaaatggtaagttcataacttcccaaattactataaataagtgttaaagttagtcattatcaaattaagccactccactaattacaagctccaaaagctttctccttctttttctctctaatctctatttcgtacggatttctctaaccggagcgatggagattgacggtggagatcgtatttccggtgaacgaccgatcattatggtcaccaacgacgacggaatagacgcgcctggccttcgttctcttgttcgtgtcctcgtctccactaacctctacgatgttcgcgtttgcgctcctgattcggagaaatctgctgttagtcacagtataatatggagtagaccactcactgcaaaacgagtagagatcgatggagctactgcttattctgttgatggaactcctgcggattgcactggtttgggcttatcggaagcactctttccttctcgtcctgacctggttctgagtggtataaacgtgggtagcaactgcggttataacatcgtctattctggaactgttgctggcgctcgtgaagccttcctttatgatgtgccttctgcctccatatcatatgattttgattggaaacgtggagagatgaatgctaatgattttgccctttctgcccaagcctgcttgcccattatcaacggcatactcggtgcaatcaagaacaaaactcaccctatgcaatgctttctgaatatcgatttgccgactgatattgctaaccacaagggatacaaactaactagacaaggtaaaagcatgggtaaaatgggatggagacaagtggaagaggaagcacaagggccgaagatgttatcaacaatgacaatggatacagagtcaggagtagtctcatcagagaacgacacatctgctcatgcgggaaaagatagccgtttattcaaaagagagttaagggcaagcatcagtgaagaagggagtgattctcattacctaaaagaaggatttattacggtgacgccgcttggagctctatctcagactgatgtggattgccaaaactactacaaagaatggcttcccaagattacaaaccagtcatgctcctcctcatccctttgatgctacaacatgagagaaaataaaaactctattaggaaattacccattgtggaccacaatttgtggtagacctattattatatcagtaccagttctttagttttcttaagtcttgacttactattgttgtgagcagcaaaatagttgttgttacaagtccattaattatcgtgagcagc

SEQ ID NO: 24297 - protein, 315 aa, Arabidopsis thaliana
  peptide (1)..(315): Ceres Seq. ID no. 12321824
  misc_feature (14)..(214): Pfam Name: Survival protein SurE Pfam Description: Survival protein SurE
  misc_feature (16)..(207): Homolog of NCBI NO: 15791661 NR Description: SurE protein homolog [Campylobacter jejuni]
  misc_feature (249)..(307): Homolog of NCBI NO: 25406225 NR Description: hypothetical protein F3N23.8 [imported] -
  misc_feature (7)..(119): Homolog of NCBI NO: 25406225 NR Description: hypothetical protein F3N23.8 [imported] -
  misc_feature (148)..(267): Homolog of NCBI NO: 25406225 NR Description: hypothetical protein F3N23.8 [imported] -
  misc_feature (249)..(307): Homolog of NCBI NO: 15218620 NR Description: unknown protein; protein id: At1g72880.1
  misc_feature (7)..(267): Homolog of NCBI NO: 15218620 NR Description: unknown protein; protein id: At1g72880.1
  misc_feature (14)..(305): Homolog of NCBI NO: 33146601 NR Description: putative stationary phase survival protein SurE
  misc_feature (120)..(198): Homolog of NCBI NO: 7485145 NR Description: hypothetical protein - Arabidopsis thaliana
  misc_feature (1)..(119): Homolog of NCBI NO: 7485145 NR Description: hypothetical protein - Arabidopsis thaliana
  misc_feature (1)..(315): Homolog of NCBI NO: 18414342 NR Description: expressed protein
MEIDGGDRISGERPIIMVTNDDGIDAPGLRSLVRVLVSTNLYDVRVCAPDSEKSAVSHSIIWSRPLTAKRVEIDGATAYSVDGTPADCTGLGLSEALFPSRPDLVLSGINVGSNCGYNIVYSGTVAGAREAFLYDVPSASISYDFDWKRGEMNANDFALSAQACLPIINGILGAIKNKTHPMQCFLNIDLPTDIANHKGYKLTRQGKSMGKMGWRQVEEEAQGPKMLSTMTMDTESGVVSSENDTSAHAGKDSRLFKRELRASISEEGSDSHYLKEGFITVTPLGALSQTDVDCQNYYKEWLPKITNQSCSSSSL

SEQ ID NO: 24298 - protein, 299 aa, Arabidopsis thaliana
  peptide (1)..(299): Ceres Seq. ID no. 12321825
  misc_feature (1)..(198): Pfam Name: Survival protein SurE Pfam Description: Survival protein SurE
  misc_feature (1)..(191): Homolog of NCBI NO: 15791661 NR Description: SurE protein homolog [Campylobacter jejuni]
  misc_feature (233)..(291): Homolog of NCBI NO: 25406225 NR Description: hypothetical protein F3N23.8 [imported] -
  misc_feature (1)..(103): Homolog of NCBI NO: 25406225 NR Description: hypothetical protein F3N23.8 [imported] -
  misc_feature (132)..(251): Homolog of NCBI NO: 25406225 NR Description: hypothetical protein F3N23.8 [imported] -
  misc_feature (233)..(291): Homolog of NCBI NO: 15218620 NR Description: unknown protein; protein id: At1g72880.1
  misc_feature (1)..(251): Homolog of NCBI NO: 15218620 NR Description: unknown protein; protein id: At1g72880.1
  misc_feature (1)..(289): Homolog of NCBI NO: 33146601 NR Description: putative stationary phase survival protein SurE
  misc_feature (104)..(182): Homolog of NCBI NO: 7485145 NR Description: hypothetical protein - Arabidopsis thaliana
  misc_feature (1)..(103): Homolog of NCBI NO: 7485145 NR Description: hypothetical protein - Arabidopsis thaliana
  misc_feature (1)..(299): Homolog of NCBI NO: 18414342 NR Description: expressed protein
MVTNDDGIDAPGLRSLVRVLVSTNLYDVRVCAPDSEKSAVSHSIIWSRPLTAKRVEIDGATAYSVDGTPADCTGLGLSEALFPSRPDLVLSGINVGSNCGYNIVYSGTVAGAREAFLYDVPSASISYDFDWKRGEMNANDFALSAQACLPIINGILGAIKNKTHPMQCFLNIDLPTDIANHKGYKLTRQGKSMGKMGWRQVEEEAQGPKMLSTMTMDTESGVVSSENDTSAHAGKDSRLFKRELRASISEEGSDSHYLKEGFITVTPLGALSQTDVDCQNYYKEWLPKITNQSCSSSSL

SEQ ID NO: 24299 - protein, 164 aa, Arabidopsis thaliana
  peptide (1)..(164): Ceres Seq. ID no. 12321826
  misc_feature (1)..(63): Pfam Name: Survival protein SurE Pfam Description: Survival protein SurE
  misc_feature (1)..(72): Homolog of NCBI NO: 23475842 NR Description: hypothetical protein [Desulfovibrio desulfuricans
  misc_feature (1)..(56): Homolog of NCBI NO: 15606188 NR Description: stationary phase survival protein SurE [Aquifex
  misc_feature (1)..(56): Homolog of NCBI NO: 15791661 NR Description: SurE protein homolog [Campylobacter jejuni]
  misc_feature (98)..(156): Homolog of NCBI NO: 25406225 NR Description: hypothetical protein F3N23.8 [imported] -
  misc_feature (1)..(116): Homolog of NCBI NO: 25406225 NR Description: hypothetical protein F3N23.8 [imported] -
  misc_feature (98)..(156): Homolog of NCBI NO: 15218620 NR Description: unknown protein; protein id: At1g72880.1
  misc_feature (1)..(116): Homolog of NCBI NO: 15218620 NR Description: unknown protein; protein id: At1g72880.1
  misc_feature (1)..(154): Homolog of NCBI NO: 33146601 NR Description: putative stationary phase survival protein SurE
  misc_feature (1)..(47): Homolog of NCBI NO: 7485145 NR Description: hypothetical protein - Arabidopsis thaliana
  misc_feature (1)..(164): Homolog of NCBI NO: 18414342 NR Description: expressed protein
MNANDFALSAQACLPIINGILGAIKNKTHPMQCFLNIDLPTDIANHKGYKLTRQGKSMGKMGWRQVEEEAQGPKMLSTMTMDTESGVVSSENDTSAHAGKDSRLFKRELRASISEEGSDSHYLKEGFITVTPLGALSQTDVDCQNYYKEWLPKITNQSCSSSSL

SEQ ID NO: 24300 - DNA, 1973 bp, Arabidopsis thaliana
  misc_feature (1)..(1973): Ceres Seq. ID no. 13580459
  misc_feature: MA Experiment ID: 108433 Result: Down-regulated in Transcription
  misc_feature: MA Experiment 108433 PARAMETER Experiment Name: At_rhl_Mutant2_cDNA_P Parameter: Age (day) Value: 7
  misc_feature: MA Experiment 108433 PARAMETER Experiment Name: At_rhl_Mutant2_cDNA_P Parameter: Organism Value: A. thaliana
  misc_feature: MA Experiment 108433 PARAMETER Experiment Name: At_rhl_Mutant2_cDNA_P Parameter: Plant Line Value: rhl Mutant vs. wt landsburg
  misc_feature: MA Experiment 108433 PARAMETER Experiment Name: At_rhl_Mutant2_cDNA_P Parameter: Tissue Value: Roots
  misc_feature: MA Experiment ID: 108434 Result: Up-regulated in Transcription
  misc_feature: MA Experiment 108434 PARAMETER Experiment Name: At_Root_Tips_cDNA_P Parameter: Tissue Value: Root Tips
  misc_feature: MA Experiment ID: 108435 Result: Up-regulated in Transcription
  misc_feature: MA Experiment 108435 PARAMETER Experiment Name: At_stm_Mutants_cDNA_P Parameter: Plant Line Value: wt Landsburg vs stm
  misc_feature: MA Experiment 108435 PARAMETER Experiment Name: At_stm_Mutants_cDNA_P Parameter: Tissue Value: Shoot Apical Meristem Region
  misc_feature: MA Experiment ID: 108461 Result: Down-regulated in Transcription
  misc_feature: MA Experiment 108461 PARAMETER Experiment Name: At_Germinating_Seeds_cDNA_P Parameter: Age (day) Value: 1 vs. 0
  misc_feature: MA Experiment 108461 PARAMETER Experiment Name: At_Germinating_Seeds_cDNA_P Parameter: Tissue Value: Germinating Seeds
  misc_feature: MA Experiment ID: 108462 Result: Down-regulated in Transcription
  misc_feature: MA Experiment 108462 PARAMETER Experiment Name: At_Germinating_Seeds_cDNA_P Parameter: Age (day) Value: 2 vs. 0
  misc_feature: MA Experiment 108462 PARAMETER Experiment Name: At_Germinating_Seeds_cDNA_P Parameter: Tissue Value: Germinating Seeds
  misc_feature: MA Experiment ID: 108463 Result: Down-regulated in Transcription
  misc_feature: MA Experiment 108463 PARAMETER Experiment Name: At_Germinating_Seeds_cDNA_P Parameter: Age (day) Value: 3 vs. 0
  misc_feature: MA Experiment 108463 PARAMETER Experiment Name: At_Germinating_Seeds_cDNA_P Parameter: Tissue Value: Germinating Seeds
  misc_feature: MA Experiment ID: 108576 Result: Up-regulated in Transcription
  misc_feature: MA Experiment 108576 PARAMETER Experiment Name: At_42deg_Heat_cDNA_P Parameter: Temperature (deg C) Value: 42 vs. 22
  misc_feature: MA Experiment 108576 PARAMETER Experiment Name: At_42deg_Heat_cDNA_P Parameter: Timepoint (hr) Value: 1
  misc_feature: MA Experiment 108576 PARAMETER Experiment Name: At_42deg_Heat_cDNA_P Parameter: Tissue Value: Aerial
  misc_feature: MA Experiment ID: 108577 Result: Up-regulated in Transcription
  misc_feature: MA Experiment 108577 PARAMETER Experiment Name: At_42deg_Heat_cDNA_P Parameter: Temperature (deg C) Value: 42 vs. 22
  misc_feature: MA Experiment 108577 PARAMETER Experiment Name: At_42deg_Heat_cDNA_P Parameter: Timepoint (hr) Value: 6
  misc_feature: MA Experiment 108577 PARAMETER Experiment Name: At_42deg_Heat_cDNA_P Parameter: Tissue Value: Aerial
  misc_feature: MA Experiment ID: 108595 Result: Down-regulated in Transcription
  misc_feature: MA Experiment 108595 PARAMETER Experiment Name: At_Ler-pi_Ovule_cDNA_P Parameter: Plant Line Value: null
  misc_feature: MA Experiment ID: 20000093 Result: Up-regulated in Transcription
  misc_feature: MA Experiment 20000093 PARAMETER Experiment Name: At_42deg_Heat_cDNA_P Parameter: Temperature (deg C) Value: 42 vs. 22
  misc_feature: MA Experiment 20000093 PARAMETER Experiment Name: At_42deg_Heat_cDNA_P Parameter: Timepoint (hr) Value: 0.5
  misc_feature: MA Experiment 20000093 PARAMETER Experiment Name: At_42deg_Heat_cDNA_P Parameter: Tissue Value: Aerial
  misc_feature: MA Experiment ID: 20000111 Result: Up-regulated in Transcription
  misc_feature: MA Experiment 20000111 PARAMETER Experiment Name: At_42deg_Heat_cDNA_P Parameter: Temperature (deg C) Value: 42 vs. 22
  misc_feature: MA Experiment 20000111 PARAMETER Experiment Name: At_42deg_Heat_cDNA_P Parameter: Timepoint (hr) Value: 6
  misc_feature: MA Experiment 20000111 PARAMETER Experiment Name: At_42deg_Heat_cDNA_P Parameter: Tissue Value: Aerial
  misc_feature: MA Experiment ID: 20000112 Result: Up-regulated in Transcription
  misc_feature: MA Experiment 20000112 PARAMETER Experiment Name: At_42deg_Heat_cDNA_P Parameter: Temperature (deg C) Value: 42 vs. 22
  misc_feature: MA Experiment 20000112 PARAMETER Experiment Name: At_42deg_Heat_cDNA_P Parameter: Timepoint (hr) Value: 2
  misc_feature: MA Experiment 20000112 PARAMETER Experiment Name: At_42deg_Heat_cDNA_P Parameter: Tissue Value: Aerial
  misc_feature: MA Experiment ID: 20000144 Result: Up-regulated in Transcription
  misc_feature: MA Experiment 20000144 PARAMETER Experiment Name: At_42deg_Heat_cDNA_P Parameter: Temperature (deg C) Value: 42 vs. 22
  misc_feature: MA Experiment 20000144 PARAMETER Experiment Name: At_42deg_Heat_cDNA_P Parameter: Timepoint (hr) Value: 1
  misc_feature: MA Experiment 20000144 PARAMETER Experiment Name: At_42deg_Heat_cDNA_P Parameter: Tissue Value: Aerial
  misc_feature: MA Experiment ID: 20000224 Result: Up-regulated in Transcription
  misc_feature: MA Experiment ID: 20000307 Result: Down-regulated in Transcription
  misc_feature: MA Experiment 20000307 PARAMETER Experiment Name: At_Germinating_Seeds_Sub_P Parameter: Age (hr) Value: 24 vs. 0
  misc_feature: MA Experiment 20000307 PARAMETER Experiment Name: At_Germinating_Seeds_Sub_P Parameter: Organism Value: A. thaliana
  misc_feature: MA Experiment 20000307 PARAMETER Experiment Name: At_Germinating_Seeds_Sub_P Parameter: Plant Line Value: WS
  misc_feature: MA Experiment 20000307 PARAMETER Experiment Name: At_Germinating_Seeds_Sub_P Parameter: Tissue Value: Germinating Seeds
  misc_feature: MA Experiment ID: 20000327 Result: Up-regulated in Transcription
  misc_feature: MA Experiment 20000327 PARAMETER Experiment Name: At_42deg_Heat_Sub_P Parameter: Age (day) Value: 14
  misc_feature: MA Experiment 20000327 PARAMETER Experiment Name: At_42deg_Heat_Sub_P Parameter: Organism Value: A. thaliana
  misc_feature: MA Experiment 20000327 PARAMETER Experiment Name: At_42deg_Heat_Sub_P Parameter: Plant Line Value: WS
  misc_feature: MA Experiment 20000327 PARAMETER Experiment Name: At_42deg_Heat_Sub_P Parameter: Temperature (deg C) Value: 42 vs. 22
  misc_feature: MA Experiment 20000327 PARAMETER Experiment Name: At_42deg_Heat_Sub_P Parameter: Timepoint (hr) Value: 1
  misc_feature: MA Experiment 20000327 PARAMETER Experiment Name: At_42deg_Heat_Sub_P Parameter: Tissue Value: Aerial
  misc_feature: MA Experiment ID: 20000328 Result: Up-regulated in Transcription
  misc_feature: MA Experiment 20000328 PARAMETER Experiment Name: At_42deg_Heat_Sub_P Parameter: Age (day) Value: 14
  misc_feature: MA Experiment 20000328 PARAMETER Experiment Name: At_42deg_Heat_Sub_P Parameter: Organism Value: A. thaliana
  misc_feature: MA Experiment 20000328 PARAMETER Experiment Name: At_42deg_Heat_Sub_P Parameter: Plant Line Value: WS
  misc_feature: MA Experiment 20000328 PARAMETER Experiment Name: At_42deg_Heat_Sub_P Parameter: Temperature (deg C) Value: 42 vs. 22
  misc_feature: MA Experiment 20000328 PARAMETER Experiment Name: At_42deg_Heat_Sub_P Parameter: Timepoint (hr) Value: 6
  misc_feature: MA Experiment 20000328 PARAMETER Experiment Name: At_42deg_Heat_Sub_P Parameter: Tissue Value: Aerial
aaaaaaagaaaaaagtttcactctttggaggttggaacttaattccttgattaagaaaccccagaaaaaccctaaacccttgaagcgtctccttctctagttctttgcaagcggaaatgtatcgagtgctatcaaagttatcttcttcaattggctcgtctacttccaggaaactggtttctgggcggattataagtagcagaaactatgcggccaaggatatcagtttcgggatcggagctcgggcagctatggtgcagggtgtatccgaggttgcagaagctgtgaaagtcactatgggaccaaagggaagaaatgtgataattgagagcagttatggtggaccaaagatcacaaaggatggtgtcaccgtggcaaaaagcatatcatttcaagctaaagctaagaacattggtgccgaactcgtcaaacaggttgcaagtgccactaacaaggttgctggagatggtaccacttgtgccactgttttgactcaggcgatactcatcgaaggctgcaagtcggtggctgcaggtgtaaatgtgatggatttgcgtgttggaattaatatggcaattgctgcagttgtctctgatttgaaaagcagagctgttatgattagcaccccagaagagatcacacaggttgccactatatctgcaaatggggagcgtgaaataggggaactaattgcaagagccatggagaaagttggaaaggaaggggttatcactgttgctgatggtaacactttagataacgagctggaagtagtggaaggaatgaagctagccagaggttacatttctccttattttatcacggatgagaagacccagaaatgcgagcttgaaaatcccatcatcctcattcatgagaagaagatttcagacattaactctttgttgaaagttttagaagcggctgtgaaaagtagtagaccacttcttattgtagcagaagatgttgagagtgatgcattagctatgcttattctcaataagcatcatggtgggcttaaggtatgtgctatcaaggctccggggtttggtgacaacaggaaagcaagcttggatgatcttgcagttcttactggtgcagaggttatctctgaggagcgtgggctatctctagaaaaaattcgccctgaattgcttggaactgcgaagaaggttaccgttacccgtgatgacactattatcctacatggtggtggtgataaaaagctaattgaagaaagatgtgaagagttaagatcagccaatgaaaagagtacatccacttttgataaagagaaaacgcaagaaagactctcaaagctatcaggtggtgttgcagtcttcaaggtgggaggggcaagtgaatctgaagttggagagagaaaagacagagtcactgatgctttaaacgccacaagagcagctgtagaagaaggcatcataccgggtggtggtgtggctctattatatgcgacaaaggctttagacaaccttcaaactgaaaacgaggatcaaagaagaggtgttcagattgttcagaatgctctcaaggctcctgcatttacaatagctgcaaatgccggttacgatggttctttagtggttggcaagttattagagcaagacgattgcaattttggtttcgatgcagccaaaggtaaatatgtggatatggtgaaagctggaatcatagacccagtcaaggtgatcagaaccgccttaacatgctgctagcgtttctttgcttttgacaacaacagaggcctcagtgcttgtgaaggcagacgagaacactccaaaccatgtccctgatatggccagcatgggcatgtgatcttgtaacctctacaaaaaaagaaacattcaaatttttatttttctctactaaagttagaaacttttctcgattttaatttggttgtctggttctatatatattgttacagtgaatttttaatgaattttgttgaatcc

SEQ ID NO: 24301 - protein, 538 aa, Arabidopsis thaliana
  peptide (1)..(538): Ceres Seq. ID no. 13580460
  misc_feature (53)..(536): Pfam Name: TCP-1/cpn60 chaperonin family Pfam Description: TCP-1/cpn60 chaperonin family
  misc_feature (1)..(535): Homolog of NCBI NO: 99676 NR Description: chaperonin hsp60 precursor - Arabidopsis thaliana
  misc_feature (1)..(423): Homolog of NCBI NO: 15982717 NR Description: AT3g13860/MCP4_7 [Arabidopsis thaliana]
  misc_feature (1)..(535): Homolog of NCBI NO: 461736 NR Description: CHAPERONIN CPN60-2, MITOCHONDRIAL PRECURSOR
  misc_feature (1)..(535): Homolog of NCBI NO: 309557 NR Description: chaperonin 60
  misc_feature (1)..(535): Homolog of NCBI NO: 2506275 NR Description: CHAPERONIN CPN60-1, MITOCHONDRIAL PRECURSOR
  misc_feature (1)..(535): Homolog of NCBI NO: 15229559 NR Description: chaperonin (CPN60/HSP60) [Arabidopsis thaliana]
  misc_feature (1)..(535): Homolog of NCBI NO: 283035 NR Description: chaperonin hsp60 - maize
  misc_feature (1)..(535): Homolog of NCBI NO: 2493646 NR Description: CHAPERONIN CPN60-2, MITOCHONDRIAL PRECURSOR
  misc_feature (19)..(535): Homolog of NCBI NO: 4680247 NR Description: chaperonine protein HSP60 [Onchocerca volvulus]
  misc_feature (1)..(536): Homolog of NCBI NO: 18400195 NR Description: chaperonin, putative [Arabidopsis thaliana]
MYRVLSKLSSSIGSSTSRKLVSGRIISSRNYAAKDISFGIGARAAMVQGVSEVAEAVKVTMGPKGRNVIIESSYGGPKITKDGVTVAKSISFQAKAKNIGAELVKQVASATNKVAGDGTTCATVLTQAILIEGCKSVAAGVNVMDLRVGINMAIAAVVSDLKSRAVMISTPEEITQVATISANGEREIGELIARAMEKVGKEGVITVADGNTLDNELEVVEGMKLARGYISPYFITDEKTQKCELENPIILIHEKKISDINSLLKVLEAAVKSSRPLLIVAEDVESDALAMLILNKHHGGLKVCAIKAPGFGDNRKASLDDLAVLTGAEVISEERGLSLEKIRPELLGTAKKVTVTRDDTIILHGGGDKKLIEERCEELRSANEKSTSTFDKEKTQERLSKLSGGVAVFKVGGASESEVGERKDRVTDALNATRAAVEEGIIPGGGVALLYATKALDNLQTENEDQRRGVQIVQNALKAPAFTIAANAGYDGSLVVGKLLEQDDCNFGFDAAKGKYVDMVKAGIIDPVKVIRTALTCC

SEQ ID NO: 24302 - protein, 493 aa, Arabidopsis thaliana
  peptide (1)..(493): Ceres Seq. ID no. 13580461
  misc_feature (8)..(491): Pfam Name: TCP-1/cpn60 chaperonin family Pfam Description: TCP-1/cpn60 chaperonin family
  misc_feature (1)..(490): Homolog of NCBI NO: 4680247 NR Description: chaperonine protein HSP60 [Onchocerca volvulus]
  misc_feature (1)..(490): Homolog of NCBI NO: 461736 NR Description: CHAPERONIN CPN60-2, MITOCHONDRIAL PRECURSOR
  misc_feature (1)..(490): Homolog of NCBI NO: 2493646 NR Description: CHAPERONIN CPN60-2, MITOCHONDRIAL PRECURSOR
  misc_feature (1)..(490): Homolog of NCBI NO: 309557 NR Description: chaperonin 60
  misc_feature (1)..(490): Homolog of NCBI NO: 283035 NR Description: chaperonin hsp60 - maize
  misc_feature (1)..(490): Homolog of NCBI NO: 2506275 NR Description: CHAPERONIN CPN60-1, MITOCHONDRIAL PRECURSOR
  misc_feature (1)..(490): Homolog of NCBI NO: 15229559 NR Description: chaperonin (CPN60/HSP60) [Arabidopsis thaliana]
  misc_feature (1)..(490): Homolog of NCBI NO: 99676 NR Description: chaperonin hsp60 precursor - Arabidopsis thaliana
  misc_feature (1)..(378): Homolog of NCBI NO: 15982717 NR Description: AT3g13860/MCP4_7 [Arabidopsis thaliana]
  misc_feature (1)..(491): Homolog of NCBI NO: 18400195 NR Description: chaperonin, putative [Arabidopsis thaliana]
MVQGVSEVAEAVKVTMGPKGRNVIIESSYGGPKITKDGVTVAKSISFQAKAKNIGAELVKQVASATNKVAGDGTTCATVLTQAILIEGCKSVAAGVNVMDLRVGINMAIAAVVSDLKSRAVMISTPEEITQVATISANGEREIGELIARAMEKVGKEGVITVADGNTLDNELEVVEGMKLARGYISPYFITDEKTQKCELENPIILIHEKKISDINSLLKVLEAAVKSSRPLLIVAEDVESDALAMLILNKHHGGLKVCAIKAPGFGDNRKASLDDLAVLTGAEVISEERGLSLEKIRPELLGTAKKVTVTRDDTIILHGGGDKKLIEERCEELRSANEKSTSTFDKEKTQERLSKLSGGVAVFKVGGASESEVGERKDRVTDALNATRAAVEEGIIPGGGVALLYATKALDNLQTENEDQRRGVQIVQNALKAPAFTIAANAGYDGSLVVGKLLEQDDCNFGFDAAKGKYVDMVKAGIIDPVKVIRTALTCC

SEQ ID NO: 24303 - protein, 478 aa, Arabidopsis thaliana
  peptide (1)..(478): Ceres Seq. ID no. 13580462
  misc_feature (1)..(476): Pfam Name: TCP-1/cpn60 chaperonin family Pfam Description: TCP-1/cpn60 chaperonin family
  misc_feature (1)..(475): Homolog of NCBI NO: 4680247 NR Description: chaperonine protein HSP60 [Onchocerca volvulus]
  misc_feature (1)..(475): Homolog of NCBI NO: 461736 NR Description: CHAPERONIN CPN60-2, MITOCHONDRIAL PRECURSOR
  misc_feature (1)..(475): Homolog of NCBI NO: 2493646 NR Description: CHAPERONIN CPN60-2, MITOCHONDRIAL PRECURSOR
  misc_feature (1)..(475): Homolog of NCBI NO: 309557 NR Description: chaperonin 60
  misc_feature (1)..(475): Homolog of NCBI NO: 283035 NR Description: chaperonin hsp60 - maize
  misc_feature (1)..(475): Homolog of NCBI NO: 2506275 NR Description: CHAPERONIN CPN60-1, MITOCHONDRIAL PRECURSOR
  misc_feature (1)..(475): Homolog of NCBI NO: 15229559 NR Description: chaperonin (CPN60/HSP60) [Arabidopsis thaliana]
  misc_feature (1)..(475): Homolog of NCBI NO: 99676 NR Description: chaperonin hsp60 precursor - Arabidopsis thaliana
  misc_feature (1)..(363): Homolog of NCBI NO: 15982717 NR Description: AT3g13860/MCP4_7 [Arabidopsis thaliana]
  misc_feature (1)..(476): Homolog of NCBI NO: 18400195 NR Description: chaperonin, putative [Arabidopsis thaliana]
MGPKGRNVIIESSYGGPKITKDGVTVAKSISFQAKAKNIGAELVKQVASATNKVAGDGTTCATVLTQAILIEGCKSVAAGVNVMDLRVGINMAIAAVVSDLKSRAVMISTPEEITQVATISANGEREIGELIARAMEKVGKEGVITVADGNTLDNELEVVEGMKLARGYISPYFITDEKTQKCELENPIILIHEKKISDINSLLKVLEAAVKSSRPLLIVAEDVESDALAMLILNKHHGGLKVCAIKAPGFGDNRKASLDDLAVLTGAEVISEERGLSLEKIRPELLGTAKKVTVTRDDTIILHGGGDKKLIEERCEELRSANEKSTSTFDKEKTQERLSKLSGGVAVFKVGGASESEVGERKDRVTDALNATRAAVEEGIIPGGGVALLYATKALDNLQTENEDQRRGVQIVQNALKAPAFTIAANAGYDGSLVVGKLLEQDDCNFGFDAAKGKYVDMVKAGIIDPVKVIRTALTCC

SEQ ID NO: 24304 - DNA, 1565 bp, Arabidopsis thaliana
  misc_feature (1)..(1565): Ceres Seq. ID no. 13490743
  misc_feature: MA Experiment ID: 108434 Result: Up-regulated in Transcription
  misc_feature: MA Experiment 108434 PARAMETER Experiment Name: At_Root_Tips_cDNA_P Parameter: Tissue Value: Root Tips
  misc_feature: MA Experiment ID: 108461 Result: Up-regulated in Transcription
  misc_feature: MA Experiment 108461 PARAMETER Experiment Name: At_Germinating_Seeds_cDNA_P Parameter: Age (day) Value: 1 vs. 0
  misc_feature: MA Experiment 108461 PARAMETER Experiment Name: At_Germinating_Seeds_cDNA_P Parameter: Tissue Value: Germinating Seeds
  misc_feature: MA Experiment ID: 108462 Result: Up-regulated in Transcription
  misc_feature: MA Experiment 108462 PARAMETER Experiment Name: At_Germinating_Seeds_cDNA_P Parameter: Age (day) Value: 2 vs. 0
  misc_feature: MA Experiment 108462 PARAMETER Experiment Name: At_Germinating_Seeds_cDNA_P Parameter: Tissue Value: Germinating Seeds
  misc_feature: MA Experiment ID: 108463 Result: Up-regulated in Transcription
  misc_feature: MA Experiment 108463 PARAMETER Experiment Name: At_Germinating_Seeds_cDNA_P Parameter: Age (day) Value: 3 vs. 0
  misc_feature: MA Experiment 108463 PARAMETER Experiment Name: At_Germinating_Seeds_cDNA_P Parameter: Tissue Value: Germinating Seeds
  misc_feature: MA Experiment ID: 108464 Result: Up-regulated in Transcription
  misc_feature: MA Experiment 108464 PARAMETER Experiment Name: At_Germinating_Seeds_cDNA_P Parameter: Age (day) Value: 4 vs. 0
  misc_feature: MA Experiment 108464 PARAMETER Experiment Name: At_Germinating_Seeds_cDNA_P Parameter: Tissue Value: Germinating Seeds
  misc_feature: MA Experiment ID: 108569 Result: Up-regulated in Transcription
  misc_feature: MA Experiment 108569 PARAMETER Experiment Name: At_0.001%_MeJA__cDNA_P Parameter: Timepoint (hr) Value: 6
  misc_feature: MA Experiment 108569 PARAMETER Experiment Name: At_0.001%_MeJA__cDNA_P Parameter: Tissue Value: Aerial
  misc_feature: MA Experiment 108569 PARAMETER Experiment Name: At_0.001%_MeJA__cDNA_P Parameter: Treatment Value: 0.001% MeJA vs. No Treatment
  misc_feature: MA Experiment ID: 108573 Result: Up-regulated in Transcription
  misc_feature: MA Experiment 108573 PARAMETER Experiment Name: At_Drought_cDNA_P Parameter: Timepoint (hr) Value: 6
  misc_feature: MA Experiment 108573 PARAMETER Experiment Name: At_Drought_cDNA_P Parameter: Tissue Value: Aerial
  misc_feature: MA Experiment 108573 PARAMETER Experiment Name: At_Drought_cDNA_P Parameter: Treatment Value: Drought vs. No Drought
  misc_feature: MA Experiment ID: 108595 Result: Down-regulated in Transcription
  misc_feature: MA Experiment 108595 PARAMETER Experiment Name: At_Ler-pi_Ovule_cDNA_P Parameter: Plant Line Value: null
  misc_feature: MA Experiment ID: 20000069 Result: Down-regulated in Transcription
  misc_feature: MA Experiment 20000069 PARAMETER Experiment Name: At_100uM_ABA_Mutants_cDNA_P Parameter: Plant Line Value: CS23
  misc_feature: MA Experiment 20000069 PARAMETER Experiment Name: At_100uM_ABA_Mutants_cDNA_P Parameter: Timepoint (hr) Value: 6
  misc_feature: MA Experiment 20000069 PARAMETER Experiment Name: At_100uM_ABA_Mutants_cDNA_P Parameter: Tissue Value: Aerial
  misc_feature: MA Experiment 20000069 PARAMETER Experiment Name: At_100uM_ABA_Mutants_cDNA_P Parameter: Treatment Value: 100uM ABA vs. No Treatment
  misc_feature: MA Experiment ID: 20000087 Result: Down-regulated in Transcription
  misc_feature: MA Experiment 20000087 PARAMETER Experiment Name: At_100uM_ABA_Mutants_cDNA_P Parameter: Plant Line Value: WS
  misc_feature: MA Experiment 20000087 PARAMETER Experiment Name: At_100uM_ABA_Mutants_cDNA_P Parameter: Timepoint (hr) Value: 6
  misc_feature: MA Experiment 20000087 PARAMETER Experiment Name: At_100uM_ABA_Mutants_cDNA_P Parameter: Tissue Value: Aerial
  misc_feature: MA Experiment 20000087 PARAMETER Experiment Name: At_100uM_ABA_Mutants_cDNA_P Parameter: Treatment Value: 100uM ABA vs. No Treatment
  misc_feature: MA Experiment ID: 20000089 Result: Down-regulated in Transcription
  misc_feature: MA Experiment ID: 20000179 Result: Up-regulated in Transcription
  misc_feature: MA Experiment 20000179 PARAMETER Experiment Name: At_Germinating_Seeds_P Parameter: Age (hr) Value: 6 vs. 0
  misc_feature: MA Experiment 20000179 PARAMETER Experiment Name: At_Germinating_Seeds_P Parameter: Tissue Value: Germinating Seeds
  misc_feature: MA Experiment ID: 20000180 Result: Up-regulated in Transcription
  misc_feature: MA Experiment 20000180 PARAMETER Experiment Name: At_Germinating_Seeds_P Parameter: Age (hr) Value: 24 vs. 0
  misc_feature: MA Experiment 20000180 PARAMETER Experiment Name: At_Germinating_Seeds_P Parameter: Tissue Value: Germinating Seeds
  misc_feature: MA Experiment ID: 20000184 Result: Up-regulated in Transcription
  misc_feature: MA Experiment 20000184 PARAMETER Experiment Name: At_Shoots__P Parameter: Age (day) Value: 7
  misc_feature: MA Experiment 20000184 PARAMETER Experiment Name: At_Shoots__P Parameter: Tissue Value: Shoots vs. Whole Plant
  misc_feature: MA Experiment ID: 20000224 Result: Down-regulated in Transcription
  misc_feature: MA Experiment ID: 20000227 Result: Up-regulated in Transcription
  misc_feature: MA Experiment 20000227 PARAMETER Experiment Name: At_Root-Tips-vs-Tops_P Parameter: Tissue Value: Root Tips vs. Root Tops
aatttaattcgatttcgacaatttcatttaattcttcgatttctccgcttgtcactgtttcgtatcgccattttctgtttgcatacacttgtatatatttatattaacagtccaaaattcttcgaaattgtcccgagctttgagcatataaaaaatgtcttcgataatccatggagctggagctgctacgacgacgttatcgacgtttaattccgtcgattccaagaaactcttcgttgctccttctcgcacaaatctttcagtgaggagccagagatatatagtggctggatctgatgcgagtaagaagagctttggttctggacttagagttcgtcactctcagaaattgattccaaatgctgttgcgacgaaggaggcggatacgtctgcgagcactggacatgaactattgcttttcgaggctcttcaggaaggtctggaagaagagatggacagagatccacatgtatgtgttatgggtgaagatgttggccattacggaggttcctacaaggtaaccaaaggccttgctgataaatttggtgacctcagggttctcgacactcctatttgtgaaaatgcattcaccggtatgggcattggagctgccatgactggtctaagacccgttattgaaggtatgaacatgggtttcctcctcctcgccttcaaccaaatctccaacaactgtggaatgcttcactacacatccggtggtcagtttacgatcccggttgtcatccgtggacctggtggagtgggacgccagcttggtgctgagcattcacagaggttagaatcttactttcagtccatccctgggatccagatggttgcttgctcaactccttacaacgccaaagggttgatgaaagccgcaataagaagcgagaaccctgtgattctgttcgaacacgtgctgctttacaatctcaaggagaaaatcccggatgaagattacatctgtaaccttgaagaagctgagatggtcagacctggcgagcacattaccatcctcacttactcgcgaatgaggtaccatgtgatgcaggcagcaaaaactctggtgaacaaagggtatgaccccgaggttatcgacatcaggtcactgaaaccgttcgaccttcacacaattggaaactcggtgaagaaaacacatcgggttttgatcgtggaggagtgtatgagaaccggtgggattggggcaagtcttacagctgccatcaacgagaactttcatgactacttagatgctccggtgatgtgtttatcttctcaagacgttcctacaccttacgctggtacactggaggagtggaccgtggttcaaccggctcagatcgtgaccgctgtcgagcagctttgccagtaaattcatatttatccgatgaaccattatttatcatttacctctccatttcctttctctgtagcttagttcttaaagaatttgtctaagatggtttgtttttgttaaagtttgtctcctttgttgtgtcttttaatatggtttgtaactcagaatgtttgtttgttaattttatctcccactttcttttaag

SEQ ID NO: 24305 - protein, 406 aa, Arabidopsis thaliana
  peptide (1)..(406): Ceres Seq. ID no. 13490744
  misc_feature (275)..(397): Pfam Name: Transketolase, C-terminal domain Pfam Description: Transketolase, C-terminal domain
  misc_feature (85)..(404): Homolog of NCBI NO: 16330037 NR Description: pyruvate dehydrogenase E1 beta subunit
  misc_feature (85)..(404): Homolog of NCBI NO: 23041427 NR Description: hypothetical protein [Trichodesmium erythraeum
  misc_feature (85)..(404): Homolog of NCBI NO: 17227618 NR Description: pyruvate dehydrogenase E1 beta subunit [Nostoc
  misc_feature (85)..(406): Homolog of NCBI NO: 22297748 NR Description: pyruvate dehydrogenase E1 component beta subunit
  misc_feature (85)..(406): Homolog of NCBI NO: 22711921 NR Description: pyruvate dehydrogenase E1 component beta subunit
  misc_feature (120)..(406): Homolog of NCBI NO: 2982328 NR Description: pyruvate dehydrogenase E1 beta subunit [Picea
  misc_feature (1)..(406): Homolog of NCBI NO: 21593379 NR Description: putative pyruvate dehydrogenase E1 beta subunit
  misc_feature (1)..(406): Homolog of NCBI NO: 15226781 NR Description: pyruvate dehydrogenase E1 beta subunit -related
  misc_feature (1)..(406): Homolog of NCBI NO: 15220670 NR Description: pyruvate dehydrogenase E1 beta subunit -related
  misc_feature (1)..(406): Homolog of NCBI NO: 2454184 NR Description: pyruvate dehydrogenase E1 beta subunit
MSSIIHGAGAATTTLSTFNSVDSKKLFVAPSRTNLSVRSQRYIVAGSDASKKSFGSGLRVRHSQKLIPNAVATKEADTSASTGHELLLFEALQEGLEEEMDRDPHVCVMGEDVGHYGGSYKVTKGLADKFGDLRVLDTPICENAFTGMGIGAAMTGLRPVIEGMNMGFLLLAFNQISNNCGMLHYTSGGQFTIPVVIRGPGGVGRQLGAEHSQRLESYFQSIPGIQMVACSTPYNAKGLMKAAIRSENPVILFEHVLLYNLKEKIPDEDYICNLEEAEMVRPGEHITILTYSRMRYHVMQAAKTLVNKGYDPEVIDIRSLKPFDLHTIGNSVKKTHRVLIVEECMRTGGIGASLTAAINENFHDYLDAPVMCLSSQDVPTPYAGTLEEWTVVQPAQIVTAVEQLCQ

SEQ ID NO: 24306 - protein, 307 aa, Arabidopsis thaliana
  peptide (1)..(307): Ceres Seq. ID no. 13490745
  misc_feature (176)..(298): Pfam Name: Transketolase, C-terminal domain Pfam Description: Transketolase, C-terminal domain
  misc_feature (1)..(305): Homolog of NCBI NO: 16330037 NR Description: pyruvate dehydrogenase E1 beta subunit
  misc_feature (1)..(305): Homolog of NCBI NO: 23041427 NR Description: hypothetical protein [Trichodesmium erythraeum
  misc_feature (1)..(305): Homolog of NCBI NO: 17227618 NR Description: pyruvate dehydrogenase E1 beta subunit [Nostoc
  misc_feature (1)..(307): Homolog of NCBI NO: 22297748 NR Description: pyruvate dehydrogenase E1 component beta subunit
  misc_feature (1)..(307): Homolog of NCBI NO: 22711921 NR Description: pyruvate dehydrogenase E1 component beta subunit
  misc_feature (21)..(307): Homolog of NCBI NO: 2982328 NR Description: pyruvate dehydrogenase E1 beta subunit [Picea
  misc_feature (1)..(307): Homolog of NCBI NO: 21593379 NR Description: putative pyruvate dehydrogenase E1 beta subunit
  misc_feature (1)..(307): Homolog of NCBI NO: 15226781 NR Description: pyruvate dehydrogenase E1 beta subunit -related
  misc_feature (1)..(307): Homolog of NCBI NO: 15220670 NR Description: pyruvate dehydrogenase E1 beta subunit -related
  misc_feature (1)..(307): Homolog of NCBI NO: 2454184 NR Description: pyruvate dehydrogenase E1 beta subunit
MDRDPHVCVMGEDVGHYGGSYKVTKGLADKFGDLRVLDTPICENAFTGMGIGAAMTGLRPVIEGMNMGFLLLAFNQISNNCGMLHYTSGGQFTIPVVIRGPGGVGRQLGAEHSQRLESYFQSIPGIQMVACSTPYNAKGLMKAAIRSENPVILFEHVLLYNLKEKIPDEDYICNLEEAEMVRPGEHITILTYSRMRYHVMQAAKTLVNKGYDPEVIDIRSLKPFDLHTIGNSVKKTHRVLIVEECMRTGGIGASLTAAINENFHDYLDAPVMCLSSQDVPTPYAGTLEEWTVVQPAQIVTAVEQLCQ

SEQ ID NO: 24307 - protein, 298 aa, Arabidopsis thaliana
  peptide (1)..(298): Ceres Seq. ID no. 13490746
  misc_feature (167)..(289): Pfam Name: Transketolase, C-terminal domain Pfam Description: Transketolase, C-terminal domain
  misc_feature (1)..(296): Homolog of NCBI NO: 16330037 NR Description: pyruvate dehydrogenase E1 beta subunit
  misc_feature (1)..(296): Homolog of NCBI NO: 23041427 NR Description: hypothetical protein [Trichodesmium erythraeum
  misc_feature (1)..(296): Homolog of NCBI NO: 17227618 NR Description: pyruvate dehydrogenase E1 beta subunit [Nostoc
  misc_feature (1)..(298): Homolog of NCBI NO: 22297748 NR Description: pyruvate dehydrogenase E1 component beta subunit
  misc_feature (1)..(298): Homolog of NCBI NO: 22711921 NR Description: pyruvate dehydrogenase E1 component beta subunit
  misc_feature (12)..(298): Homolog of NCBI NO: 2982328 NR Description: pyruvate dehydrogenase E1 beta subunit [Picea
  misc_feature (1)..(298): Homolog of NCBI NO: 21593379 NR Description: putative pyruvate dehydrogenase E1 beta subunit
  misc_feature (1)..(298): Homolog of NCBI NO: 15226781 NR Description: pyruvate dehydrogenase E1 beta subunit -related
  misc_feature (1)..(298): Homolog of NCBI NO: 15220670 NR Description: pyruvate dehydrogenase E1 beta subunit -related
  misc_feature (1)..(298): Homolog of NCBI NO: 2454184 NR Description: pyruvate dehydrogenase E1 beta subunit
MGEDVGHYGGSYKVTKGLADKFGDLRVLDTPICENAFTGMGIGAAMTGLRPVIEGMNMGFLLLAFNQISNNCGMLHYTSGGQFTIPVVIRGPGGVGRQLGAEHSQRLESYFQSIPGIQMVACSTPYNAKGLMKAAIRSENPVILFEHVLLYNLKEKIPDEDYICNLEEAEMVRPGEHITILTYSRMRYHVMQAAKTLVNKGYDPEVIDIRSLKPFDLHTIGNSVKKTHRVLIVEECMRTGGIGASLTAAINENFHDYLDAPVMCLSSQDVPTPYAGTLEEWTVVQPAQIVTAVEQLCQ

SEQ ID NO: 24308 - DNA, 1449 bp, Arabidopsis thaliana
  misc_feature (1)..(1449): Ceres Seq. ID no. 13487671
  misc_feature: MA Experiment ID: 108434 Result: Up-regulated in Transcription
  misc_feature: MA Experiment 108434 PARAMETER Experiment Name: At_Root_Tips_cDNA_P Parameter: Tissue Value: Root Tips
  misc_feature: MA Experiment ID: 108461 Result: Up-regulated in Transcription
  misc_feature: MA Experiment 108461 PARAMETER Experiment Name: At_Germinating_Seeds_cDNA_P Parameter: Age (day) Value: 1 vs. 0
  misc_feature: MA Experiment 108461 PARAMETER Experiment Name: At_Germinating_Seeds_cDNA_P Parameter: Tissue Value: Germinating Seeds
  misc_feature: MA Experiment ID: 108561 Result: Down-regulated in Transcription
  misc_feature: MA Experiment 108561 PARAMETER Experiment Name: At_100uM_ABA_cDNA_P Parameter: Timepoint (hr) Value: 6
  misc_feature: MA Experiment 108561 PARAMETER Experiment Name: At_100uM_ABA_cDNA_P Parameter: Tissue Value: Aerial
  misc_feature: MA Experiment 108561 PARAMETER Experiment Name: At_100uM_ABA_cDNA_P Parameter: Treatment Value: 100uM ABA vs. No Treatment
  misc_feature: MA Experiment ID: 108577 Result: Down-regulated in Transcription
  misc_feature: MA Experiment 108577 PARAMETER Experiment Name: At_42deg_Heat_cDNA_P Parameter: Temperature (deg C) Value: 42 vs. 22
  misc_feature: MA Experiment 108577 PARAMETER Experiment Name: At_42deg_Heat_cDNA_P Parameter: Timepoint (hr) Value: 6
  misc_feature: MA Experiment 108577 PARAMETER Experiment Name: At_42deg_Heat_cDNA_P Parameter: Tissue Value: Aerial
  misc_feature: MA Experiment ID: 108579 Result: Up-regulated in Transcription
  misc_feature: MA Experiment 108579 PARAMETER Experiment Name: At_4deg_Cold_cDNA_P Parameter: Temperature (deg C) Value: 4 vs. 22
  misc_feature: MA Experiment 108579 PARAMETER Experiment Name: At_4deg_Cold_cDNA_P Parameter: Timepoint (hr) Value: 6
  misc_feature: MA Experiment 108579 PARAMETER Experiment Name: At_4deg_Cold_cDNA_P Parameter: Tissue Value: Aerial
  misc_feature: MA Experiment ID: 108595 Result: Down-regulated in Transcription
  misc_feature: MA Experiment 108595 PARAMETER Experiment Name: At_Ler-pi_Ovule_cDNA_P Parameter: Plant Line Value: null
  misc_feature: MA Experiment ID: 108607 Result: Down-regulated in Transcription
  misc_feature: MA Experiment 108607 PARAMETER Experiment Name: At_100uM_ABA_cDNA_P Parameter: Timepoint (hr) Value: 4
  misc_feature: MA Experiment 108607 PARAMETER Experiment Name: At_100uM_ABA_cDNA_P Parameter: Tissue Value: Aerial
  misc_feature: MA Experiment 108607 PARAMETER Experiment Name: At_100uM_ABA_cDNA_P Parameter: Treatment Value: 100uM ABA vs. No Treatment
  misc_feature: MA Experiment ID: 20000072 Result: Down-regulated in Transcription
  misc_feature: MA Experiment 20000072 PARAMETER Experiment Name: At_100uM_ABA_Mutants_cDNA_P Parameter: Plant Line Value: CS8105
  misc_feature: MA Experiment 20000072 PARAMETER Experiment Name: At_100uM_ABA_Mutants_cDNA_P Parameter: Timepoint (hr) Value: 6
  misc_feature: MA Experiment 20000072 PARAMETER Experiment Name: At_100uM_ABA_Mutants_cDNA_P Parameter: Tissue Value: Aerial
  misc_feature: MA Experiment 20000072 PARAMETER Experiment Name: At_100uM_ABA_Mutants_cDNA_P Parameter: Treatment Value: 100uM ABA vs. No Treatment
  misc_feature: MA Experiment ID: 20000111 Result: Down-regulated in Transcription
  misc_feature: MA Experiment 20000111 PARAMETER Experiment Name: At_42deg_Heat_cDNA_P Parameter: Temperature (deg C) Value: 42 vs. 22
  misc_feature: MA Experiment 20000111 PARAMETER Experiment Name: At_42deg_Heat_cDNA_P Parameter: Timepoint (hr) Value: 6
  misc_feature: MA Experiment 20000111 PARAMETER Experiment Name: At_42deg_Heat_cDNA_P Parameter: Tissue Value: Aerial
  misc_feature: MA Experiment ID: 20000306 Result: Up-regulated in Transcription
  misc_feature: MA Experiment 20000306 PARAMETER Experiment Name: At_Germinating_Seeds_Sub_P Parameter: Age (hr) Value: 6 vs. 0
  misc_feature: MA Experiment 20000306 PARAMETER Experiment Name: At_Germinating_Seeds_Sub_P Parameter: Organism Value: A. thaliana
  misc_feature: MA Experiment 20000306 PARAMETER Experiment Name: At_Germinating_Seeds_Sub_P Parameter: Plant Line Value: WS
  misc_feature: MA Experiment 20000306 PARAMETER Experiment Name: At_Germinating_Seeds_Sub_P Parameter: Tissue Value: Germinating Seeds
  misc_feature: MA Experiment ID: 20000307 Result: Up-regulated in Transcription
  misc_feature: MA Experiment 20000307 PARAMETER Experiment Name: At_Germinating_Seeds_Sub_P Parameter: Age (hr) Value: 24 vs. 0
  misc_feature: MA Experiment 20000307 PARAMETER Experiment Name: At_Germinating_Seeds_Sub_P Parameter: Organism Value: A. thaliana
  misc_feature: MA Experiment 20000307 PARAMETER Experiment Name: At_Germinating_Seeds_Sub_P Parameter: Plant Line Value: WS
  misc_feature: MA Experiment 20000307 PARAMETER Experiment Name: At_Germinating_Seeds_Sub_P Parameter: Tissue Value: Germinating Seeds
  misc_feature: MA Experiment ID: 20000327 Result: Down-regulated in Transcription
  misc_feature: MA Experiment 20000327 PARAMETER Experiment Name: At_42deg_Heat_Sub_P Parameter: Age (day) Value: 14
  misc_feature: MA Experiment 20000327 PARAMETER Experiment Name: At_42deg_Heat_Sub_P Parameter: Organism Value: A. thaliana
  misc_feature: MA Experiment 20000327 PARAMETER Experiment Name: At_42deg_Heat_Sub_P Parameter: Plant Line Value: WS
  misc_feature: MA Experiment 20000327 PARAMETER Experiment Name: At_42deg_Heat_Sub_P Parameter: Temperature (deg C) Value: 42 vs. 22
  misc_feature: MA Experiment 20000327 PARAMETER Experiment Name: At_42deg_Heat_Sub_P Parameter: Timepoint (hr) Value: 1
  misc_feature: MA Experiment 20000327 PARAMETER Experiment Name: At_42deg_Heat_Sub_P Parameter: Tissue Value: Aerial
  misc_feature: MA Experiment ID: 20000328 Result: Down-regulated in Transcription
  misc_feature: MA Experiment 20000328 PARAMETER Experiment Name: At_42deg_Heat_Sub_P Parameter: Age (day) Value: 14
  misc_feature: MA Experiment 20000328 PARAMETER Experiment Name: At_42deg_Heat_Sub_P Parameter: Organism Value: A. thaliana
  misc_feature: MA Experiment 20000328 PARAMETER Experiment Name: At_42deg_Heat_Sub_P Parameter: Plant Line Value: WS
  misc_feature: MA Experiment 20000328 PARAMETER Experiment Name: At_42deg_Heat_Sub_P Parameter: Temperature (deg C) Value: 42 vs. 22
  misc_feature: MA Experiment 20000328 PARAMETER Experiment Name: At_42deg_Heat_Sub_P Parameter: Timepoint (hr) Value: 6
  misc_feature: MA Experiment 20000328 PARAMETER Experiment Name: At_42deg_Heat_Sub_P Parameter: Tissue Value: Aerial
  misc_feature: MA Experiment ID: 20000329 Result: Up-regulated in Transcription
  misc_feature: MA Experiment 20000329 PARAMETER Experiment Name: At_4deg_Cold_Sub_P Parameter: Age (day) Value: 14
  misc_feature: MA Experiment 20000329 PARAMETER Experiment Name: At_4deg_Cold_Sub_P Parameter: Organism Value: A. thaliana
  misc_feature: MA Experiment 20000329 PARAMETER Experiment Name: At_4deg_Cold_Sub_P Parameter: Plant Line Value: WS
  misc_feature: MA Experiment 20000329 PARAMETER Experiment Name: At_4deg_Cold_Sub_P Parameter: Temperature (deg C) Value: 4 vs. 22
  misc_feature: MA Experiment 20000329 PARAMETER Experiment Name: At_4deg_Cold_Sub_P Parameter: Timepoint (hr) Value: 6
  misc_feature: MA Experiment 20000329 PARAMETER Experiment Name: At_4deg_Cold_Sub_P Parameter: Tissue Value: Aerial
  misc_feature: MA Experiment ID: 20000347 Result: Down-regulated in Transcription
  misc_feature: MA Experiment 20000347 PARAMETER Experiment Name: At_2mM_SA_Sub_P Parameter: Age (day) Value: 14
  misc_feature: MA Experiment 20000347 PARAMETER Experiment Name: At_2mM_SA_Sub_P Parameter: Organism Value: A. thaliana
  misc_feature: MA Experiment 20000347 PARAMETER Experiment Name: At_2mM_SA_Sub_P Parameter: Plant Line Value: WS
  misc_feature: MA Experiment 20000347 PARAMETER Experiment Name: At_2mM_SA_Sub_P Parameter: Timepoint (hr) Value: 6
  misc_feature: MA Experiment 20000347 PARAMETER Experiment Name: At_2mM_SA_Sub_P Parameter: Tissue Value: Aerial
  misc_feature: MA Experiment 20000347 PARAMETER Experiment Name: At_2mM_SA_Sub_P Parameter: Treatment Value: 2mM SA vs. No Treatment
  misc_feature: MA Experiment ID: 20001807 Result: Up-regulated in Transcription
  misc_feature: MA Experiment 20001807 PARAMETER Experiment Name: At_50mM_NH4NO3_L-to-H_Sub_P Parameter: Timepoint (hr) Value: 6
  misc_feature: MA Experiment 20001807 PARAMETER Experiment Name: At_50mM_NH4NO3_L-to-H_Sub_P Parameter: Tissue Value: Leaf
  misc_feature: MA Experiment 20001807 PARAMETER Experiment Name: At_50mM_NH4NO3_L-to-H_Sub_P Parameter: Treatment Value: 50mM NH4NO3 vs 100mM Mannitol
aagggttctttttggtaattttcccgaatcacacaagtgagctagctcatcagagtccacgagcttcccactaaaaaattgaaaattgttgcttctgtcatctgaaattaaacaaagcgagaaaaggcgatacaaacgatttcgaatgcttcatcttctcctttgaaaatccttcttctgcttaatgctgctagatatggatctcggtgttcttcttccatcattgcaatctgtttatgtgctggtgttttacttcgtttacttggccgttgccggagaaattctccccgggaaagttattcgcggcgtccttttatcagatggctctcaacttcgttaccgatgcaatggtctattggcactaatattgttggtagctattttgggaatctgtgcaaaacttggcattgtatcacctcttgtggttgcggatagaggacttgagttactctcagctacttttattttctgtgttttggtgacattagcattgtatgttactgggcgaagttcctcgaataagggttcttccctaaagcctcatgtctcaggaaatcttgtacatgactggtggtttggaatacagctgaatcctcagtttatgagcattgatctcaagtttttctttgtcagagccgggatgatgggatggctgcttatcaatctctctattctggcaaaaagtgtgcaggatggttccttgagtcagtcgatgattctttaccagatcttctgtgcgttatatatattggactactttgttcatgaagaatacatgacctctacgtgggacataattgcagagagactaggcttcatgctagtgtttggagatctcctgtggattcctttcacttttagcattcagggctggtggcttttgcacaacaaagtagaactaacagttcctgcgattgtagtcaattgccttgtcttcttgatagggtacatggtttttcgaggagctaacaaacaaaaacatatctttaagaagaacccaaaaacaccaatatggggcaagcctccagtggtagttggtggaaagttactggtttcaggctattggggaattgcaaggcactgtaattaccttggcgacttgatgcttgctctgtccttcagtttgccatgtggaataagttctccggttccatatttctacccgatataccttctgatactattgatatggagagaacgaagagacgaggttcgatgtgcagagaagtacaaggagatatgggcagagtatcttagacttgtcccctggagaatacttccttatgtttattagatgtgccaagagccaagtcatgaatcctttcagattcatcctcttgtgtcttattttttcataatcttgttttattttagcaatgctcgagtgaaactttgtagtacacgtttgagaataacttcagtccttattattattttagcattgatagc

SEQ ID NO: 24309 - protein, 369 aa, Arabidopsis thaliana
  peptide (1)..(369): Ceres Seq. ID no. 13487672
  misc_feature (5)..(369): Pfam Name: Ergosterol biosynthesis ERG4/ERG24 family Pfam Description: Ergosterol biosynthesis ERG4/ERG24 family
  misc_feature (1)..(369): Homolog of NCBI NO: 20137709 NR Description: Delta(14)-sterol reductase (C-14 sterol (Sterol C14-reductase) (Delta14-SR) (Transmembrane 7 superfamily
  misc_feature (11)..(369): Homolog of NCBI NO: 37595750 NR Description: lamin B receptor
  misc_feature (11)..(369): Homolog of NCBI NO: 439434 NR Description: integral nuclear envelope inner membrane protein
  misc_feature (16)..(369): Homolog of NCBI NO: 33417073 NR Description: Unknown (protein for MGC:68849) [Xenopus laevis]
  misc_feature (1)..(369): Homolog of NCBI NO: 33320186 NR Description: C-14 sterol reductase [Mus musculus]
  misc_feature (78)..(366): Homolog of NCBI NO: 11096269 NR Description: sterol C-14 reductase [Dictyostelium discoideum]
  misc_feature (229)..(369): Homolog of NCBI NO: 11358585 NR Description: nuclear envelope membrane protein-like -
  misc_feature (5)..(213): Homolog of NCBI NO: 11358585 NR Description: nuclear envelope membrane protein-like -
  misc_feature (5)..(369): Homolog of NCBI NO: 8917585 NR Description: C-14 sterol reductase [Arabidopsis thaliana]
  misc_feature (1)..(369): Homolog of NCBI NO: 18409727 NR Description: C-14 sterol reductase (delta(14)-sterol
MLLDMDLGVLLPSLQSVYVLVFYFVYLAVAGEILPGKVIRGVLLSDGSQLRYRCNGLLALILLVAILGICAKLGIVSPLVVADRGLELLSATFIFCVLVTLALYVTGRSSSNKGSSLKPHVSGNLVHDWWFGIQLNPQFMSIDLKFFFVRAGMMGWLLINLSILAKSVQDGSLSQSMILYQIFCALYILDYFVHEEYMTSTWDIIAERLGFMLVFGDLLWIPFTFSIQGWWLLHNKVELTVPAIVVNCLVFLIGYMVFRGANKQKHIFKKNPKTPIWGKPPVVVGGKLLVSGYWGIARHCNYLGDLMLALSFSLPCGISSPVPYFYPIYLLILLIWRERRDEVRCAEKYKEIWAEYLRLVPWRILPYVY

SEQ ID NO: 24310 - protein, 365 aa, Arabidopsis thaliana
  peptide (1)..(365): Ceres Seq. ID no. 13487673
  misc_feature (1)..(365): Pfam Name: Ergosterol biosynthesis ERG4/ERG24 family Pfam Description: Ergosterol biosynthesis ERG4/ERG24 family
  misc_feature (1)..(365): Homolog of NCBI NO: 20137709 NR Description: Delta(14)-sterol reductase (C-14 sterol (Sterol C14-reductase) (Delta14-SR) (Transmembrane 7 superfamily
  misc_feature (7)..(365): Homolog of NCBI NO: 37595750 NR Description: lamin B receptor
  misc_feature (7)..(365): Homolog of NCBI NO: 439434 NR Description: integral nuclear envelope inner membrane protein
  misc_feature (12)..(365): Homolog of NCBI NO: 33417073 NR Description: Unknown (protein for MGC:68849) [Xenopus laevis]
  misc_feature (1)..(365): Homolog of NCBI NO: 33320186 NR Description: C-14 sterol reductase [Mus musculus]
  misc_feature (74)..(362): Homolog of NCBI NO: 11096269 NR Description: sterol C-14 reductase [Dictyostelium discoideum]
  misc_feature (225)..(365): Homolog of NCBI NO: 11358585 NR Description: nuclear envelope membrane protein-like -
  misc_feature (1)..(209): Homolog of NCBI NO: 11358585 NR Description: nuclear envelope membrane protein-like -
  misc_feature (1)..(365): Homolog of NCBI NO: 8917585 NR Description: C-14 sterol reductase [Arabidopsis thaliana]
  misc_feature (1)..(365): Homolog of NCBI NO: 18409727 NR Description: C-14 sterol reductase (delta(14)-sterol
MDLGVLLPSLQSVYVLVFYFVYLAVAGEILPGKVIRGVLLSDGSQLRYRCNGLLALILLVAILGICAKLGIVSPLVVADRGLELLSATFIFCVLVTLALYVTGRSSSNKGSSLKPHVSGNLVHDWWFGIQLNPQFMSIDLKFFFVRAGMMGWLLINLSILAKSVQDGSLSQSMILYQIFCALYILDYFVHEEYMTSTWDIIAERLGFMLVFGDLLWIPFTFSIQGWWLLHNKVELTVPAIVVNCLVFLIGYMVFRGANKQKHIFKKNPKTPIWGKPPVVVGGKLLVSGYWGIARHCNYLGDLMLALSFSLPCGISSPVPYFYPIYLLILLIWRERRDEVRCAEKYKEIWAEYLRLVPWRILPYVY

SEQ ID NO: 24311 - protein, 230 aa, Arabidopsis thaliana
  peptide (1)..(230): Ceres Seq. ID no. 13487674
  misc_feature (1)..(230): Pfam Name: Ergosterol biosynthesis ERG4/ERG24 family Pfam Description: Ergosterol biosynthesis ERG4/ERG24 family
  misc_feature (90)..(230): Homolog of NCBI NO: 11358585 NR Description: nuclear envelope membrane protein-like -
  misc_feature (1)..(74): Homolog of NCBI NO: 11358585 NR Description: nuclear envelope membrane protein-like -
  misc_feature (1)..(230): Homolog of NCBI NO: 20137709 NR Description: Delta(14)-sterol reductase (C-14 sterol (Sterol C14-reductase) (Delta14-SR) (Transmembrane 7 superfamily
  misc_feature (1)..(230): Homolog of NCBI NO: 439434 NR Description: integral nuclear envelope inner membrane protein
  misc_feature (1)..(230): Homolog of NCBI NO: 33320186 NR Description: C-14 sterol reductase [Mus musculus]
  misc_feature (1)..(227): Homolog of NCBI NO: 11096269 NR Description: sterol C-14 reductase [Dictyostelium discoideum]
  misc_feature (1)..(230): Homolog of NCBI NO: 33417073 NR Description: Unknown (protein for MGC:68849) [Xenopus laevis]
  misc_feature (1)..(230): Homolog of NCBI NO: 37595750 NR Description: lamin B receptor
  misc_feature (1)..(230): Homolog of NCBI NO: 8917585 NR Description: C-14 sterol reductase [Arabidopsis thaliana]
  misc_feature (1)..(230): Homolog of NCBI NO: 18409727 NR Description: C-14 sterol reductase (delta(14)-sterol
MSIDLKFFFVRAGMMGWLLINLSILAKSVQDGSLSQSMILYQIFCALYILDYFVHEEYMTSTWDIIAERLGFMLVFGDLLWIPFTFSIQGWWLLHNKVELTVPAIVVNCLVFLIGYMVFRGANKQKHIFKKNPKTPIWGKPPVVVGGKLLVSGYWGIARHCNYLGDLMLALSFSLPCGISSPVPYFYPIYLLILLIWRERRDEVRCAEKYKEIWAEYLRLVPWRILPYVY

SEQ ID NO: 24312 - DNA, 1303 bp, Arabidopsis thaliana
  misc_feature (1)..(1303): Ceres Seq. ID no. 13488993
  misc_feature: MA Experiment ID: 108577 Result: Down-regulated in Transcription
  misc_feature: MA Experiment 108577 PARAMETER Experiment Name: At_42deg_Heat_cDNA_P Parameter: Temperature (deg C) Value: 42 vs. 22
  misc_feature: MA Experiment 108577 PARAMETER Experiment Name: At_42deg_Heat_cDNA_P Parameter: Timepoint (hr) Value: 6
  misc_feature: MA Experiment 108577 PARAMETER Experiment Name: At_42deg_Heat_cDNA_P Parameter: Tissue Value: Aerial
  misc_feature: MA Experiment ID: 20000173 Result: Down-regulated in Transcription
  misc_feature: MA Experiment 20000173 PARAMETER Experiment Name: At_42deg_Heat_P Parameter: Age (day) Value: 14
  misc_feature: MA Experiment 20000173 PARAMETER Experiment Name: At_42deg_Heat_P Parameter: Organism Value: A. thaliana
  misc_feature: MA Experiment 20000173 PARAMETER Experiment Name: At_42deg_Heat_P Parameter: Plant Line Value: WS
  misc_feature: MA Experiment 20000173 PARAMETER Experiment Name: At_42deg_Heat_P Parameter: Temperature (deg C) Value: 42 vs. 22
  misc_feature: MA Experiment 20000173 PARAMETER Experiment Name: At_42deg_Heat_P Parameter: Timepoint (hr) Value: 6
  misc_feature: MA Experiment 20000173 PARAMETER Experiment Name: At_42deg_Heat_P Parameter: Tissue Value: Aerial
  misc_feature: MA Experiment ID: 20000184 Result: Down-regulated in Transcription
  misc_feature: MA Experiment 20000184 PARAMETER Experiment Name: At_Shoots__P Parameter: Age (day) Value: 7
  misc_feature: MA Experiment 20000184 PARAMETER Experiment Name: At_Shoots__P Parameter: Tissue Value: Shoots vs. Whole Plant
acaacgcacttcttctgttgtcatcatcatcgtccacttgaaacaaacctgacgatcaaagagaagattgcgatcgcaaatttctccattttttcagatcgaaattgatgtcgaaagctagggtttatacagatgttaacgttgttcgtcctaaagagtattgggactacgagtctctcgttgttcaatggggtcatcaagatgattatgaggttgtgagaaaagttggtagaggaaaatacagtgaagttttcgaaggtaaaaacgtcaatacgaatgagcgttgcgttatcaagatcctcaaacccgtaaaaaagaagaagataaagagagagatcaaaatacttcagaacctatgtggtggaccaaatattgttaagctgtatgatattgttagagatgagcactccaaaacacctagcttggtatttgagtttgtcaacagtgtggactttaaagtattgtatccaacattgactgattacgatatccggtactatatttatgagcttctgaaggcattggatttctgtcactctcaaggaataatgcatagggatgttaagcctcataatgtcatgatagatcatcagctgcgtaaacttcgtctgatagattggggccttgctgagttttaccatcccggaaaagagtataatgttcgcgtggcctcgagatacttcaagggtcccgagcttttagttgatctacaggattatgactattctttagacatgtggagtcttggttgcatgtttgctggcatgatattccgtaaggaaccgttcttttatggccatgataatcatgatcaacttgtcaaaattgccaaggtgttgggaaccaatgagttagatcattacctaaacaaatatcagctagatcttgaccctcaactggaagcacttgttggaagacatgtccccaaaccatggtccaagtttatcaacgcggacaaccaacatttggtctcacctgaggcaattgattttctcgataagcttcttcagtatgatcatcaagacagattaaccgcaagagaagccatggatcatccatacttcgctcaagttaaagccgcagagagcagcagactacgaactcagtaaaaccgaagcttgattgatgatgcttactactatttttcaaccaaaaactttgtaatgattttgttgtatcaaaattgtggtaatctttactttcatagaaacataatcaacagcgaaaagaagccaacttatattaaaaaaaaaggttccacacaaagcttcattatataatcatagcaagagacttattgttg

SEQ ID NO: 24313 - protein, 333 aa, Arabidopsis thaliana
  peptide (1)..(333): Ceres Seq. ID no. 13488994
  misc_feature (34)..(319): Pfam Name: Protein kinase domain Pfam Description: Protein kinase domain
  misc_feature (1)..(333): Homolog of NCBI NO: 15227778 NR Description: casein kinase II alpha chain, putative
  misc_feature (1)..(333): Homolog of NCBI NO: 14150749 NR Description: CK2 alpha subunit [Nicotiana tabacum]
  misc_feature (1)..(333): Homolog of NCBI NO: 13638266 NR Description: Casein kinase II, alpha chain 1 (CK II)
  misc_feature (1)..(333): Homolog of NCBI NO: 13638265 NR Description: Casein kinase II, alpha chain 2 (CK II)
  misc_feature (1)..(333): Homolog of NCBI NO: 17977973 NR Description: protein kinase 2 [Beta vulgaris]
  misc_feature (1)..(333): Homolog of NCBI NO: 30698301 NR Description: casein kinase II alpha chain 1 [Arabidopsis
  misc_feature (1)..(333): Homolog of NCBI NO: 30693260 NR Description: casein kinase II alpha chain 2 [Arabidopsis
  misc_feature (1)..(333): Homolog of NCBI NO: 23397331 NR Description: putative casein kinase II, alpha chain 2 CK II
  misc_feature (1)..(333): Homolog of NCBI NO: 21593324 NR Description: putative casein kinase II catalytic (alpha)
  misc_feature (1)..(333): Homolog of NCBI NO: 15227779 NR Description: casein kinase II alpha chain, putative
MSKARVYTDVNVVRPKEYWDYESLVVQWGHQDDYEVVRKVGRGKYSEVFEGKNVNTNERCVIKILKPVKKKKIKREIKILQNLCGGPNIVKLYDIVRDEHSKTPSLVFEFVNSVDFKVLYPTLTDYDIRYYIYELLKALDFCHSQGIMHRDVKPHNVMIDHQLRKLRLIDWGLAEFYHPGKEYNVRVASRYFKGPELLVDLQDYDYSLDMWSLGCMFAGMIFRKEPFFYGHDNHDQLVKIAKVLGTNELDHYLNKYQLDLDPQLEALVGRHVPKPWSKFINADNQHLVSPEAIDFLDKLLQYDHQDRLTAREAMDHPYFAQVKAAESSRLRTQ

SEQ ID NO: 24314 - protein, 186 aa, Arabidopsis thaliana
  peptide (1)..(186): Ceres Seq. ID no. 13488995
  misc_feature (1)..(172): Pfam Name: Protein kinase domain Pfam Description: Protein kinase domain
  misc_feature (1)..(186): Homolog of NCBI NO: 15227778 NR Description: casein kinase II alpha chain, putative
  misc_feature (1)..(186): Homolog of NCBI NO: 14150749 NR Description: CK2 alpha subunit [Nicotiana tabacum]
  misc_feature (1)..(186): Homolog of NCBI NO: 13638266 NR Description: Casein kinase II, alpha chain 1 (CK II)
  misc_feature (1)..(186): Homolog of NCBI NO: 13638265 NR Description: Casein kinase II, alpha chain 2 (CK II)
  misc_feature (1)..(186): Homolog of NCBI NO: 17977973 NR Description: protein kinase 2 [Beta vulgaris]
  misc_feature (1)..(186): Homolog of NCBI NO: 30698301 NR Description: casein kinase II alpha chain 1 [Arabidopsis
  misc_feature (1)..(186): Homolog of NCBI NO: 30693260 NR Description: casein kinase II alpha chain 2 [Arabidopsis
  misc_feature (1)..(186): Homolog of NCBI NO: 23397331 NR Description: putative casein kinase II, alpha chain 2 CK II
  misc_feature (1)..(186): Homolog of NCBI NO: 21593324 NR Description: putative casein kinase II catalytic (alpha)
  misc_feature (1)..(186): Homolog of NCBI NO: 15227779 NR Description: casein kinase II alpha chain, putative
MHRDVKPHNVMIDHQLRKLRLIDWGLAEFYHPGKEYNVRVASRYFKGPELLVDLQDYDYSLDMWSLGCMFAGMIFRKEPFFYGHDNHDQLVKIAKVLGTNELDHYLNKYQLDLDPQLEALVGRHVPKPWSKFINADNQHLVSPEAIDFLDKLLQYDHQDRLTAREAMDHPYFAQVKAAESSRLRTQ

SEQ ID NO: 24315 - protein, 176 aa, Arabidopsis thaliana
  peptide (1)..(176): Ceres Seq. ID no. 13488996
  misc_feature (1)..(162): Pfam Name: Protein kinase domain Pfam Description: Protein kinase domain
  misc_feature (1)..(176): Homolog of NCBI NO: 15227778 NR Description: casein kinase II alpha chain, putative
  misc_feature (1)..(176): Homolog of NCBI NO: 14150749 NR Description: CK2 alpha subunit [Nicotiana tabacum]
  misc_feature (1)..(176): Homolog of NCBI NO: 13638266 NR Description: Casein kinase II, alpha chain 1 (CK II)
  misc_feature (1)..(176): Homolog of NCBI NO: 13638265 NR Description: Casein kinase II, alpha chain 2 (CK II)
  misc_feature (1)..(176): Homolog of NCBI NO: 17977973 NR Description: protein kinase 2 [Beta vulgaris]
  misc_feature (1)..(176): Homolog of NCBI NO: 30698301 NR Description: casein kinase II alpha chain 1 [Arabidopsis
  misc_feature (1)..(176): Homolog of NCBI NO: 30693260 NR Description: casein kinase II alpha chain 2 [Arabidopsis
  misc_feature (1)..(176): Homolog of NCBI NO: 23397331 NR Description: putative casein kinase II, alpha chain 2 CK II
  misc_feature (1)..(176): Homolog of NCBI NO: 21593324 NR Description: putative casein kinase II catalytic (alpha)
  misc_feature (1)..(176): Homolog of NCBI NO: 15227779 NR Description: casein kinase II alpha chain, putative
MIDHQLRKLRLIDWGLAEFYHPGKEYNVRVASRYFKGPELLVDLQDYDYSLDMWSLGCMFAGMIFRKEPFFYGHDNHDQLVKIAKVLGTNELDHYLNKYQLDLDPQLEALVGRHVPKPWSKFINADNQHLVSPEAIDFLDKLLQYDHQDRLTAREAMDHPYFAQVKAAESSRLRTQ

SEQ ID NO: 24316 - DNA, 1414 bp, Arabidopsis thaliana
  misc_feature (1)..(1414): Ceres Seq. ID no. 13494229
  misc_feature: MA Experiment ID: 108434 Result: Up-regulated in Transcription
  misc_feature: MA Experiment 108434 PARAMETER Experiment Name: At_Root_Tips_cDNA_P Parameter: Tissue Value: Root Tips
  misc_feature: MA Experiment ID: 108461 Result: Up-regulated in Transcription
  misc_feature: MA Experiment 108461 PARAMETER Experiment Name: At_Germinating_Seeds_cDNA_P Parameter: Age (day) Value: 1 vs. 0
  misc_feature: MA Experiment 108461 PARAMETER Experiment Name: At_Germinating_Seeds_cDNA_P Parameter: Tissue Value: Germinating Seeds
  misc_feature: MA Experiment ID: 108462 Result: Up-regulated in Transcription
  misc_feature: MA Experiment 108462 PARAMETER Experiment Name: At_Germinating_Seeds_cDNA_P Parameter: Age (day) Value: 2 vs. 0
  misc_feature: MA Experiment 108462 PARAMETER Experiment Name: At_Germinating_Seeds_cDNA_P Parameter: Tissue Value: Germinating Seeds
  misc_feature: MA Experiment ID: 108463 Result: Up-regulated in Transcription
  misc_feature: MA Experiment 108463 PARAMETER Experiment Name: At_Germinating_Seeds_cDNA_P Parameter: Age (day) Value: 3 vs. 0
  misc_feature: MA Experiment 108463 PARAMETER Experiment Name: At_Germinating_Seeds_cDNA_P Parameter: Tissue Value: Germinating Seeds
  misc_feature: MA Experiment ID: 108464 Result: Up-regulated in Transcription
  misc_feature: MA Experiment 108464 PARAMETER Experiment Name: At_Germinating_Seeds_cDNA_P Parameter: Age (day) Value: 4 vs. 0
  misc_feature: MA Experiment 108464 PARAMETER Experiment Name: At_Germinating_Seeds_cDNA_P Parameter: Tissue Value: Germinating Seeds
  misc_feature: MA Experiment ID: 108576 Result: Down-regulated in Transcription
  misc_feature: MA Experiment 108576 PARAMETER Experiment Name: At_42deg_Heat_cDNA_P Parameter: Temperature (deg C) Value: 42 vs. 22
  misc_feature: MA Experiment 108576 PARAMETER Experiment Name: At_42deg_Heat_cDNA_P Parameter: Timepoint (hr) Value: 1
  misc_feature: MA Experiment 108576 PARAMETER Experiment Name: At_42deg_Heat_cDNA_P Parameter: Tissue Value: Aerial
  misc_feature: MA Experiment ID: 108594 Result: Down-regulated in Transcription
  misc_feature: MA Experiment 108594 PARAMETER Experiment Name: At_Ler-rhl_Root_cDNA_P Parameter: Plant Line Value: null
  misc_feature: MA Experiment ID: 20000070 Result: Down-regulated in Transcription
  misc_feature: MA Experiment 20000070 PARAMETER Experiment Name: At_100uM_ABA_Mutants_cDNA_P Parameter: Plant Line Value: CS24
  misc_feature: MA Experiment 20000070 PARAMETER Experiment Name: At_100uM_ABA_Mutants_cDNA_P Parameter: Timepoint (hr) Value: 6
  misc_feature: MA Experiment 20000070 PARAMETER Experiment Name: At_100uM_ABA_Mutants_cDNA_P Parameter: Tissue Value: Aerial
  misc_feature: MA Experiment 20000070 PARAMETER Experiment Name: At_100uM_ABA_Mutants_cDNA_P Parameter: Treatment Value: 100uM ABA vs. No Treatment
  misc_feature: MA Experiment ID: 20000087 Result: Down-regulated in Transcription
  misc_feature: MA Experiment 20000087 PARAMETER Experiment Name: At_100uM_ABA_Mutants_cDNA_P Parameter: Plant Line Value: WS
  misc_feature: MA Experiment 20000087 PARAMETER Experiment Name: At_100uM_ABA_Mutants_cDNA_P Parameter: Timepoint (hr) Value: 6
  misc_feature: MA Experiment 20000087 PARAMETER Experiment Name: At_100uM_ABA_Mutants_cDNA_P Parameter: Tissue Value: Aerial
  misc_feature: MA Experiment 20000087 PARAMETER Experiment Name: At_100uM_ABA_Mutants_cDNA_P Parameter: Treatment Value: 100uM ABA vs. No Treatment
  misc_feature: MA Experiment ID: 20000117 Result: Down-regulated in Transcription
  misc_feature: MA Experiment 20000117 PARAMETER Experiment Name: At_100uM_ABA_Mutants_cDNA_P Parameter: Plant Line Value: Columbia
  misc_feature: MA Experiment 20000117 PARAMETER Experiment Name: At_100uM_ABA_Mutants_cDNA_P Parameter: Timepoint (hr) Value: 6
  misc_feature: MA Experiment 20000117 PARAMETER Experiment Name: At_100uM_ABA_Mutants_cDNA_P Parameter: Tissue Value: Aerial
  misc_feature: MA Experiment 20000117 PARAMETER Experiment Name: At_100uM_ABA_Mutants_cDNA_P Parameter: Treatment Value: 100uM ABA vs. No Treatment
  misc_feature: MA Experiment ID: 20000179 Result: Up-regulated in Transcription
  misc_feature: MA Experiment 20000179 PARAMETER Experiment Name: At_Germinating_Seeds_P Parameter: Age (hr) Value: 6 vs. 0
  misc_feature: MA Experiment 20000179 PARAMETER Experiment Name: At_Germinating_Seeds_P Parameter: Tissue Value: Germinating Seeds
  misc_feature: MA Experiment ID: 20000180 Result: Up-regulated in Transcription
  misc_feature: MA Experiment 20000180 PARAMETER Experiment Name: At_Germinating_Seeds_P Parameter: Age (hr) Value: 24 vs. 0
  misc_feature: MA Experiment 20000180 PARAMETER Experiment Name: At_Germinating_Seeds_P Parameter: Tissue Value: Germinating Seeds
  misc_feature: MA Experiment ID: 20000182 Result: Down-regulated in Transcription
  misc_feature: MA Experiment 20000182 PARAMETER Experiment Name: At_2mM_SA_P Parameter: Age (day) Value: 14
  misc_feature: MA Experiment 20000182 PARAMETER Experiment Name: At_2mM_SA_P Parameter: Organism Value: A. thaliana
  misc_feature: MA Experiment 20000182 PARAMETER Experiment Name: At_2mM_SA_P Parameter: Plant Line Value: WS
  misc_feature: MA Experiment 20000182 PARAMETER Experiment Name: At_2mM_SA_P Parameter: Timepoint (hr) Value: 6
  misc_feature: MA Experiment 20000182 PARAMETER Experiment Name: At_2mM_SA_P Parameter: Tissue Value: Aerial
  misc_feature: MA Experiment 20000182 PARAMETER Experiment Name: At_2mM_SA_P Parameter: Treatment Value: 2mM SA vs. No Treatment
  misc_feature: MA Experiment ID: 20000184 Result: Up-regulated in Transcription
  misc_feature: MA Experiment 20000184 PARAMETER Experiment Name: At_Shoots__P Parameter: Age (day) Value: 7
  misc_feature: MA Experiment 20000184 PARAMETER Experiment Name: At_Shoots__P Parameter: Tissue Value: Shoots vs. Whole Plant
  misc_feature: MA Experiment ID: 20000234 Result: Up-regulated in Transcription
  misc_feature: MA Experiment 20000234 PARAMETER Experiment Name: At_Siliques_P Parameter: Age (day) Value: 21
  misc_feature: MA Experiment 20000234 PARAMETER Experiment Name: At_Siliques_P Parameter: Organism Value: A. thaliana
  misc_feature: MA Experiment 20000234 PARAMETER Experiment Name: At_Siliques_P Parameter: Plant Line Value: WS
  misc_feature: MA Experiment 20000234 PARAMETER Experiment Name: At_Siliques_P Parameter: Tissue Value: Less Than 5mm Siliques vs. Whole Plant
  misc_feature: MA Experiment ID: 20000235 Result: Up-regulated in Transcription
  misc_feature: MA Experiment 20000235 PARAMETER Experiment Name: At_Siliques_P Parameter: Age (day) Value: 21
  misc_feature: MA Experiment 20000235 PARAMETER Experiment Name: At_Siliques_P Parameter: Organism Value: A. thaliana
  misc_feature: MA Experiment 20000235 PARAMETER Experiment Name: At_Siliques_P Parameter: Plant Line Value: WS
  misc_feature: MA Experiment 20000235 PARAMETER Experiment Name: At_Siliques_P Parameter: Tissue Value: 5-10mm Siliques vs. Whole Plant
  misc_feature: MA Experiment ID: 20000437 Result: Down-regulated in Transcription
  misc_feature: MA Experiment 20000437 PARAMETER Experiment Name: At_Drought_P Parameter: Age (day) Value: 8
  misc_feature: MA Experiment 20000437 PARAMETER Experiment Name: At_Drought_P Parameter: Organism Value: A. thaliana
  misc_feature: MA Experiment 20000437 PARAMETER Experiment Name: At_Drought_P Parameter: Plant Line Value: WS
  misc_feature: MA Experiment 20000437 PARAMETER Experiment Name: At_Drought_P Parameter: Timepoint (hr) Value: 24
  misc_feature: MA Experiment 20000437 PARAMETER Experiment Name: At_Drought_P Parameter: Tissue Value: Whole Plant
  misc_feature: MA Experiment 20000437 PARAMETER Experiment Name: At_Drought_P Parameter: Treatment Value: Drought vs. No Drought
  misc_feature: MA Experiment ID: 20001248 Result: Down-regulated in Transcription
  misc_feature: MA Experiment 20001248 PARAMETER Experiment Name: At_Far-red-induction_P Parameter: Age (day) Value: 7
  misc_feature: MA Experiment 20001248 PARAMETER Experiment Name: At_Far-red-induction_P Parameter: Light Value: Far-red vs. White
  misc_feature: MA Experiment 20001248 PARAMETER Experiment Name: At_Far-red-induction_P Parameter: Organism Value: A. thaliana
  misc_feature: MA Experiment 20001248 PARAMETER Experiment Name: At_Far-red-induction_P Parameter: Plant Line Value: Columbia
  misc_feature: MA Experiment 20001248 PARAMETER Experiment Name: At_Far-red-induction_P Parameter: Timepoint (hr) Value: 4
  misc_feature: MA Experiment 20001248 PARAMETER Experiment Name: At_Far-red-induction_P Parameter: Tissue Value: Whole Plant
  misc_feature: MA Experiment ID: 20001555 Result: Down-regulated in Transcription
  misc_feature: MA Experiment 20001555 PARAMETER Experiment Name: At_Drought_Soil_Dry_P Parameter: Age (day) Value: 24
  misc_feature: MA Experiment 20001555 PARAMETER Experiment Name: At_Drought_Soil_Dry_P Parameter: Organism Value: A. thaliana
  misc_feature: MA Experiment 20001555 PARAMETER Experiment Name: At_Drought_Soil_Dry_P Parameter: Plant Line Value: WS
  misc_feature: MA Experiment 20001555 PARAMETER Experiment Name: At_Drought_Soil_Dry_P Parameter: Post Timepoint (hr) Value: None
  misc_feature: MA Experiment 20001555 PARAMETER Experiment Name: At_Drought_Soil_Dry_P Parameter: Post-Treatment Value: None
  misc_feature: MA Experiment 20001555 PARAMETER Experiment Name: At_Drought_Soil_Dry_P Parameter: Timepoint (day) Value: 10
  misc_feature: MA Experiment 20001555 PARAMETER Experiment Name: At_Drought_Soil_Dry_P Parameter: Treatment Value: Drought vs. No Drought
  misc_feature: MA Experiment ID: 20001556 Result: Down-regulated in Transcription
  misc_feature: MA Experiment 20001556 PARAMETER Experiment Name: At_Drought_Soil_Dry_P Parameter: Age (day) Value: 26
  misc_feature: MA Experiment 20001556 PARAMETER Experiment Name: At_Drought_Soil_Dry_P Parameter: Organism Value: A. thaliana
  misc_feature: MA Experiment 20001556 PARAMETER Experiment Name: At_Drought_Soil_Dry_P Parameter: Plant Line Value: WS
  misc_feature: MA Experiment 20001556 PARAMETER Experiment Name: At_Drought_Soil_Dry_P Parameter: Post Timepoint (hr) Value: None
  misc_feature: MA Experiment 20001556 PARAMETER Experiment Name: At_Drought_Soil_Dry_P Parameter: Post-Treatment Value: None
  misc_feature: MA Experiment 20001556 PARAMETER Experiment Name: At_Drought_Soil_Dry_P Parameter: Timepoint (day) Value: 12
  misc_feature: MA Experiment 20001556 PARAMETER Experiment Name: At_Drought_Soil_Dry_P Parameter: Treatment Value: Drought vs. No Drought
  misc_feature: MA Experiment ID: 20001557 Result: Up-regulated in Transcription
  misc_feature: MA Experiment 20001557 PARAMETER Experiment Name: At_Drought_Soil_Dry_P Parameter: Age (day) Value: 27
  misc_feature: MA Experiment 20001557 PARAMETER Experiment Name: At_Drought_Soil_Dry_P Parameter: Organism Value: A. thaliana
  misc_feature: MA Experiment 20001557 PARAMETER Experiment Name: At_Drought_Soil_Dry_P Parameter: Plant Line Value: WS
  misc_feature: MA Experiment 20001557 PARAMETER Experiment Name: At_Drought_Soil_Dry_P Parameter: Post Timepoint (hr) Value: 3
  misc_feature: MA Experiment 20001557 PARAMETER Experiment Name: At_Drought_Soil_Dry_P Parameter: Post-Treatment Value: Re-Water vs. No Drought
  misc_feature: MA Experiment 20001557 PARAMETER Experiment Name: At_Drought_Soil_Dry_P Parameter: Timepoint (day) Value: 13
  misc_feature: MA Experiment 20001557 PARAMETER Experiment Name: At_Drought_Soil_Dry_P Parameter: Treatment Value: Drought vs. No Drought
  misc_feature: MA Experiment ID: 20001558 Result: Up-regulated in Transcription
  misc_feature: MA Experiment 20001558 PARAMETER Experiment Name: At_Drought_Soil_Dry_P Parameter: Age (day) Value: 27
  misc_feature: MA Experiment 20001558 PARAMETER Experiment Name: At_Drought_Soil_Dry_P Parameter: Organism Value: A. thaliana
  misc_feature: MA Experiment 20001558 PARAMETER Experiment Name: At_Drought_Soil_Dry_P Parameter: Plant Line Value: WS
  misc_feature: MA Experiment 20001558 PARAMETER Experiment Name: At_Drought_Soil_Dry_P Parameter: Post Timepoint (hr) Value: 6
  misc_feature: MA Experiment 20001558 PARAMETER Experiment Name: At_Drought_Soil_Dry_P Parameter: Post-Treatment Value: Re-Water vs. No Drought
  misc_feature: MA Experiment 20001558 PARAMETER Experiment Name: At_Drought_Soil_Dry_P Parameter: Timepoint (day) Value: 13
  misc_feature: MA Experiment 20001558 PARAMETER Experiment Name: At_Drought_Soil_Dry_P Parameter: Treatment Value: Drought vs. No Drought
  misc_feature: MA Experiment ID: 20001560 Result: Up-regulated in Transcription
  misc_feature: MA Experiment 20001560 PARAMETER Experiment Name: At_Drought_Soil_Dry_P Parameter: Age (day) Value: 28
  misc_feature: MA Experiment 20001560 PARAMETER Experiment Name: At_Drought_Soil_Dry_P Parameter: Organism Value: A. thaliana
  misc_feature: MA Experiment 20001560 PARAMETER Experiment Name: At_Drought_Soil_Dry_P Parameter: Plant Line Value: WS
  misc_feature: MA Experiment 20001560 PARAMETER Experiment Name: At_Drought_Soil_Dry_P Parameter: Post Timepoint (hr) Value: None
  misc_feature: MA Experiment 20001560 PARAMETER Experiment Name: At_Drought_Soil_Dry_P Parameter: Post-Treatment Value: None
  misc_feature: MA Experiment 20001560 PARAMETER Experiment Name: At_Drought_Soil_Dry_P Parameter: Timepoint (day) Value: 14
  misc_feature: MA Experiment 20001560 PARAMETER Experiment Name: At_Drought_Soil_Dry_P Parameter: Treatment Value: Drought vs. No Drought
  misc_feature: MA Experiment ID: 20001906 Result: Down-regulated in Transcription
  misc_feature: MA Experiment 20001906 PARAMETER Experiment Name: At_Drought_Reproduction_P Parameter: Age (day) Value: 35
  misc_feature: MA Experiment 20001906 PARAMETER Experiment Name: At_Drought_Reproduction_P Parameter: Organism Value: A. thaliana
  misc_feature: MA Experiment 20001906 PARAMETER Experiment Name: At_Drought_Reproduction_P Parameter: Plant Line Value: WS
  misc_feature: MA Experiment 20001906 PARAMETER Experiment Name: At_Drought_Reproduction_P Parameter: Timepoint (day) Value: 5
  misc_feature: MA Experiment 20001906 PARAMETER Experiment Name: At_Drought_Reproduction_P Parameter: Tissue Value: Siliques
  misc_feature: MA Experiment 20001906 PARAMETER Experiment Name: At_Drought_Reproduction_P Parameter: Treatment Value: Drought vs. No Drought
  misc_feature: MA Experiment ID: 20001911 Result: Down-regulated in Transcription
  misc_feature: MA Experiment 20001911 PARAMETER Experiment Name: At_Drought_Reproduction_P Parameter: Age (day) Value: 40
  misc_feature: MA Experiment 20001911 PARAMETER Experiment Name: At_Drought_Reproduction_P Parameter: Organism Value: A. thaliana
  misc_feature: MA Experiment 20001911 PARAMETER Experiment Name: At_Drought_Reproduction_P Parameter: Plant Line Value: WS
  misc_feature: MA Experiment 20001911 PARAMETER Experiment Name: At_Drought_Reproduction_P Parameter: Timepoint (day) Value: 10
  misc_feature: MA Experiment 20001911 PARAMETER Experiment Name: At_Drought_Reproduction_P Parameter: Tissue Value: Flowers
  misc_feature: MA Experiment 20001911 PARAMETER Experiment Name: At_Drought_Reproduction_P Parameter: Treatment Value: Drought vs. No Drought
  misc_feature: Phenotype: ROSETTE LEAVES Disorganized Rosette-Disorganized Rosette
  misc_feature: Phenotype: ROSETTE LEAVES Petiole Length-Short Petioles
  misc_feature: Phenotype: WHOLE PLANT Size-Small
  misc_feature: Phenotype: ROSETTE LEAVES Curled-Curled 2
  misc_feature: Phenotype: WHOLE PLANT Color-Dark Green
  misc_feature: Phenotype: WHOLE PLANT Size-Small
  misc_feature: Phenotype: ROSETTE LEAVES Petiole Length-Short Petioles
  misc_feature: Phenotype: WHOLE PLANT Dwarf-Misc. Dwarf
  misc_feature: Phenotype: WHOLE PLANT Size-Small
  misc_feature: Phenotype: INFLORESCENCE Flowering Time-Late Flowering
  misc_feature: Phenotype: ROSETTE LEAVES Petiole Length-Short Petioles
  misc_feature: Phenotype: WHOLE PLANT Dwarf-Misc. Dwarf
  misc_feature: Phenotype: WHOLE PLANT Size-Small
  misc_feature: Phenotype: INFLORESCENCE Flowering Time-Late Flowering
  misc_feature: Phenotype: ROSETTE LEAVES Curled-Curled 2
  misc_feature: Phenotype: WHOLE PLANT Color-Dark Green
  misc_feature: Phenotype: WHOLE PLANT Size-Small
  misc_feature: Phenotype: WHOLE PLANT Size-Small
  misc_feature: Phenotype: INFLORESCENCE Flowering Time-Late Flowering
  misc_feature: Phenotype: ROSETTE LEAVES Disorganized Rosette-Disorganized Rosette
  misc_feature: Phenotype: ROSETTE LEAVES Petiole Length-Short Petioles
  misc_feature: Phenotype: WHOLE PLANT Size-Small
atttgctccgtttctctctcaaaaactacacacccgtaccacaccaccaccctcctcgtttcctcagagatcccctctctaacttctaaggatatagaaaatggcagatggtgaagacattcagcctctcgtctgtgacaatggaaccggaatggttaaggctggatttgctggagatgatgcaccaagagctgtattccctagcatcgttggtcgtcctcgacacactggtgtcatggttggtatgggacaaaaagatgcttacgttggtgatgaggctcagtctaagagaggtattttgacattgaaatatcctattgagcatggtattgttagcaactgggatgatatggagaagatttggcatcacactttctacaatgagctccgtgttgcacctgaagaacaccctgttcttctcactgaggctcctctcaaccccaaggccaatcgtgagaaaatgactcagattatgtttgaaactttcaacactcctgccatgtatgtcgctatccaagctgttctttccctctacgctagtggtcgtactactggtattgtgttggactctggagatggtgtgagtcacactgttccaatttatgaaggatatgctcttccacatgctattctgcgtttggaccttgcaggccgtgaccttactgattacctcatgaagatcttaaccgagcgtggttactcattcactacctcagcagagcgtgaaatcgtaagggatgtgaaagagaaacttgcttacatagcacttgactacgagcaagagatggaaacagcaaacacaagctcatccgttgagaagagctatgagttgcctgatggacaggtgatcaccattggaggagagagattccgctgcccggaggttctgttccaaccgtctttggtgggaatggaagctgctggtattcacgagaccacttacaattccatcatgaagtgtgatgtggatatcaggaaggatctgtatggaaacattgtgctcagtggtggaaccaccatgttccctggaattgctgataggatgagcaaagagatcactgctttggctccaagcagcatgaagattaaggtggttgctccaccagagaggaagtacagtgtctggattggaggctccattctagcatcactcagtaccttccaacagatgtggatagcaaaggccgagtatgatgagtcagggccatcaatagtccacaggaagtgcttctaagattaagctcaaatcaaagtgatgaatgattgttctgtattggtaaagccttttgttcatcgactttgttgcaaaatattcttttgttttctatgtttcttcaccactacattacatttctttcttgttgttatcctcttttggtgtttctgctattaatcgaaaaagaaattttctttt

SEQ ID NO: 24317 - protein, 377 aa, Arabidopsis thaliana
  peptide (1)..(377): Ceres Seq. ID no. 13494230
  misc_feature (1)..(377): Pfam Name: Actin Pfam Description: Actin
  misc_feature (1)..(377): Homolog of NCBI NO: 11276968 NR Description: actin [imported] - Picea rubens
  misc_feature (1)..(377): Homolog of NCBI NO: 11276978 NR Description: actin ACT2 [imported] - Striga asiatica
  misc_feature (1)..(377): Homolog of NCBI NO: 11276969 NR Description: actin 1 [imported] - small naked oat
  misc_feature (1)..(377): Homolog of NCBI NO: 11276977 NR Description: actin [imported] - Striga asiatica
  misc_feature (1)..(377): Homolog of NCBI NO: 231496 NR Description: Actin 58
  misc_feature (1)..(377): Homolog of NCBI NO: 461465 NR Description: ACTIN
  misc_feature (1)..(377): Homolog of NCBI NO: 11276975 NR Description: actin [imported] - upland cotton
  misc_feature (1)..(377): Homolog of NCBI NO: 28301928 NR Description: actin [Oryza sativa (japonica cultivar-group)]
  misc_feature (1)..(377): Homolog of NCBI NO: 231503 NR Description: ACTIN 97
  misc_feature (1)..(377): Homolog of NCBI NO: 15229955 NR Description: actin 11 (ACT11) [Arabidopsis thaliana]
MADGEDIQPLVCDNGTGMVKAGFAGDDAPRAVFPSIVGRPRHTGVMVGMGQKDAYVGDEAQSKRGILTLKYPIEHGIVSNWDDMEKIWHHTFYNELRVAPEEHPVLLTEAPLNPKANREKMTQIMFETFNTPAMYVAIQAVLSLYASGRTTGIVLDSGDGVSHTVPIYEGYALPHAILRLDLAGRDLTDYLMKILTERGYSFTTSAEREIVRDVKEKLAYIALDYEQEMETANTSSSVEKSYELPDGQVITIGGERFRCPEVLFQPSLVGMEAAGIHETTYNSIMKCDVDIRKDLYGNIVLSGGTTMFPGIADRMSKEITALAPSSMKIKVVAPPERKYSVWIGGSILASLSTFQQMWIAKAEYDESGPSIVHRKCF

SEQ ID NO: 24318 - protein, 360 aa, Arabidopsis thaliana
  peptide (1)..(360): Ceres Seq. ID no. 13494231
  misc_feature (1)..(360): Pfam Name: Actin Pfam Description: Actin
  misc_feature (1)..(360): Homolog of NCBI NO: 11276968 NR Description: actin [imported] - Picea rubens
  misc_feature (1)..(360): Homolog of NCBI NO: 11276978 NR Description: actin ACT2 [imported] - Striga asiatica
  misc_feature (1)..(360): Homolog of NCBI NO: 11276969 NR Description: actin 1 [imported] - small naked oat
  misc_feature (1)..(360): Homolog of NCBI NO: 11276977 NR Description: actin [imported] - Striga asiatica
  misc_feature (1)..(360): Homolog of NCBI NO: 231496 NR Description: Actin 58
  misc_feature (1)..(360): Homolog of NCBI NO: 461465 NR Description: ACTIN
  misc_feature (1)..(360): Homolog of NCBI NO: 11276975 NR Description: actin [imported] - upland cotton
  misc_feature (1)..(360): Homolog of NCBI NO: 28301928 NR Description: actin [Oryza sativa (japonica cultivar-group)]
  misc_feature (1)..(360): Homolog of NCBI NO: 231503 NR Description: ACTIN 97
  misc_feature (1)..(360): Homolog of NCBI NO: 15229955 NR Description: actin 11 (ACT11) [Arabidopsis thaliana]
MVKAGFAGDDAPRAVFPSIVGRPRHTGVMVGMGQKDAYVGDEAQSKRGILTLKYPIEHGIVSNWDDMEKIWHHTFYNELRVAPEEHPVLLTEAPLNPKANREKMTQIMFETFNTPAMYVAIQAVLSLYASGRTTGIVLDSGDGVSHTVPIYEGYALPHAILRLDLAGRDLTDYLMKILTERGYSFTTSAEREIVRDVKEKLAYIALDYEQEMETANTSSSVEKSYELPDGQVITIGGERFRCPEVLFQPSLVGMEAAGIHETTYNSIMKCDVDIRKDLYGNIVLSGGTTMFPGIADRMSKEITALAPSSMKIKVVAPPERKYSVWIGGSILASLSTFQQMWIAKAEYDESGPSIVHRKCF

SEQ ID NO: 24319 - protein, 332 aa, Arabidopsis thaliana
  peptide (1)..(332): Ceres Seq. ID no. 13494232
  misc_feature (1)..(332): Pfam Name: Actin Pfam Description: Actin
  misc_feature (1)..(332): Homolog of NCBI NO: 11276968 NR Description: actin [imported] - Picea rubens
  misc_feature (1)..(332): Homolog of NCBI NO: 11276978 NR Description: actin ACT2 [imported] - Striga asiatica
  misc_feature (1)..(332): Homolog of NCBI NO: 11276969 NR Description: actin 1 [imported] - small naked oat
  misc_feature (1)..(332): Homolog of NCBI NO: 11276977 NR Description: actin [imported] - Striga asiatica
  misc_feature (1)..(332): Homolog of NCBI NO: 231496 NR Description: Actin 58
  misc_feature (1)..(332): Homolog of NCBI NO: 461465 NR Description: ACTIN
  misc_feature (1)..(332): Homolog of NCBI NO: 11276975 NR Description: actin [imported] - upland cotton
  misc_feature (1)..(332): Homolog of NCBI NO: 28301928 NR Description: actin [Oryza sativa (japonica cultivar-group)]
  misc_feature (1)..(332): Homolog of NCBI NO: 231503 NR Description: ACTIN 97
  misc_feature (1)..(332): Homolog of NCBI NO: 15229955 NR Description: actin 11 (ACT11) [Arabidopsis thaliana]
MVGMGQKDAYVGDEAQSKRGILTLKYPIEHGIVSNWDDMEKIWHHTFYNELRVAPEEHPVLLTEAPLNPKANREKMTQIMFETFNTPAMYVAIQAVLSLYASGRTTGIVLDSGDGVSHTVPIYEGYALPHAILRLDLAGRDLTDYLMKILTERGYSFTTSAEREIVRDVKEKLAYIALDYEQEMETANTSSSVEKSYELPDGQVITIGGERFRCPEVLFQPSLVGMEAAGIHETTYNSIMKCDVDIRKDLYGNIVLSGGTTMFPGIADRMSKEITALAPSSMKIKVVAPPERKYSVWIGGSILASLSTFQQMWIAKAEYDESGPSIVHRKCF

SEQ ID NO: 24320 - DNA, 1228 bp, Arabidopsis thaliana
  misc_feature (1)..(1228): Ceres Seq. ID no. 12321495
  misc_feature: MA Experiment ID: 108434 Result: Up-regulated in Transcription
  misc_feature: MA Experiment 108434 PARAMETER Experiment Name: At_Root_Tips_cDNA_P Parameter: Tissue Value: Root Tips
  misc_feature: MA Experiment ID: 108461 Result: Down-regulated in Transcription
  misc_feature: MA Experiment 108461 PARAMETER Experiment Name: At_Germinating_Seeds_cDNA_P Parameter: Age (day) Value: 1 vs. 0
  misc_feature: MA Experiment 108461 PARAMETER Experiment Name: At_Germinating_Seeds_cDNA_P Parameter: Tissue Value: Germinating Seeds
  misc_feature: MA Experiment ID: 108462 Result: Down-regulated in Transcription
  misc_feature: MA Experiment 108462 PARAMETER Experiment Name: At_Germinating_Seeds_cDNA_P Parameter: Age (day) Value: 2 vs. 0
  misc_feature: MA Experiment 108462 PARAMETER Experiment Name: At_Germinating_Seeds_cDNA_P Parameter: Tissue Value: Germinating Seeds
  misc_feature: MA Experiment ID: 108463 Result: Down-regulated in Transcription
  misc_feature: MA Experiment 108463 PARAMETER Experiment Name: At_Germinating_Seeds_cDNA_P Parameter: Age (day) Value: 3 vs. 0
  misc_feature: MA Experiment 108463 PARAMETER Experiment Name: At_Germinating_Seeds_cDNA_P Parameter: Tissue Value: Germinating Seeds
  misc_feature: MA Experiment ID: 108464 Result: Down-regulated in Transcription
  misc_feature: MA Experiment 108464 PARAMETER Experiment Name: At_Germinating_Seeds_cDNA_P Parameter: Age (day) Value: 4 vs. 0
  misc_feature: MA Experiment 108464 PARAMETER Experiment Name: At_Germinating_Seeds_cDNA_P Parameter: Tissue Value: Germinating Seeds
  misc_feature: MA Experiment ID: 108576 Result: Up-regulated in Transcription
  misc_feature: MA Experiment 108576 PARAMETER Experiment Name: At_42deg_Heat_cDNA_P Parameter: Temperature (deg C) Value: 42 vs. 22
  misc_feature: MA Experiment 108576 PARAMETER Experiment Name: At_42deg_Heat_cDNA_P Parameter: Timepoint (hr) Value: 1
  misc_feature: MA Experiment 108576 PARAMETER Experiment Name: At_42deg_Heat_cDNA_P Parameter: Tissue Value: Aerial
  misc_feature: MA Experiment ID: 108577 Result: Up-regulated in Transcription
  misc_feature: MA Experiment 108577 PARAMETER Experiment Name: At_42deg_Heat_cDNA_P Parameter: Temperature (deg C) Value: 42 vs. 22
  misc_feature: MA Experiment 108577 PARAMETER Experiment Name: At_42deg_Heat_cDNA_P Parameter: Timepoint (hr) Value: 6
  misc_feature: MA Experiment 108577 PARAMETER Experiment Name: At_42deg_Heat_cDNA_P Parameter: Tissue Value: Aerial
  misc_feature: MA Experiment ID: 20000093 Result: Up-regulated in Transcription
  misc_feature: MA Experiment 20000093 PARAMETER Experiment Name: At_42deg_Heat_cDNA_P Parameter: Temperature (deg C) Value: 42 vs. 22
  misc_feature: MA Experiment 20000093 PARAMETER Experiment Name: At_42deg_Heat_cDNA_P Parameter: Timepoint (hr) Value: 0.5
  misc_feature: MA Experiment 20000093 PARAMETER Experiment Name: At_42deg_Heat_cDNA_P Parameter: Tissue Value: Aerial
  misc_feature: MA Experiment ID: 20000111 Result: Up-regulated in Transcription
  misc_feature: MA Experiment 20000111 PARAMETER Experiment Name: At_42deg_Heat_cDNA_P Parameter: Temperature (deg C) Value: 42 vs. 22
  misc_feature: MA Experiment 20000111 PARAMETER Experiment Name: At_42deg_Heat_cDNA_P Parameter: Timepoint (hr) Value: 6
  misc_feature: MA Experiment 20000111 PARAMETER Experiment Name: At_42deg_Heat_cDNA_P Parameter: Tissue Value: Aerial
  misc_feature: MA Experiment ID: 20000112 Result: Up-regulated in Transcription
  misc_feature: MA Experiment 20000112 PARAMETER Experiment Name: At_42deg_Heat_cDNA_P Parameter: Temperature (deg C) Value: 42 vs. 22
  misc_feature: MA Experiment 20000112 PARAMETER Experiment Name: At_42deg_Heat_cDNA_P Parameter: Timepoint (hr) Value: 2
  misc_feature: MA Experiment 20000112 PARAMETER Experiment Name: At_42deg_Heat_cDNA_P Parameter: Tissue Value: Aerial
  misc_feature: MA Experiment ID: 20000113 Result: Up-regulated in Transcription
  misc_feature: MA Experiment 20000113 PARAMETER Experiment Name: At_42deg_Heat_cDNA_P Parameter: Temperature (deg C) Value: 42 vs. 22
  misc_feature: MA Experiment 20000113 PARAMETER Experiment Name: At_42deg_Heat_cDNA_P Parameter: Timepoint (hr) Value: 8
  misc_feature: MA Experiment 20000113 PARAMETER Experiment Name: At_42deg_Heat_cDNA_P Parameter: Tissue Value: Aerial
  misc_feature: MA Experiment ID: 20000144 Result: Up-regulated in Transcription
  misc_feature: MA Experiment 20000144 PARAMETER Experiment Name: At_42deg_Heat_cDNA_P Parameter: Temperature (deg C) Value: 42 vs. 22
  misc_feature: MA Experiment 20000144 PARAMETER Experiment Name: At_42deg_Heat_cDNA_P Parameter: Timepoint (hr) Value: 1
  misc_feature: MA Experiment 20000144 PARAMETER Experiment Name: At_42deg_Heat_cDNA_P Parameter: Tissue Value: Aerial
  misc_feature: MA Experiment ID: 20000171 Result: Up-regulated in Transcription
  misc_feature: MA Experiment 20000171 PARAMETER Experiment Name: At_42deg_Heat_P Parameter: Age (day) Value: 14
  misc_feature: MA Experiment 20000171 PARAMETER Experiment Name: At_42deg_Heat_P Parameter: Organism Value: A. thaliana
  misc_feature: MA Experiment 20000171 PARAMETER Experiment Name: At_42deg_Heat_P Parameter: Plant Line Value: WS
  misc_feature: MA Experiment 20000171 PARAMETER Experiment Name: At_42deg_Heat_P Parameter: Temperature (deg C) Value: 42 vs. 22
  misc_feature: MA Experiment 20000171 PARAMETER Experiment Name: At_42deg_Heat_P Parameter: Timepoint (hr) Value: 1
  misc_feature: MA Experiment 20000171 PARAMETER Experiment Name: At_42deg_Heat_P Parameter: Tissue Value: Aerial
  misc_feature: MA Experiment ID: 20000173 Result: Up-regulated in Transcription
  misc_feature: MA Experiment 20000173 PARAMETER Experiment Name: At_42deg_Heat_P Parameter: Age (day) Value: 14
  misc_feature: MA Experiment 20000173 PARAMETER Experiment Name: At_42deg_Heat_P Parameter: Organism Value: A. thaliana
  misc_feature: MA Experiment 20000173 PARAMETER Experiment Name: At_42deg_Heat_P Parameter: Plant Line Value: WS
  misc_feature: MA Experiment 20000173 PARAMETER Experiment Name: At_42deg_Heat_P Parameter: Temperature (deg C) Value: 42 vs. 22
  misc_feature: MA Experiment 20000173 PARAMETER Experiment Name: At_42deg_Heat_P Parameter: Timepoint (hr) Value: 6
  misc_feature: MA Experiment 20000173 PARAMETER Experiment Name: At_42deg_Heat_P Parameter: Tissue Value: Aerial
  misc_feature: Phenotype: WHOLE PLANT Color-Dark Green
  misc_feature: Phenotype: WHOLE PLANT Size-Small
  misc_feature: Phenotype: ROSETTE LEAVES Other
  misc_feature: Phenotype: WHOLE PLANT Size-Small
  misc_feature: Phenotype: WHOLE PLANT Size-Small
  misc_feature: Phenotype: WHOLE PLANT Size-Small
aaaatttccctatcaaagtgaatgactttcttctccaaaatcgatttctgaaacatcccatttcttgatttccctctttgtcgcaaacccaacaaagtagagcaaaaccctaaaacggaaaccttccatggcgattatctctgaggtagaagaagaaagcagtagcagccgacccatgatatttccctttaggggcaacactcagttctgcaaacccattagggtttttggagaaagttttcgactttctcggagaacagagcgattttctcaagaaaccctccgcggaggacgagatcgtcgtcgcggttagggcggcgaaggagaagttgaaaaaggctgagaagaagaaagctgagaaggagagtgtgaagcctgtggagaagaaagccgagaaggaaattgttaagcttgtggagaagaaggtagagaaggagagtgtcaagccaactatggctgcttcaagtgctgagcctatagaagtggagaagcctaaggacgaagaggagaagaaggaatctggtcccattgttcctaacaaaggtaatggaactgatcttgagaactactcatggatccagaatctccaggaggttacagttaacattccagtgcctactgggactaaagcacggactgttgtatgtgagattaagaaaaaccgtctcaaggttggtctcaaaggccaggatccaatcgtcgatggggagctctaccgatctgtgaagcctgatgactgctactggaatatcgaggatcaaaaggtgatttcgattctcttgactaagtctgatcagatggagtggtggaaatgctgtgtgaaaggtgaacctgaaatcgatactcagaaagttgaaccagagactagtaaattaggtgaccttgatccagaaactcgctcgactgttgagaaaatgatgtttgatcaaaggcaaaagcagatgggtcttccaacaagcgaggagctacagaagcaagagatccttaagaaattcatgtctgagcatccggagatggacttctcaaatgcaaagtttaactgatgctcgtatcgtccagtctctctgccaaaaaagaaaaaccagtttttgcatcttcaccagtttttaaaagcttgttacttttgtttagtttctcatttctgaatacatagttcggtttatgtccctagctttatgattctctggtttttattgaaactttttctgaaaaaaaaactgttttctcc

SEQ ID NO: 24321 - protein, 196 aa, Arabidopsis thaliana
  peptide (1)..(196): Ceres Seq. ID no. 12321496
  misc_feature (29)..(180): Pfam Name: Nuclear movement protein Pfam Description: Nuclear movement protein
  misc_feature (1)..(196): Homolog of NCBI NO: 12052969 NR Description: hypothetical protein [Homo sapiens]
  misc_feature (1)..(196): Homolog of NCBI NO: 21356395 NR Description: CG9710-PA [Drosophila melanogaster]
  misc_feature (1)..(196): Homolog of NCBI NO: 8101760 NR Description: putative nuclear movement protein PNUDC
  misc_feature (1)..(196): Homolog of NCBI NO: 5729953 NR Description: nuclear distribution gene C homolog (A. nidulans)
  misc_feature (1)..(196): Homolog of NCBI NO: 6754910 NR Description: nuclear distribution gene C homolog (Aspergillus)
  misc_feature (1)..(196): Homolog of NCBI NO: 8394272 NR Description: nuclear distribution gene C homolog [Rattus
  misc_feature (1)..(196): Homolog of NCBI NO: 30524691 NR Description: salt tolerance protein 5 [Beta vulgaris]
  misc_feature (1)..(196): Homolog of NCBI NO: 15234308 NR Description: putative protein; protein id: At4g27890.1
  misc_feature (1)..(196): Homolog of NCBI NO: 15238732 NR Description: putative protein
  misc_feature (1)..(196): Homolog of NCBI NO: 21593329 NR Description: unknown [Arabidopsis thaliana]
MAASSAEPIEVEKPKDEEEKKESGPIVPNKGNGTDLENYSWIQNLQEVTVNIPVPTGTKARTVVCEIKKNRLKVGLKGQDPIVDGELYRSVKPDDCYWNIEDQKVISILLTKSDQMEWWKCCVKGEPEIDTQKVEPETSKLGDLDPETRSTVEKMMFDQRQKQMGLPTSEELQKQEILKKFMSEHPEMDFSNAKFN

SEQ ID NO: 24322 - DNA, 1304 bp, Arabidopsis thaliana
  misc_feature (1)..(1304): Ceres Seq. ID no. 13575209
  misc_feature: MA Experiment ID: 108488 Result: Down-regulated in Transcription
  misc_feature: MA Experiment ID: 108573 Result: Up-regulated in Transcription
  misc_feature: MA Experiment 108573 PARAMETER Experiment Name: At_Drought_cDNA_P Parameter: Timepoint (hr) Value: 6
  misc_feature: MA Experiment 108573 PARAMETER Experiment Name: At_Drought_cDNA_P Parameter: Tissue Value: Aerial
  misc_feature: MA Experiment 108573 PARAMETER Experiment Name: At_Drought_cDNA_P Parameter: Treatment Value: Drought vs. No Drought
  misc_feature: MA Experiment ID: 108577 Result: Down-regulated in Transcription
  misc_feature: MA Experiment 108577 PARAMETER Experiment Name: At_42deg_Heat_cDNA_P Parameter: Temperature (deg C) Value: 42 vs. 22
  misc_feature: MA Experiment 108577 PARAMETER Experiment Name: At_42deg_Heat_cDNA_P Parameter: Timepoint (hr) Value: 6
  misc_feature: MA Experiment 108577 PARAMETER Experiment Name: At_42deg_Heat_cDNA_P Parameter: Tissue Value: Aerial
  misc_feature: MA Experiment ID: 108595 Result: Down-regulated in Transcription
  misc_feature: MA Experiment 108595 PARAMETER Experiment Name: At_Ler-pi_Ovule_cDNA_P Parameter: Plant Line Value: null
  misc_feature: MA Experiment ID: 108668 Result: Up-regulated in Transcription
  misc_feature: MA Experiment 108668 PARAMETER Experiment Name: At_2mM_SA_cDNA_P Parameter: Plant Line Value: WS
  misc_feature: MA Experiment 108668 PARAMETER Experiment Name: At_2mM_SA_cDNA_P Parameter: Timepoint (hr) Value: 6
  misc_feature: MA Experiment 108668 PARAMETER Experiment Name: At_2mM_SA_cDNA_P Parameter: Treatment Value: 2mM SA vs. No Treatment
  misc_feature: MA Experiment ID: 20000069 Result: Up-regulated in Transcription
  misc_feature: MA Experiment 20000069 PARAMETER Experiment Name: At_100uM_ABA_Mutants_cDNA_P Parameter: Plant Line Value: CS23
  misc_feature: MA Experiment 20000069 PARAMETER Experiment Name: At_100uM_ABA_Mutants_cDNA_P Parameter: Timepoint (hr) Value: 6
  misc_feature: MA Experiment 20000069 PARAMETER Experiment Name: At_100uM_ABA_Mutants_cDNA_P Parameter: Tissue Value: Aerial
  misc_feature: MA Experiment 20000069 PARAMETER Experiment Name: At_100uM_ABA_Mutants_cDNA_P Parameter: Treatment Value: 100uM ABA vs. No Treatment
  misc_feature: MA Experiment ID: 20000070 Result: Up-regulated in Transcription
  misc_feature: MA Experiment 20000070 PARAMETER Experiment Name: At_100uM_ABA_Mutants_cDNA_P Parameter: Plant Line Value: CS24
  misc_feature: MA Experiment 20000070 PARAMETER Experiment Name: At_100uM_ABA_Mutants_cDNA_P Parameter: Timepoint (hr) Value: 6
  misc_feature: MA Experiment 20000070 PARAMETER Experiment Name: At_100uM_ABA_Mutants_cDNA_P Parameter: Tissue Value: Aerial
  misc_feature: MA Experiment 20000070 PARAMETER Experiment Name: At_100uM_ABA_Mutants_cDNA_P Parameter: Treatment Value: 100uM ABA vs. No Treatment
  misc_feature: MA Experiment ID: 20000071 Result: Up-regulated in Transcription
  misc_feature: MA Experiment 20000071 PARAMETER Experiment Name: At_100uM_ABA_Mutants_cDNA_P Parameter: Plant Line Value: CS8104
  misc_feature: MA Experiment 20000071 PARAMETER Experiment Name: At_100uM_ABA_Mutants_cDNA_P Parameter: Timepoint (hr) Value: 6
  misc_feature: MA Experiment 20000071 PARAMETER Experiment Name: At_100uM_ABA_Mutants_cDNA_P Parameter: Tissue Value: Aerial
  misc_feature: MA Experiment 20000071 PARAMETER Experiment Name: At_100uM_ABA_Mutants_cDNA_P Parameter: Treatment Value: 100uM ABA vs. No Treatment
  misc_feature: MA Experiment ID: 20000088 Result: Up-regulated in Transcription
  misc_feature: MA Experiment 20000088 PARAMETER Experiment Name: At_100uM_ABA_Mutants_cDNA_P Parameter: Plant Line Value: Landsberg
  misc_feature: MA Experiment 20000088 PARAMETER Experiment Name: At_100uM_ABA_Mutants_cDNA_P Parameter: Timepoint (hr) Value: 6
  misc_feature: MA Experiment 20000088 PARAMETER Experiment Name: At_100uM_ABA_Mutants_cDNA_P Parameter: Tissue Value: Aerial
  misc_feature: MA Experiment 20000088 PARAMETER Experiment Name: At_100uM_ABA_Mutants_cDNA_P Parameter: Treatment Value: 100uM ABA vs. No Treatment
  misc_feature: MA Experiment ID: 20000111 Result: Down-regulated in Transcription
  misc_feature: MA Experiment 20000111 PARAMETER Experiment Name: At_42deg_Heat_cDNA_P Parameter: Temperature (deg C) Value: 42 vs. 22
  misc_feature: MA Experiment 20000111 PARAMETER Experiment Name: At_42deg_Heat_cDNA_P Parameter: Timepoint (hr) Value: 6
  misc_feature: MA Experiment 20000111 PARAMETER Experiment Name: At_42deg_Heat_cDNA_P Parameter: Tissue Value: Aerial
  misc_feature: MA Experiment ID: 20000113 Result: Down-regulated in Transcription
  misc_feature: MA Experiment 20000113 PARAMETER Experiment Name: At_42deg_Heat_cDNA_P Parameter: Temperature (deg C) Value: 42 vs. 22
  misc_feature: MA Experiment 20000113 PARAMETER Experiment Name: At_42deg_Heat_cDNA_P Parameter: Timepoint (hr) Value: 8
  misc_feature: MA Experiment 20000113 PARAMETER Experiment Name: At_42deg_Heat_cDNA_P Parameter: Tissue Value: Aerial
  misc_feature: MA Experiment ID: 20000117 Result: Up-regulated in Transcription
  misc_feature: MA Experiment 20000117 PARAMETER Experiment Name: At_100uM_ABA_Mutants_cDNA_P Parameter: Plant Line Value: Columbia
  misc_feature: MA Experiment 20000117 PARAMETER Experiment Name: At_100uM_ABA_Mutants_cDNA_P Parameter: Timepoint (hr) Value: 6
  misc_feature: MA Experiment 20000117 PARAMETER Experiment Name: At_100uM_ABA_Mutants_cDNA_P Parameter: Tissue Value: Aerial
  misc_feature: MA Experiment 20000117 PARAMETER Experiment Name: At_100uM_ABA_Mutants_cDNA_P Parameter: Treatment Value: 100uM ABA vs. No Treatment
  misc_feature: MA Experiment ID: 20000182 Result: Up-regulated in Transcription
  misc_feature: MA Experiment 20000182 PARAMETER Experiment Name: At_2mM_SA_P Parameter: Age (day) Value: 14
  misc_feature: MA Experiment 20000182 PARAMETER Experiment Name: At_2mM_SA_P Parameter: Organism Value: A. thaliana
  misc_feature: MA Experiment 20000182 PARAMETER Experiment Name: At_2mM_SA_P Parameter: Plant Line Value: WS
  misc_feature: MA Experiment 20000182 PARAMETER Experiment Name: At_2mM_SA_P Parameter: Timepoint (hr) Value: 6
  misc_feature: MA Experiment 20000182 PARAMETER Experiment Name: At_2mM_SA_P Parameter: Tissue Value: Aerial
  misc_feature: MA Experiment 20000182 PARAMETER Experiment Name: At_2mM_SA_P Parameter: Treatment Value: 2mM SA vs. No Treatment
  misc_feature: MA Experiment ID: 20000184 Result: Down-regulated in Transcription
  misc_feature: MA Experiment 20000184 PARAMETER Experiment Name: At_Shoots__P Parameter: Age (day) Value: 7
  misc_feature: MA Experiment 20000184 PARAMETER Experiment Name: At_Shoots__P Parameter: Tissue Value: Shoots vs. Whole Plant
  misc_feature: MA Experiment ID: 20000794 Result: Up-regulated in Transcription
  misc_feature: MA Experiment 20000794 PARAMETER Experiment Name: At_Petals_P Parameter: Age (day) Value: 23-25 days
  misc_feature: MA Experiment 20000794 PARAMETER Experiment Name: At_Petals_P Parameter: Plant Line Value: WS
  misc_feature: MA Experiment 20000794 PARAMETER Experiment Name: At_Petals_P Parameter: Tissue Value: Petals vs. Whole plant
  misc_feature: MA Experiment ID: 20001451 Result: Down-regulated in Transcription
  misc_feature: MA Experiment 20001451 PARAMETER Experiment Name: At_Far-red-induction_P Parameter: Age (day) Value: 7
  misc_feature: MA Experiment 20001451 PARAMETER Experiment Name: At_Far-red-induction_P Parameter: Light Value: Far-red vs. White
  misc_feature: MA Experiment 20001451 PARAMETER Experiment Name: At_Far-red-induction_P Parameter: Organism Value: A. thaliana
  misc_feature: MA Experiment 20001451 PARAMETER Experiment Name: At_Far-red-induction_P Parameter: Plant Line Value: Columbia
  misc_feature: MA Experiment 20001451 PARAMETER Experiment Name: At_Far-red-induction_P Parameter: Timepoint (hr) Value: 24
  misc_feature: MA Experiment 20001451 PARAMETER Experiment Name: At_Far-red-induction_P Parameter: Tissue Value: Whole Plant
aaaaggaagtatacgtttgtttctttgctctgaggtatcttcgtttgatacaaggcgaaatcgatcttcttcttcttcttcttcatccccttgcgttttccatctccatcgtctgctgaaaccatttgatcgatctctcaggttacttagaatggcacaagaagccgatgggatcagattggaccaaagacatgggaaggctcgagtgagagttggaagagtttggcgtcatgctcatgatggatctcatcactttgttgaatggaatgttagcatcagtcttctctctcactgtctctcttcttaccgtcttgatgataactctgatattgtcgccacagataccattaaaaacactgtttatgtgaaagccaaggaatgtggagatcggctctcggtggaggaatttgccatacttattgggaaacacttttgctcattttatccacaggtttttactgctatcgtgaatatcattgagaagccctgggagcgtgtctccatcgatggaaaaccacatttacatggttttaagcttgggtcagagaaccatactacagaggcaagagtagaaaagtctggtgcattaaacttaacttccggtattggaggactagctctactgaagacaacccagtcaggatttgagaggtttgtcagagacaaatacaccattctgcctgaaactcgtgagcgaatgctggccacagaggttaatgcatcttggaggtactcgtatgagtcagttgcaagcattccaacaaaaggactctactttagcgagaagttcatggacgttaagaaagttctgatggatactttctttggtccaccagaaactggtgtgtatagcccttctgtccaacgcactctctacctcatgggaagcgccgtactgaaaaggttcgctgatgtatcatcgattcacctaaaaatgccaaatattcattttctaccagtaaatctttcaacgaaggaaaacccttcaatggtgaagtttaaagatgatgtgtacctgccaaccgatgaacctcatggatctatagaagcaactctaagccgtataacctcgaaactatgaggttttaagacaatacatcatacatggaaatatcaaacacaatttcacaggttctgcaacttttggcgtttgcctcgtttatgaaataacaatttaaatgaagtgtgtaaggtcaacttttggcttttgttgcaagaataatactgtaactgcaaacagtttcacataaaaatgtagcttacatatattatcactgattcgcagtcatgttacatttttaccc

SEQ ID NO: 24323 - protein, 359 aa, Arabidopsis thaliana
  peptide (1)..(359): Ceres Seq. ID no. 13575210
  misc_feature (197)..(350): Pfam Name: Uricase Pfam Description: Uricase
  misc_feature (197)..(350): Pfam Name: Uricase Pfam Description: Uricase
  misc_feature (51)..(359): Homolog of NCBI NO: 549169 NR Description: Uricase II isozyme 1 (Urate oxidase) (Nodulin 35)
  misc_feature (51)..(359): Homolog of NCBI NO: 6175091 NR Description: Uricase II (Urate oxidase) (Nodule specific
  misc_feature (51)..(359): Homolog of NCBI NO: 4996848 NR Description: uricase (Nod-35) [Medicago sativa]
  misc_feature (51)..(359): Homolog of NCBI NO: 7242493 NR Description: urate oxidase [Cicer arietinum]
  misc_feature (51)..(359): Homolog of NCBI NO: 549169 NR Description: Uricase II isozyme 1 (Urate oxidase) (Nodulin 35)
  misc_feature (51)..(359): Homolog of NCBI NO: 4996848 NR Description: uricase (Nod-35) [Medicago sativa]
  misc_feature (51)..(359): Homolog of NCBI NO: 4996846 NR Description: uricase (Nod-35) [Medicago sativa]
  misc_feature (51)..(359): Homolog of NCBI NO: 6175090 NR Description: Uricase (Urate oxidase) (Nodulin 35 homolog)
  misc_feature (51)..(359): Homolog of NCBI NO: 15225267 NR Description: uricase subunit -related [Arabidopsis thaliana]
  misc_feature (51)..(359): Homolog of NCBI NO: 11414898 NR Description: uricase [Lotus japonicus]
  misc_feature (51)..(359): Homolog of NCBI NO: 7242493 NR Description: urate oxidase [Cicer arietinum]
  misc_feature (51)..(359): Homolog of NCBI NO: 6175091 NR Description: Uricase II (Urate oxidase) (Nodule specific
  misc_feature (51)..(359): Homolog of NCBI NO: 4996846 NR Description: uricase (Nod-35) [Medicago sativa]
  misc_feature (51)..(359): Homolog of NCBI NO: 11414898 NR Description: uricase [Lotus japonicus]
  misc_feature (51)..(359): Homolog of NCBI NO: 6175090 NR Description: Uricase (Urate oxidase) (Nodulin 35 homolog)
  misc_feature (51)..(359): Homolog of NCBI NO: 15225267 NR Description: uricase subunit -related [Arabidopsis thaliana]
KGSIRLFLCSEVSSFDTRRNRSSSSSSSSPCVFHLHRLLKPFDRSLRLLRMAQEADGIRLDQRHGKARVRVGRVWRHAHDGSHHFVEWNVSISLLSHCLSSYRLDDNSDIVATDTIKNTVYVKAKECGDRLSVEEFAILIGKHFCSFYPQVFTAIVNIIEKPWERVSIDGKPHLHGFKLGSENHTTEARVEKSGALNLTSGIGGLALLKTTQSGFERFVRDKYTILPETRERMLATEVNASWRYSYESVASIPTKGLYFSEKFMDVKKVLMDTFFGPPETGVYSPSVQRTLYLMGSAVLKRFADVSSIHLKMPNIHFLPVNLSTKENPSMVKFKDDVYLPTDEPHGSIEATLSRITSKL

SEQ ID NO: 24324 - protein, 309 aa, Arabidopsis thaliana
  peptide (1)..(309): Ceres Seq. ID no. 13575211
  misc_feature (147)..(300): Pfam Name: Uricase Pfam Description: Uricase
  misc_feature (147)..(300): Pfam Name: Uricase Pfam Description: Uricase
  misc_feature (1)..(309): Homolog of NCBI NO: 549169 NR Description: Uricase II isozyme 1 (Urate oxidase) (Nodulin 35)
  misc_feature (1)..(309): Homolog of NCBI NO: 6175091 NR Description: Uricase II (Urate oxidase) (Nodule specific
  misc_feature (1)..(309): Homolog of NCBI NO: 4996848 NR Description: uricase (Nod-35) [Medicago sativa]
  misc_feature (1)..(309): Homolog of NCBI NO: 7242493 NR Description: urate oxidase [Cicer arietinum]
  misc_feature (1)..(309): Homolog of NCBI NO: 549169 NR Description: Uricase II isozyme 1 (Urate oxidase) (Nodulin 35)
  misc_feature (1)..(309): Homolog of NCBI NO: 4996848 NR Description: uricase (Nod-35) [Medicago sativa]
  misc_feature (1)..(309): Homolog of NCBI NO: 4996846 NR Description: uricase (Nod-35) [Medicago sativa]
  misc_feature (1)..(309): Homolog of NCBI NO: 6175090 NR Description: Uricase (Urate oxidase) (Nodulin 35 homolog)
  misc_feature (1)..(309): Homolog of NCBI NO: 15225267 NR Description: uricase subunit -related [Arabidopsis thaliana]
  misc_feature (1)..(309): Homolog of NCBI NO: 11414898 NR Description: uricase [Lotus japonicus]
  misc_feature (1)..(309): Homolog of NCBI NO: 7242493 NR Description: urate oxidase [Cicer arietinum]
  misc_feature (1)..(309): Homolog of NCBI NO: 6175091 NR Description: Uricase II (Urate oxidase) (Nodule specific
  misc_feature (1)..(309): Homolog of NCBI NO: 4996846 NR Description: uricase (Nod-35) [Medicago sativa]
  misc_feature (1)..(309): Homolog of NCBI NO: 11414898 NR Description: uricase [Lotus japonicus]
  misc_feature (1)..(309): Homolog of NCBI NO: 6175090 NR Description: Uricase (Urate oxidase) (Nodulin 35 homolog)
  misc_feature (1)..(309): Homolog of NCBI NO: 15225267 NR Description: uricase subunit -related [Arabidopsis thaliana]
MAQEADGIRLDQRHGKARVRVGRVWRHAHDGSHHFVEWNVSISLLSHCLSSYRLDDNSDIVATDTIKNTVYVKAKECGDRLSVEEFAILIGKHFCSFYPQVFTAIVNIIEKPWERVSIDGKPHLHGFKLGSENHTTEARVEKSGALNLTSGIGGLALLKTTQSGFERFVRDKYTILPETRERMLATEVNASWRYSYESVASIPTKGLYFSEKFMDVKKVLMDTFFGPPETGVYSPSVQRTLYLMGSAVLKRFADVSSIHLKMPNIHFLPVNLSTKENPSMVKFKDDVYLPTDEPHGSIEATLSRITSKL

SEQ ID NO: 24325 - DNA, 1394 bp, Arabidopsis thaliana
  misc_feature (1)..(1394): Ceres Seq. ID no. 13494265
  misc_feature: MA Experiment ID: 20000173 Result: Down-regulated in Transcription
  misc_feature: MA Experiment 20000173 PARAMETER Experiment Name: At_42deg_Heat_P Parameter: Age (day) Value: 14
  misc_feature: MA Experiment 20000173 PARAMETER Experiment Name: At_42deg_Heat_P Parameter: Organism Value: A. thaliana
  misc_feature: MA Experiment 20000173 PARAMETER Experiment Name: At_42deg_Heat_P Parameter: Plant Line Value: WS
  misc_feature: MA Experiment 20000173 PARAMETER Experiment Name: At_42deg_Heat_P Parameter: Temperature (deg C) Value: 42 vs. 22
  misc_feature: MA Experiment 20000173 PARAMETER Experiment Name: At_42deg_Heat_P Parameter: Timepoint (hr) Value: 6
  misc_feature: MA Experiment 20000173 PARAMETER Experiment Name: At_42deg_Heat_P Parameter: Tissue Value: Aerial
  misc_feature: MA Experiment ID: 20000180 Result: Up-regulated in Transcription
  misc_feature: MA Experiment 20000180 PARAMETER Experiment Name: At_Germinating_Seeds_P Parameter: Age (hr) Value: 24 vs. 0
  misc_feature: MA Experiment 20000180 PARAMETER Experiment Name: At_Germinating_Seeds_P Parameter: Tissue Value: Germinating Seeds
  misc_feature: MA Experiment ID: 20000184 Result: Up-regulated in Transcription
  misc_feature: MA Experiment 20000184 PARAMETER Experiment Name: At_Shoots__P Parameter: Age (day) Value: 7
  misc_feature: MA Experiment 20000184 PARAMETER Experiment Name: At_Shoots__P Parameter: Tissue Value: Shoots vs. Whole Plant
  misc_feature: MA Experiment ID: 20000185 Result: Up-regulated in Transcription
  misc_feature: MA Experiment 20000185 PARAMETER Experiment Name: At_Roots__P Parameter: Age (day) Value: 7 vs. 21
  misc_feature: MA Experiment 20000185 PARAMETER Experiment Name: At_Roots__P Parameter: Organism Value: A. thaliana
  misc_feature: MA Experiment 20000185 PARAMETER Experiment Name: At_Roots__P Parameter: Tissue Value: Roots vs. Whole Plant
  misc_feature: MA Experiment ID: 20000211 Result: Up-regulated in Transcription
  misc_feature: MA Experiment 20000211 PARAMETER Experiment Name: At_0.001percent_MeJA__P Parameter: Age (day) Value: 14
  misc_feature: MA Experiment 20000211 PARAMETER Experiment Name: At_0.001percent_MeJA__P Parameter: Organism Value: A. thaliana
  misc_feature: MA Experiment 20000211 PARAMETER Experiment Name: At_0.001percent_MeJA__P Parameter: Plant Line Value: WS
  misc_feature: MA Experiment 20000211 PARAMETER Experiment Name: At_0.001percent_MeJA__P Parameter: Timepoint (hr) Value: 1
  misc_feature: MA Experiment 20000211 PARAMETER Experiment Name: At_0.001percent_MeJA__P Parameter: Tissue Value: Aerial
  misc_feature: MA Experiment 20000211 PARAMETER Experiment Name: At_0.001percent_MeJA__P Parameter: Treatment Value: 0.001percent MeJA vs. No Treatment
  misc_feature: MA Experiment ID: 20000227 Result: Down-regulated in Transcription
  misc_feature: MA Experiment 20000227 PARAMETER Experiment Name: At_Root-Tips-vs-Tops_P Parameter: Tissue Value: Root Tips vs. Root Tops
  misc_feature: MA Experiment ID: 20000264 Result: Up-regulated in Transcription
  misc_feature: MA Experiment 20000264 PARAMETER Experiment Name: At_Open_Flower_P Parameter: Age (day) Value: 21
  misc_feature: MA Experiment 20000264 PARAMETER Experiment Name: At_Open_Flower_P Parameter: Plant Line Value: WS
  misc_feature: MA Experiment 20000264 PARAMETER Experiment Name: At_Open_Flower_P Parameter: Tissue Value: Open Flower vs. Whole Plant
  misc_feature: MA Experiment ID: 20000265 Result: Up-regulated in Transcription
  misc_feature: MA Experiment 20000265 PARAMETER Experiment Name: At_Open_Flower_P Parameter: Age (day) Value: 21
  misc_feature: MA Experiment 20000265 PARAMETER Experiment Name: At_Open_Flower_P Parameter: Plant Line Value: WS
  misc_feature: MA Experiment 20000265 PARAMETER Experiment Name: At_Open_Flower_P Parameter: Tissue Value: Closed Flower vs. Whole Plant
  misc_feature: MA Experiment ID: 20000267 Result: Down-regulated in Transcription
  misc_feature: MA Experiment 20000267 PARAMETER Experiment Name: At_Drought_P Parameter: Age (day) Value: 7
  misc_feature: MA Experiment 20000267 PARAMETER Experiment Name: At_Drought_P Parameter: Organism Value: A. thaliana
  misc_feature: MA Experiment 20000267 PARAMETER Experiment Name: At_Drought_P Parameter: Plant Line Value: WS
  misc_feature: MA Experiment 20000267 PARAMETER Experiment Name: At_Drought_P Parameter: Timepoint (hr) Value: 6
  misc_feature: MA Experiment 20000267 PARAMETER Experiment Name: At_Drought_P Parameter: Tissue Value: Whole Plant
  misc_feature: MA Experiment 20000267 PARAMETER Experiment Name: At_Drought_P Parameter: Treatment Value: Drought vs. No Drought
  misc_feature: MA Experiment ID: 20000269 Result: Up-regulated in Transcription
  misc_feature: MA Experiment 20000269 PARAMETER Experiment Name: At_1mM_KNO3_L-vs-H_Roots_P Parameter: Age (day) Value: 7,10,12
  misc_feature: MA Experiment 20000269 PARAMETER Experiment Name: At_1mM_KNO3_L-vs-H_Roots_P Parameter: Organism Value: A. thaliana
  misc_feature: MA Experiment 20000269 PARAMETER Experiment Name: At_1mM_KNO3_L-vs-H_Roots_P Parameter: Plant Line Value: WS
  misc_feature: MA Experiment 20000269 PARAMETER Experiment Name: At_1mM_KNO3_L-vs-H_Roots_P Parameter: Timepoint (day) Value: 7,10,12
  misc_feature: MA Experiment 20000269 PARAMETER Experiment Name: At_1mM_KNO3_L-vs-H_Roots_P Parameter: Tissue Value: Roots
  misc_feature: MA Experiment 20000269 PARAMETER Experiment Name: At_1mM_KNO3_L-vs-H_Roots_P Parameter: Treatment Value: 1mM KNO3 vs. 50mM KNO3
  misc_feature: MA Experiment ID: 20000286 Result: Up-regulated in Transcription
  misc_feature: MA Experiment 20000286 PARAMETER Experiment Name: At_Open_Flower_P Parameter: Age (day) Value: 21
  misc_feature: MA Experiment 20000286 PARAMETER Experiment Name: At_Open_Flower_P Parameter: Plant Line Value: WS
  misc_feature: MA Experiment 20000286 PARAMETER Experiment Name: At_Open_Flower_P Parameter: Tissue Value: Half Open vs. Whole Plant
  misc_feature: MA Experiment ID: 20000437 Result: Down-regulated in Transcription
  misc_feature: MA Experiment 20000437 PARAMETER Experiment Name: At_Drought_P Parameter: Age (day) Value: 8
  misc_feature: MA Experiment 20000437 PARAMETER Experiment Name: At_Drought_P Parameter: Organism Value: A. thaliana
  misc_feature: MA Experiment 20000437 PARAMETER Experiment Name: At_Drought_P Parameter: Plant Line Value: WS
  misc_feature: MA Experiment 20000437 PARAMETER Experiment Name: At_Drought_P Parameter: Timepoint (hr) Value: 24
  misc_feature: MA Experiment 20000437 PARAMETER Experiment Name: At_Drought_P Parameter: Tissue Value: Whole Plant
  misc_feature: MA Experiment 20000437 PARAMETER Experiment Name: At_Drought_P Parameter: Treatment Value: Drought vs. No Drought
  misc_feature: MA Experiment ID: 20000438 Result: Up-regulated in Transcription
  misc_feature: MA Experiment 20000438 PARAMETER Experiment Name: At_Shoots__P Parameter: Age (day) Value: 14
  misc_feature: MA Experiment 20000438 PARAMETER Experiment Name: At_Shoots__P Parameter: Tissue Value: Shoots vs. Whole Plant
  misc_feature: MA Experiment ID: 20000439 Result: Up-regulated in Transcription
  misc_feature: MA Experiment 20000439 PARAMETER Experiment Name: At_Roots__P Parameter: Age (day) Value: 14 vs. 21
  misc_feature: MA Experiment 20000439 PARAMETER Experiment Name: At_Roots__P Parameter: Organism Value: A. thaliana
  misc_feature: MA Experiment 20000439 PARAMETER Experiment Name: At_Roots__P Parameter: Tissue Value: Roots vs. Whole Plant
  misc_feature: MA Experiment ID: 20000445 Result: Down-regulated in Transcription
  misc_feature: MA Experiment 20000445 PARAMETER Experiment Name: At_100uM_NAA__P Parameter: Age (day) Value: 14
  misc_feature: MA Experiment 20000445 PARAMETER Experiment Name: At_100uM_NAA__P Parameter: Organism Value: A. thaliana
  misc_feature: MA Experiment 20000445 PARAMETER Experiment Name: At_100uM_NAA__P Parameter: Plant Line Value: WS
  misc_feature: MA Experiment 20000445 PARAMETER Experiment Name: At_100uM_NAA__P Parameter: Timepoint (hr) Value: 6
  misc_feature: MA Experiment 20000445 PARAMETER Experiment Name: At_100uM_NAA__P Parameter: Tissue Value: Aerial
  misc_feature: MA Experiment 20000445 PARAMETER Experiment Name: At_100uM_NAA__P Parameter: Treatment Value: 100uM NAA vs. No Treatment
  misc_feature: MA Experiment ID: 20000451 Result: Down-regulated in Transcription
  misc_feature: MA Experiment 20000451 PARAMETER Experiment Name: At_CS6879_Shoots-Roots_P Parameter: Age (day) Value: 14
  misc_feature: MA Experiment 20000451 PARAMETER Experiment Name: At_CS6879_Shoots-Roots_P Parameter: Organism Value: A. thaliana
  misc_feature: MA Experiment 20000451 PARAMETER Experiment Name: At_CS6879_Shoots-Roots_P Parameter: Plant Line Value: CS6879 vs. WS
  misc_feature: MA Experiment 20000451 PARAMETER Experiment Name: At_CS6879_Shoots-Roots_P Parameter: Tissue Value: Roots
  misc_feature: MA Experiment ID: 20000460 Result: Down-regulated in Transcription
  misc_feature: MA Experiment 20000460 PARAMETER Experiment Name: At_10percent_PEG_P Parameter: Age (day) Value: 12
  misc_feature: MA Experiment 20000460 PARAMETER Experiment Name: At_10percent_PEG_P Parameter: Organism Value: A. thaliana
  misc_feature: MA Experiment 20000460 PARAMETER Experiment Name: At_10percent_PEG_P Parameter: Plant Line Value: WS
  misc_feature: MA Experiment 20000460 PARAMETER Experiment Name: At_10percent_PEG_P Parameter: Timepoint (day) Value: 12
  misc_feature: MA Experiment 20000460 PARAMETER Experiment Name: At_10percent_PEG_P Parameter: Tissue Value: Whole Plant
  misc_feature: MA Experiment 20000460 PARAMETER Experiment Name: At_10percent_PEG_P Parameter: Treatment Value: 10percent PEG vs. No Treatment
  misc_feature: MA Experiment ID: 20000495 Result: Up-regulated in Transcription
  misc_feature: MA Experiment 20000495 PARAMETER Experiment Name: At_Guard_Cells_P Parameter: Harvest Date Value: 8/2/2002
  misc_feature: MA Experiment 20000495 PARAMETER Experiment Name: At_Guard_Cells_P Parameter: Organism Value: A. thaliana
  misc_feature: MA Experiment 20000495 PARAMETER Experiment Name: At_Guard_Cells_P Parameter: Tissue Value: Guard Cells vs. Leaves
  misc_feature: MA Experiment ID: 20000527 Result: Down-regulated in Transcription
  misc_feature: MA Experiment 20000527 PARAMETER Experiment Name: At_10percent_PEG_P Parameter: Age (day) Value: 20
  misc_feature: MA Experiment 20000527 PARAMETER Experiment Name: At_10percent_PEG_P Parameter: Organism Value: A. thaliana
  misc_feature: MA Experiment 20000527 PARAMETER Experiment Name: At_10percent_PEG_P Parameter: Plant Line Value: WS
  misc_feature: MA Experiment 20000527 PARAMETER Experiment Name: At_10percent_PEG_P Parameter: Timepoint (day) Value: 20
  misc_feature: MA Experiment 20000527 PARAMETER Experiment Name: At_10percent_PEG_P Parameter: Tissue Value: Whole Plant
  misc_feature: MA Experiment 20000527 PARAMETER Experiment Name: At_10percent_PEG_P Parameter: Treatment Value: 10percent PEG vs. No Treatment
  misc_feature: MA Experiment ID: 20000575 Result: Down-regulated in Transcription
  misc_feature: MA Experiment 20000575 PARAMETER Experiment Name: At_100uM_ABA_Mutants__P Parameter: Organism Value: A. thaliana
  misc_feature: MA Experiment 20000575 PARAMETER Experiment Name: At_100uM_ABA_Mutants__P Parameter: Plant Line Value: CS22
  misc_feature: MA Experiment 20000575 PARAMETER Experiment Name: At_100uM_ABA_Mutants__P Parameter: Timepoint (hr) Value: 6
  misc_feature: MA Experiment 20000575 PARAMETER Experiment Name: At_100uM_ABA_Mutants__P Parameter: Tissue Value: Whole Plant
  misc_feature: MA Experiment 20000575 PARAMETER Experiment Name: At_100uM_ABA_Mutants__P Parameter: Treatment Value: 1uM ABA vs. No Treatment
  misc_feature: MA Experiment ID: 20000576 Result: Down-regulated in Transcription
  misc_feature: MA Experiment 20000576 PARAMETER Experiment Name: At_100uM_ABA_Mutants__P Parameter: Organism Value: A. thaliana
  misc_feature: MA Experiment 20000576 PARAMETER Experiment Name: At_100uM_ABA_Mutants__P Parameter: Plant Line Value: CS23
  misc_feature: MA Experiment 20000576 PARAMETER Experiment Name: At_100uM_ABA_Mutants__P Parameter: Timepoint (hr) Value: 6
  misc_feature: MA Experiment 20000576 PARAMETER Experiment Name: At_100uM_ABA_Mutants__P Parameter: Tissue Value: Whole Plant
  misc_feature: MA Experiment 20000576 PARAMETER Experiment Name: At_100uM_ABA_Mutants__P Parameter: Treatment Value: 1uM ABA vs. No Treatment
  misc_feature: MA Experiment ID: 20000794 Result: Down-regulated in Transcription
  misc_feature: MA Experiment 20000794 PARAMETER Experiment Name: At_Petals_P Parameter: Age (day) Value: 23-25 days
  misc_feature: MA Experiment 20000794 PARAMETER Experiment Name: At_Petals_P Parameter: Plant Line Value: WS
  misc_feature: MA Experiment 20000794 PARAMETER Experiment Name: At_Petals_P Parameter: Tissue Value: Petals vs. Whole plant
  misc_feature: MA Experiment ID: 20001555 Result: Down-regulated in Transcription
  misc_feature: MA Experiment 20001555 PARAMETER Experiment Name: At_Drought_Soil_Dry_P Parameter: Age (day) Value: 24
  misc_feature: MA Experiment 20001555 PARAMETER Experiment Name: At_Drought_Soil_Dry_P Parameter: Organism Value: A. thaliana
  misc_feature: MA Experiment 20001555 PARAMETER Experiment Name: At_Drought_Soil_Dry_P Parameter: Plant Line Value: WS
  misc_feature: MA Experiment 20001555 PARAMETER Experiment Name: At_Drought_Soil_Dry_P Parameter: Post Timepoint (hr) Value: None
  misc_feature: MA Experiment 20001555 PARAMETER Experiment Name: At_Drought_Soil_Dry_P Parameter: Post-Treatment Value: None
  misc_feature: MA Experiment 20001555 PARAMETER Experiment Name: At_Drought_Soil_Dry_P Parameter: Timepoint (day) Value: 10
  misc_feature: MA Experiment 20001555 PARAMETER Experiment Name: At_Drought_Soil_Dry_P Parameter: Treatment Value: Drought vs. No Drought
  misc_feature: MA Experiment ID: 20001556 Result: Down-regulated in Transcription
  misc_feature: MA Experiment 20001556 PARAMETER Experiment Name: At_Drought_Soil_Dry_P Parameter: Age (day) Value: 26
  misc_feature: MA Experiment 20001556 PARAMETER Experiment Name: At_Drought_Soil_Dry_P Parameter: Organism Value: A. thaliana
  misc_feature: MA Experiment 20001556 PARAMETER Experiment Name: At_Drought_Soil_Dry_P Parameter: Plant Line Value: WS
  misc_feature: MA Experiment 20001556 PARAMETER Experiment Name: At_Drought_Soil_Dry_P Parameter: Post Timepoint (hr) Value: None
  misc_feature: MA Experiment 20001556 PARAMETER Experiment Name: At_Drought_Soil_Dry_P Parameter: Post-Treatment Value: None
  misc_feature: MA Experiment 20001556 PARAMETER Experiment Name: At_Drought_Soil_Dry_P Parameter: Timepoint (day) Value: 12
  misc_feature: MA Experiment 20001556 PARAMETER Experiment Name: At_Drought_Soil_Dry_P Parameter: Treatment Value: Drought vs. No Drought
  misc_feature: MA Experiment ID: 20001557 Result: Down-regulated in Transcription
  misc_feature: MA Experiment 20001557 PARAMETER Experiment Name: At_Drought_Soil_Dry_P Parameter: Age (day) Value: 27
  misc_feature: MA Experiment 20001557 PARAMETER Experiment Name: At_Drought_Soil_Dry_P Parameter: Organism Value: A. thaliana
  misc_feature: MA Experiment 20001557 PARAMETER Experiment Name: At_Drought_Soil_Dry_P Parameter: Plant Line Value: WS
  misc_feature: MA Experiment 20001557 PARAMETER Experiment Name: At_Drought_Soil_Dry_P Parameter: Post Timepoint (hr) Value: 3
  misc_feature: MA Experiment 20001557 PARAMETER Experiment Name: At_Drought_Soil_Dry_P Parameter: Post-Treatment Value: Re-Water vs. No Drought
  misc_feature: MA Experiment 20001557 PARAMETER Experiment Name: At_Drought_Soil_Dry_P Parameter: Timepoint (day) Value: 13
  misc_feature: MA Experiment 20001557 PARAMETER Experiment Name: At_Drought_Soil_Dry_P Parameter: Treatment Value: Drought vs. No Drought
  misc_feature: MA Experiment ID: 20001558 Result: Down-regulated in Transcription
  misc_feature: MA Experiment 20001558 PARAMETER Experiment Name: At_Drought_Soil_Dry_P Parameter: Age (day) Value: 27
  misc_feature: MA Experiment 20001558 PARAMETER Experiment Name: At_Drought_Soil_Dry_P Parameter: Organism Value: A. thaliana
  misc_feature: MA Experiment 20001558 PARAMETER Experiment Name: At_Drought_Soil_Dry_P Parameter: Plant Line Value: WS
  misc_feature: MA Experiment 20001558 PARAMETER Experiment Name: At_Drought_Soil_Dry_P Parameter: Post Timepoint (hr) Value: 6
  misc_feature: MA Experiment 20001558 PARAMETER Experiment Name: At_Drought_Soil_Dry_P Parameter: Post-Treatment Value: Re-Water vs. No Drought
  misc_feature: MA Experiment 20001558 PARAMETER Experiment Name: At_Drought_Soil_Dry_P Parameter: Timepoint (day) Value: 13
  misc_feature: MA Experiment 20001558 PARAMETER Experiment Name: At_Drought_Soil_Dry_P Parameter: Treatment Value: Drought vs. No Drought
  misc_feature: MA Experiment ID: 20001559 Result: Down-regulated in Transcription
  misc_feature: MA Experiment 20001559 PARAMETER Experiment Name: At_Drought_Soil_Dry_P Parameter: Age (day) Value: 28
  misc_feature: MA Experiment 20001559 PARAMETER Experiment Name: At_Drought_Soil_Dry_P Parameter: Organism Value: A. thaliana
  misc_feature: MA Experiment 20001559 PARAMETER Experiment Name: At_Drought_Soil_Dry_P Parameter: Plant Line Value: WS
  misc_feature: MA Experiment 20001559 PARAMETER Experiment Name: At_Drought_Soil_Dry_P Parameter: Post Timepoint (hr) Value: 29
  misc_feature: MA Experiment 20001559 PARAMETER Experiment Name: At_Drought_Soil_Dry_P Parameter: Post-Treatment Value: Re-Water vs. No Drought
  misc_feature: MA Experiment 20001559 PARAMETER Experiment Name: At_Drought_Soil_Dry_P Parameter: Timepoint (day) Value: 14
  misc_feature: MA Experiment 20001559 PARAMETER Experiment Name: At_Drought_Soil_Dry_P Parameter: Treatment Value: Drought vs. No Drought
  misc_feature: MA Experiment ID: 20001768 Result: Down-regulated in Transcription
  misc_feature: MA Experiment 20001768 PARAMETER Experiment Name: At_Far-red-enriched-adult_P Parameter: Age (day) Value: 28
  misc_feature: MA Experiment 20001768 PARAMETER Experiment Name: At_Far-red-enriched-adult_P Parameter: Light Value: Far-red enriched vs. White
  misc_feature: MA Experiment 20001768 PARAMETER Experiment Name: At_Far-red-enriched-adult_P Parameter: Organism Value: A. thaliana
  misc_feature: MA Experiment 20001768 PARAMETER Experiment Name: At_Far-red-enriched-adult_P Parameter: Plant Line Value: Columbia
  misc_feature: MA Experiment 20001768 PARAMETER Experiment Name: At_Far-red-enriched-adult_P Parameter: Timepoint (hr) Value: 1
  misc_feature: MA Experiment 20001768 PARAMETER Experiment Name: At_Far-red-enriched-adult_P Parameter: Tissue Value: Aerial
  misc_feature: MA Experiment ID: 20001904 Result: Down-regulated in Transcription
  misc_feature: MA Experiment 20001904 PARAMETER Experiment Name: At_Drought_Reproduction_P Parameter: Age (day) Value: 37
  misc_feature: MA Experiment 20001904 PARAMETER Experiment Name: At_Drought_Reproduction_P Parameter: Organism Value: A. thaliana
  misc_feature: MA Experiment 20001904 PARAMETER Experiment Name: At_Drought_Reproduction_P Parameter: Plant Line Value: WS
  misc_feature: MA Experiment 20001904 PARAMETER Experiment Name: At_Drought_Reproduction_P Parameter: Timepoint (day) Value: 7
  misc_feature: MA Experiment 20001904 PARAMETER Experiment Name: At_Drought_Reproduction_P Parameter: Tissue Value: Rosettes
  misc_feature: MA Experiment 20001904 PARAMETER Experiment Name: At_Drought_Reproduction_P Parameter: Treatment Value: Drought vs. No Drought
  misc_feature: MA Experiment ID: 20001906 Result: Up-regulated in Transcription
  misc_feature: MA Experiment 20001906 PARAMETER Experiment Name: At_Drought_Reproduction_P Parameter: Age (day) Value: 35
  misc_feature: MA Experiment 20001906 PARAMETER Experiment Name: At_Drought_Reproduction_P Parameter: Organism Value: A. thaliana
  misc_feature: MA Experiment 20001906 PARAMETER Experiment Name: At_Drought_Reproduction_P Parameter: Plant Line Value: WS
  misc_feature: MA Experiment 20001906 PARAMETER Experiment Name: At_Drought_Reproduction_P Parameter: Timepoint (day) Value: 5
  misc_feature: MA Experiment 20001906 PARAMETER Experiment Name: At_Drought_Reproduction_P Parameter: Tissue Value: Siliques
  misc_feature: MA Experiment 20001906 PARAMETER Experiment Name: At_Drought_Reproduction_P Parameter: Treatment Value: Drought vs. No Drought
  misc_feature: MA Experiment ID: 20001908 Result: Up-regulated in Transcription
  misc_feature: MA Experiment 20001908 PARAMETER Experiment Name: At_Drought_Reproduction_P Parameter: Age (day) Value: 40
  misc_feature: MA Experiment 20001908 PARAMETER Experiment Name: At_Drought_Reproduction_P Parameter: Organism Value: A. thaliana
  misc_feature: MA Experiment 20001908 PARAMETER Experiment Name: At_Drought_Reproduction_P Parameter: Plant Line Value: WS
  misc_feature: MA Experiment 20001908 PARAMETER Experiment Name: At_Drought_Reproduction_P Parameter: Timepoint (day) Value: 10
  misc_feature: MA Experiment 20001908 PARAMETER Experiment Name: At_Drought_Reproduction_P Parameter: Tissue Value: Siliques
  misc_feature: MA Experiment 20001908 PARAMETER Experiment Name: At_Drought_Reproduction_P Parameter: Treatment Value: Drought vs. No Drought
  misc_feature: MA Experiment ID: 20001911 Result: Down-regulated in Transcription
  misc_feature: MA Experiment 20001911 PARAMETER Experiment Name: At_Drought_Reproduction_P Parameter: Age (day) Value: 40
  misc_feature: MA Experiment 20001911 PARAMETER Experiment Name: At_Drought_Reproduction_P Parameter: Organism Value: A. thaliana
  misc_feature: MA Experiment 20001911 PARAMETER Experiment Name: At_Drought_Reproduction_P Parameter: Plant Line Value: WS
  misc_feature: MA Experiment 20001911 PARAMETER Experiment Name: At_Drought_Reproduction_P Parameter: Timepoint (day) Value: 10
  misc_feature: MA Experiment 20001911 PARAMETER Experiment Name: At_Drought_Reproduction_P Parameter: Tissue Value: Flowers
  misc_feature: MA Experiment 20001911 PARAMETER Experiment Name: At_Drought_Reproduction_P Parameter: Treatment Value: Drought vs. No Drought
acataacacaaaatcctcttctcttctttaataacttttagaaacacaaataaaagtttaattacttttaagcccaacaaaaatgggttatgctaaatcagccatgctgatcttcttactagcattggtcatcgcatcttgtgccacggccatggacatgtccgttgtttcctccaacgataaccaccacgtgaccgccggtcccggccgccgtcagggtattttcgacgctgaagccaccttgatgttcgagtcatggatggtcaaacatgggaaagtgtacgactccgttgccgagaaggaacggcgtttaactatttttgaggacaacctccgttttatcactaaccggaacgctgagaatctcagttaccggcttggtttgaatcggtttgcggatttatctctccatgaatacggagaaatttgccatggggctgatccaagacctcctaggaaccacgtcttcatgactagcagcaaccgatacaagactagtgatggtgatgttcttcctaagtccgttgactggagaaacgaaggcgcagtgactgaagtcaaagatcaaggcctttgcaggagttgttgggctttctccactgtgggagcagtggaaggcttaaacaagattgtgactggagagctagtaactttgtctgagcaagatttgatcaattgtaacaaagaaaacaatggttgcggaggaggcaaagtcgagacagcctatgagttcatcatgaacaatggtggtcttggtaccgacaacgattatccttacaaagctctcaatggagtctgcgaaggccgcctcaaggaagacaacaagaatgttatgattgatgggtatgagaatttgcctgcaaacgatgaagccgctctcatgaaagcggttgctcaccagcctgtgactgccgttgtcgattccagcagccgagagtttcagctttatgaatcgggagtgtttgacggaacttgcggaacaaacctaaaccatggtgttgttgtggtcgggtatggaaccgagaatggtcgtgactactggattgtgaaaaactcgaggggcgacacatggggggaggctggctacatgaagatggctcgcaacattgccaatccaagaggcctatgtggcatcgcaatgcgagcttcataccctctcaagaactcgttttctacggataaagtttcggttgcctaataatatgaactaaatgtatgccatggaacggatcggttaagccattatcgttattcgactttgaaggaaactaaaaaataatgtggtcgattggtttggttttgttatatattatgcatttgtatgggggtcagtcaatgtttgaactttgtataatatttctttgggtctagtgataaatattttcccttttgct

SEQ ID NO: 24326 - protein, 371 aa, Arabidopsis thaliana
  peptide (1)..(371): Ceres Seq. ID no. 13494266
  misc_feature (144)..(359): Pfam Name: Papain family cysteine protease Pfam Description: Papain family cysteine protease
  misc_feature (7)..(361): Homolog of NCBI NO: 30141019 NR Description: cysteine protease-1 [Helianthus annuus]
  misc_feature (1)..(364): Homolog of NCBI NO: 18416165 NR Description: cysteine proteinase [Arabidopsis thaliana]
  misc_feature (1)..(360): Homolog of NCBI NO: 18141283 NR Description: senescence-associated cysteine protease [Brassica
  misc_feature (1)..(361): Homolog of NCBI NO: 18401614 NR Description: cysteine proteinase RD21A [Arabidopsis thaliana]
  misc_feature (1)..(361): Homolog of NCBI NO: 14517542 NR Description: F2G19.31/F2G19.31 [Arabidopsis thaliana]
  misc_feature (1)..(361): Homolog of NCBI NO: 18141285 NR Description: senescence-associated cysteine protease [Brassica
  misc_feature (1)..(360): Homolog of NCBI NO: 18422289 NR Description: cysteine proteinase RD21A [Arabidopsis thaliana]
  misc_feature (8)..(371): Homolog of NCBI NO: 20260334 NR Description: drought-inducible cysteine proteinase RD21A
  misc_feature (1)..(371): Homolog of NCBI NO: 18413505 NR Description: cysteine proteinase [Arabidopsis thaliana]
  misc_feature (1)..(371): Homolog of NCBI NO: 18413507 NR Description: cysteine proteinase [Arabidopsis thaliana]
MGYAKSAMLIFLLALVIASCATAMDMSVVSSNDNHHVTAGPGRRQGIFDAEATLMFESWMVKHGKVYDSVAEKERRLTIFEDNLRFITNRNAENLSYRLGLNRFADLSLHEYGEICHGADPRPPRNHVFMTSSNRYKTSDGDVLPKSVDWRNEGAVTEVKDQGLCRSCWAFSTVGAVEGLNKIVTGELVTLSEQDLINCNKENNGCGGGKVETAYEFIMNNGGLGTDNDYPYKALNGVCEGRLKEDNKNVMIDGYENLPANDEAALMKAVAHQPVTAVVDSSSREFQLYESGVFDGTCGTNLNHGVVVVGYGTENGRDYWIVKNSRGDTWGEAGYMKMARNIANPRGLCGIAMRASYPLKNSFSTDKVSVA

SEQ ID NO: 24327 - protein, 364 aa, Arabidopsis thaliana
  peptide (1)..(364): Ceres Seq. ID no. 13494267
  misc_feature (137)..(352): Pfam Name: Papain family cysteine protease Pfam Description: Papain family cysteine protease
  misc_feature (1)..(354): Homolog of NCBI NO: 30141019 NR Description: cysteine protease-1 [Helianthus annuus]
  misc_feature (1)..(357): Homolog of NCBI NO: 18416165 NR Description: cysteine proteinase [Arabidopsis thaliana]
  misc_feature (1)..(353): Homolog of NCBI NO: 18141283 NR Description: senescence-associated cysteine protease [Brassica
  misc_feature (1)..(354): Homolog of NCBI NO: 18401614 NR Description: cysteine proteinase RD21A [Arabidopsis thaliana]
  misc_feature (1)..(354): Homolog of NCBI NO: 14517542 NR Description: F2G19.31/F2G19.31 [Arabidopsis thaliana]
  misc_feature (1)..(354): Homolog of NCBI NO: 18141285 NR Description: senescence-associated cysteine protease [Brassica
  misc_feature (1)..(353): Homolog of NCBI NO: 18422289 NR Description: cysteine proteinase RD21A [Arabidopsis thaliana]
  misc_feature (1)..(364): Homolog of NCBI NO: 20260334 NR Description: drought-inducible cysteine proteinase RD21A
  misc_feature (1)..(364): Homolog of NCBI NO: 18413505 NR Description: cysteine proteinase [Arabidopsis thaliana]
  misc_feature (1)..(364): Homolog of NCBI NO: 18413507 NR Description: cysteine proteinase [Arabidopsis thaliana]
MLIFLLALVIASCATAMDMSVVSSNDNHHVTAGPGRRQGIFDAEATLMFESWMVKHGKVYDSVAEKERRLTIFEDNLRFITNRNAENLSYRLGLNRFADLSLHEYGEICHGADPRPPRNHVFMTSSNRYKTSDGDVLPKSVDWRNEGAVTEVKDQGLCRSCWAFSTVGAVEGLNKIVTGELVTLSEQDLINCNKENNGCGGGKVETAYEFIMNNGGLGTDNDYPYKALNGVCEGRLKEDNKNVMIDGYENLPANDEAALMKAVAHQPVTAVVDSSSREFQLYESGVFDGTCGTNLNHGVVVVGYGTENGRDYWIVKNSRGDTWGEAGYMKMARNIANPRGLCGIAMRASYPLKNSFSTDKVSVA

SEQ ID NO: 24328 - protein, 348 aa, Arabidopsis thaliana
  peptide (1)..(348): Ceres Seq. ID no. 13494268
  misc_feature (121)..(336): Pfam Name: Papain family cysteine protease Pfam Description: Papain family cysteine protease
  misc_feature (1)..(338): Homolog of NCBI NO: 30141019 NR Description: cysteine protease-1 [Helianthus annuus]
  misc_feature (1)..(341): Homolog of NCBI NO: 18416165 NR Description: cysteine proteinase [Arabidopsis thaliana]
  misc_feature (1)..(337): Homolog of NCBI NO: 18141283 NR Description: senescence-associated cysteine protease [Brassica
  misc_feature (1)..(338): Homolog of NCBI NO: 18401614 NR Description: cysteine proteinase RD21A [Arabidopsis thaliana]
  misc_feature (1)..(338): Homolog of NCBI NO: 14517542 NR Description: F2G19.31/F2G19.31 [Arabidopsis thaliana]
  misc_feature (1)..(338): Homolog of NCBI NO: 18141285 NR Description: senescence-associated cysteine protease [Brassica
  misc_feature (1)..(337): Homolog of NCBI NO: 18422289 NR Description: cysteine proteinase RD21A [Arabidopsis thaliana]
  misc_feature (1)..(348): Homolog of NCBI NO: 20260334 NR Description: drought-inducible cysteine proteinase RD21A
  misc_feature (1)..(348): Homolog of NCBI NO: 18413505 NR Description: cysteine proteinase [Arabidopsis thaliana]
  misc_feature (1)..(348): Homolog of NCBI NO: 18413507 NR Description: cysteine proteinase [Arabidopsis thaliana]
MDMSVVSSNDNHHVTAGPGRRQGIFDAEATLMFESWMVKHGKVYDSVAEKERRLTIFEDNLRFITNRNAENLSYRLGLNRFADLSLHEYGEICHGADPRPPRNHVFMTSSNRYKTSDGDVLPKSVDWRNEGAVTEVKDQGLCRSCWAFSTVGAVEGLNKIVTGELVTLSEQDLINCNKENNGCGGGKVETAYEFIMNNGGLGTDNDYPYKALNGVCEGRLKEDNKNVMIDGYENLPANDEAALMKAVAHQPVTAVVDSSSREFQLYESGVFDGTCGTNLNHGVVVVGYGTENGRDYWIVKNSRGDTWGEAGYMKMARNIANPRGLCGIAMRASYPLKNSFSTDKVSVA

SEQ ID NO: 24329 - DNA, 1156 bp, Arabidopsis thaliana
  misc_feature (1)..(1156): Ceres Seq. ID no. 12384851
  misc_feature: MA Experiment ID: 20000180 Result: Up-regulated in Transcription
  misc_feature: MA Experiment 20000180 PARAMETER Experiment Name: At_Germinating_Seeds_P Parameter: Age (hr) Value: 24 vs. 0
  misc_feature: MA Experiment 20000180 PARAMETER Experiment Name: At_Germinating_Seeds_P Parameter: Tissue Value: Germinating Seeds
  misc_feature: MA Experiment ID: 20000185 Result: Down-regulated in Transcription
  misc_feature: MA Experiment 20000185 PARAMETER Experiment Name: At_Roots__P Parameter: Age (day) Value: 7 vs. 21
  misc_feature: MA Experiment 20000185 PARAMETER Experiment Name: At_Roots__P Parameter: Organism Value: A. thaliana
  misc_feature: MA Experiment 20000185 PARAMETER Experiment Name: At_Roots__P Parameter: Tissue Value: Roots vs. Whole Plant
  misc_feature: MA Experiment ID: 20000234 Result: Up-regulated in Transcription
  misc_feature: MA Experiment 20000234 PARAMETER Experiment Name: At_Siliques_P Parameter: Age (day) Value: 21
  misc_feature: MA Experiment 20000234 PARAMETER Experiment Name: At_Siliques_P Parameter: Organism Value: A. thaliana
  misc_feature: MA Experiment 20000234 PARAMETER Experiment Name: At_Siliques_P Parameter: Plant Line Value: WS
  misc_feature: MA Experiment 20000234 PARAMETER Experiment Name: At_Siliques_P Parameter: Tissue Value: Less Than 5mm Siliques vs. Whole Plant
  misc_feature: MA Experiment ID: 20000265 Result: Up-regulated in Transcription
  misc_feature: MA Experiment 20000265 PARAMETER Experiment Name: At_Open_Flower_P Parameter: Age (day) Value: 21
  misc_feature: MA Experiment 20000265 PARAMETER Experiment Name: At_Open_Flower_P Parameter: Plant Line Value: WS
  misc_feature: MA Experiment 20000265 PARAMETER Experiment Name: At_Open_Flower_P Parameter: Tissue Value: Closed Flower vs. Whole Plant
  misc_feature: MA Experiment ID: 20000286 Result: Up-regulated in Transcription
  misc_feature: MA Experiment 20000286 PARAMETER Experiment Name: At_Open_Flower_P Parameter: Age (day) Value: 21
  misc_feature: MA Experiment 20000286 PARAMETER Experiment Name: At_Open_Flower_P Parameter: Plant Line Value: WS
  misc_feature: MA Experiment 20000286 PARAMETER Experiment Name: At_Open_Flower_P Parameter: Tissue Value: Half Open vs. Whole Plant
  misc_feature: MA Experiment ID: 20000437 Result: Down-regulated in Transcription
  misc_feature: MA Experiment 20000437 PARAMETER Experiment Name: At_Drought_P Parameter: Age (day) Value: 8
  misc_feature: MA Experiment 20000437 PARAMETER Experiment Name: At_Drought_P Parameter: Organism Value: A. thaliana
  misc_feature: MA Experiment 20000437 PARAMETER Experiment Name: At_Drought_P Parameter: Plant Line Value: WS
  misc_feature: MA Experiment 20000437 PARAMETER Experiment Name: At_Drought_P Parameter: Timepoint (hr) Value: 24
  misc_feature: MA Experiment 20000437 PARAMETER Experiment Name: At_Drought_P Parameter: Tissue Value: Whole Plant
  misc_feature: MA Experiment 20000437 PARAMETER Experiment Name: At_Drought_P Parameter: Treatment Value: Drought vs. No Drought
  misc_feature: MA Experiment ID: 20000439 Result: Down-regulated in Transcription
  misc_feature: MA Experiment 20000439 PARAMETER Experiment Name: At_Roots__P Parameter: Age (day) Value: 14 vs. 21
  misc_feature: MA Experiment 20000439 PARAMETER Experiment Name: At_Roots__P Parameter: Organism Value: A. thaliana
  misc_feature: MA Experiment 20000439 PARAMETER Experiment Name: At_Roots__P Parameter: Tissue Value: Roots vs. Whole Plant
  misc_feature: MA Experiment ID: 20000495 Result: Up-regulated in Transcription
  misc_feature: MA Experiment 20000495 PARAMETER Experiment Name: At_Guard_Cells_P Parameter: Harvest Date Value: 8/2/2002
  misc_feature: MA Experiment 20000495 PARAMETER Experiment Name: At_Guard_Cells_P Parameter: Organism Value: A. thaliana
  misc_feature: MA Experiment 20000495 PARAMETER Experiment Name: At_Guard_Cells_P Parameter: Tissue Value: Guard Cells vs. Leaves
  misc_feature: MA Experiment ID: 20001248 Result: Down-regulated in Transcription
  misc_feature: MA Experiment 20001248 PARAMETER Experiment Name: At_Far-red-induction_P Parameter: Age (day) Value: 7
  misc_feature: MA Experiment 20001248 PARAMETER Experiment Name: At_Far-red-induction_P Parameter: Light Value: Far-red vs. White
  misc_feature: MA Experiment 20001248 PARAMETER Experiment Name: At_Far-red-induction_P Parameter: Organism Value: A. thaliana
  misc_feature: MA Experiment 20001248 PARAMETER Experiment Name: At_Far-red-induction_P Parameter: Plant Line Value: Columbia
  misc_feature: MA Experiment 20001248 PARAMETER Experiment Name: At_Far-red-induction_P Parameter: Timepoint (hr) Value: 4
  misc_feature: MA Experiment 20001248 PARAMETER Experiment Name: At_Far-red-induction_P Parameter: Tissue Value: Whole Plant
  misc_feature: MA Experiment ID: 20001555 Result: Down-regulated in Transcription
  misc_feature: MA Experiment 20001555 PARAMETER Experiment Name: At_Drought_Soil_Dry_P Parameter: Age (day) Value: 24
  misc_feature: MA Experiment 20001555 PARAMETER Experiment Name: At_Drought_Soil_Dry_P Parameter: Organism Value: A. thaliana
  misc_feature: MA Experiment 20001555 PARAMETER Experiment Name: At_Drought_Soil_Dry_P Parameter: Plant Line Value: WS
  misc_feature: MA Experiment 20001555 PARAMETER Experiment Name: At_Drought_Soil_Dry_P Parameter: Post Timepoint (hr) Value: None
  misc_feature: MA Experiment 20001555 PARAMETER Experiment Name: At_Drought_Soil_Dry_P Parameter: Post-Treatment Value: None
  misc_feature: MA Experiment 20001555 PARAMETER Experiment Name: At_Drought_Soil_Dry_P Parameter: Timepoint (day) Value: 10
  misc_feature: MA Experiment 20001555 PARAMETER Experiment Name: At_Drought_Soil_Dry_P Parameter: Treatment Value: Drought vs. No Drought
acatcttaaaaagtaaaaacacattcatctatccaacaaaaaaaaaaaaaaaaaggagaaatggaaggaatcgatcatagaatggtgagtgtcaatggcataactatgcacattgccgagaaaggtcccaaagaaggacctgtggtgcttctcctccatggattccctgatctctggtacacgtggcgtcaccagattagtgggttatcatctctaggttaccgcgctgtagctccagacctccgaggctacggagactctgattcgccagagtctttctccgagtacacgtgtcttaacgtcgttggggacctcgtagctcttctggacagtgttgctggaaatcaagagaaggtgtttctggtcggtcatgattggggagccattatcggatggtttctctgtttgtttcgacctgaaaagattaacggctttgtgtgtttgagtgtgccgtatagatcaagaaaccctaaagtcaagcccgttcaagggttcaaggctgtatttggagatgattactacatttgtagatttcaggaaccggggaagattgaaggagagattgcaagtgcagatccaagaatatttctgaggaacctcttcacagggaggacactcggtccgccgattttacctaaggataatccctttggggaaaaacctaaccctaatagcgaaaacattgaattgcctgaatggttttctaagaaagatctcgatttctatgtctccaaattcgagaaggcaggatttaccggtggattgaactactacagagccatggatctgaattgggagctcactgcaccatggaccggagctaagattcaagttccagtgaagttcatgacaggtgacttcgacatggtttacaccacaccagggatgaaagagtacattcacggtggtggatttgctgcagatgttccaactcttcaagagatagtggtgattgaagatgctggtcacttcgttaaccaagagaaacctcaagaggtcactgctcacatcaatgacttcttcaccaagcttcgggacaacaacaaaagcttttagagttctcgtttggttctattatgttggctctcaaaacaagttggttcttgcatgtgttgtttcgacaagattttgaataagacttggcattatgaagccc

SEQ ID NO: 24330 - protein, 331 aa, Arabidopsis thaliana; identical to SEQ ID NO: 21476
  peptide (1)..(331): Ceres Seq. ID no. 12384852
  misc_feature (54)..(319): Pfam Name: alpha/beta hydrolase fold Pfam Description: alpha/beta hydrolase fold
  misc_feature (1)..(331): Homolog of NCBI NO: 15230018 NR Description: putative epoxide hydrolase

SEQ ID NO: 24331 - protein, 324 aa, Arabidopsis thaliana; identical to SEQ ID NO: 21477
  peptide (1)..(324): Ceres Seq. ID no. 12384853
  misc_feature (47)..(312): Pfam Name: alpha/beta hydrolase fold Pfam Description: alpha/beta hydrolase fold
  misc_feature (1)..(324): Homolog of NCBI NO: 15230018 NR Description: putative epoxide hydrolase

SEQ ID NO: 24332 - protein, 316 aa, Arabidopsis thaliana; identical to SEQ ID NO: 21478
  peptide (1)..(316): Ceres Seq. ID no. 12384854
  misc_feature (39)..(304): Pfam Name: alpha/beta hydrolase fold Pfam Description: alpha/beta hydrolase fold
  misc_feature (1)..(316): Homolog of NCBI NO: 15230018 NR Description: putative epoxide hydrolase

SEQ ID NO: 24333 - DNA, 1406 bp, Arabidopsis thaliana
  misc_feature (1)..(1406): Ceres Seq. ID no. 12371799
  misc_feature: MA Experiment ID: 108434 Result: Down-regulated in Transcription
  misc_feature: MA Experiment 108434 PARAMETER Experiment Name: At_Root_Tips_cDNA_P Parameter: Tissue Value: Root Tips
  misc_feature: MA Experiment ID: 108469 Result: Up-regulated in Transcription
  misc_feature: MA Experiment ID: 108585 Result: Up-regulated in Transcription
  misc_feature: MA Experiment 108585 PARAMETER Experiment Name: At_5mM_NaNP_cDNA_P Parameter: Timepoint (hr) Value: 6
  misc_feature: MA Experiment 108585 PARAMETER Experiment Name: At_5mM_NaNP_cDNA_P Parameter: Tissue Value: Aerial
  misc_feature: MA Experiment 108585 PARAMETER Experiment Name: At_5mM_NaNP_cDNA_P Parameter: Treatment Value: null
  misc_feature: MA Experiment ID: 108668 Result: Up-regulated in Transcription
  misc_feature: MA Experiment 108668 PARAMETER Experiment Name: At_2mM_SA_cDNA_P Parameter: Plant Line Value: WS
  misc_feature: MA Experiment 108668 PARAMETER Experiment Name: At_2mM_SA_cDNA_P Parameter: Timepoint (hr) Value: 6
  misc_feature: MA Experiment 108668 PARAMETER Experiment Name: At_2mM_SA_cDNA_P Parameter: Treatment Value: 2mM SA vs. No Treatment
  misc_feature: MA Experiment ID: 20000090 Result: Up-regulated in Transcription
  misc_feature: MA Experiment ID: 20000111 Result: Down-regulated in Transcription
  misc_feature: MA Experiment 20000111 PARAMETER Experiment Name: At_42deg_Heat_cDNA_P Parameter: Temperature (deg C) Value: 42 vs. 22
  misc_feature: MA Experiment 20000111 PARAMETER Experiment Name: At_42deg_Heat_cDNA_P Parameter: Timepoint (hr) Value: 6
  misc_feature: MA Experiment 20000111 PARAMETER Experiment Name: At_42deg_Heat_cDNA_P Parameter: Tissue Value: Aerial
  misc_feature: MA Experiment ID: 20000112 Result: Down-regulated in Transcription
  misc_feature: MA Experiment 20000112 PARAMETER Experiment Name: At_42deg_Heat_cDNA_P Parameter: Temperature (deg C) Value: 42 vs. 22
  misc_feature: MA Experiment 20000112 PARAMETER Experiment Name: At_42deg_Heat_cDNA_P Parameter: Timepoint (hr) Value: 2
  misc_feature: MA Experiment 20000112 PARAMETER Experiment Name: At_42deg_Heat_cDNA_P Parameter: Tissue Value: Aerial
  misc_feature: MA Experiment ID: 20000224 Result: Up-regulated in Transcription
  misc_feature: MA Experiment ID: 20000328 Result: Down-regulated in Transcription
  misc_feature: MA Experiment 20000328 PARAMETER Experiment Name: At_42deg_Heat_Sub_P Parameter: Age (day) Value: 14
  misc_feature: MA Experiment 20000328 PARAMETER Experiment Name: At_42deg_Heat_Sub_P Parameter: Organism Value: A. thaliana
  misc_feature: MA Experiment 20000328 PARAMETER Experiment Name: At_42deg_Heat_Sub_P Parameter: Plant Line Value: WS
  misc_feature: MA Experiment 20000328 PARAMETER Experiment Name: At_42deg_Heat_Sub_P Parameter: Temperature (deg C) Value: 42 vs. 22
  misc_feature: MA Experiment 20000328 PARAMETER Experiment Name: At_42deg_Heat_Sub_P Parameter: Timepoint (hr) Value: 6
  misc_feature: MA Experiment 20000328 PARAMETER Experiment Name: At_42deg_Heat_Sub_P Parameter: Tissue Value: Aerial
  misc_feature: MA Experiment ID: 20000347 Result: Up-regulated in Transcription
  misc_feature: MA Experiment 20000347 PARAMETER Experiment Name: At_2mM_SA_Sub_P Parameter: Age (day) Value: 14
  misc_feature: MA Experiment 20000347 PARAMETER Experiment Name: At_2mM_SA_Sub_P Parameter: Organism Value: A. thaliana
  misc_feature: MA Experiment 20000347 PARAMETER Experiment Name: At_2mM_SA_Sub_P Parameter: Plant Line Value: WS
  misc_feature: MA Experiment 20000347 PARAMETER Experiment Name: At_2mM_SA_Sub_P Parameter: Timepoint (hr) Value: 6
  misc_feature: MA Experiment 20000347 PARAMETER Experiment Name: At_2mM_SA_Sub_P Parameter: Tissue Value: Aerial
  misc_feature: MA Experiment 20000347 PARAMETER Experiment Name: At_2mM_SA_Sub_P Parameter: Treatment Value: 2mM SA vs. No Treatment
  misc_feature: MA Experiment ID: 20000355 Result: Down-regulated in Transcription
  misc_feature: MA Experiment 20000355 PARAMETER Experiment Name: At_Siliques_Sub_P Parameter: Age (day) Value: 21
  misc_feature: MA Experiment 20000355 PARAMETER Experiment Name: At_Siliques_Sub_P Parameter: Organism Value: A. thaliana
  misc_feature: MA Experiment 20000355 PARAMETER Experiment Name: At_Siliques_Sub_P Parameter: Plant Line Value: WS
  misc_feature: MA Experiment 20000355 PARAMETER Experiment Name: At_Siliques_Sub_P Parameter: Tissue Value: Less Than 5mm Siliques vs. Whole Plant
  misc_feature: MA Experiment ID: 20000440 Result: Down-regulated in Transcription
  misc_feature: MA Experiment 20000440 PARAMETER Experiment Name: At_Closed-Flower__Sub_P Parameter: Tissue Value: Closed Flower vs. Whole Plant
aatgcacacaaacatttacccaaaatggcatcggcggttcagaaatcagcgttgctcttatgtggagactacatggaagcctatgaaacgattgttcctctctatgttctccaatcgtttggggttagcgttcattgcgtttcacccaaccgcaacgccggcgatcgctgcgttatgtctgcccacgatttcttgggcctcgagctatacaccgagcttgtcgttgaccagttgactttaaacgcaaacttcgatgacgtcactccggagaattacgacgtcatcatcatcccaggaggccgattcacggagcttctcagcgccgacgagaaatgcgttgacctcgtggcgcgattcgccgaatccaagaagctgatcttcactagctgtcatagccaggttatgctgatggcggccggaatcctcgccggtggtgtgaaatgcacggcgtttgaaagcataaagcctttgatcgaactctccggcggtgagtggtggcaacagcctgggattcagagcatgttcgagatcaccgattgcgttaaagacgggaatttcatgagtacggttggttggccaacgcttggtcacggcattaagcttttgcttgaatctcttggtggcaaagtctgtagcttggagaagaagcaagcttctgtgcttttcctcattggggactatgtagaagattatgggatcaatgtaccgtttagagcactacaagctttaggttgtaaagtggatgctgtgacaccgaacaagaagaagggagaagtgtgtgcaacggcggtttatgaccttgaggatggacggcagattcctgcagagaagcgtggacataacttctttgtgactgcatcgtgggatgatatatgtgtggatgattatgactgtgtagtggttccaggagggagatcacctgagctattggtgatgaatgaaaaggctgttgctttggttaagagttttgcagagaaagataaggtgtttgcagctattggacaggggaaattgcttcttgcagccactggtgttcttaaggggaagcgatgcgcgagtgggaaagggatgaaggtgatggtgaaggtggctggaggtgaggctgtgatggaaaagggatgtgtaactgatgggaaggttgtgacggcagcatcagccacggatctgcctgcctttttgtttgatttatcaactgctcttggtctaactgtcatgttctaagattttgcaactaaaaaacataaaagatagtttgagtaataaaatcatatcttcaatttgctcaattgaagtgaaaagaaaaacaaaagagctcgattgtagtgtctctgctttcatgagttcatggcactcctaacaaactatattgtagctgcttcttggaaataaaagcatgtagtttggtg

SEQ ID NO: 24334 - protein, 406 aa, Arabidopsis thaliana
  peptide (1)..(406): Ceres Seq. ID no. 12371800
  misc_feature (4)..(210): Homolog of NCBI NO: 21954064 NR Description: unknown protein [Arabidopsis thaliana]
  misc_feature (4)..(210): Homolog of NCBI NO: 15232958 NR Description: expressed protein; protein id: At3g02720.1
  misc_feature (220)..(400): Homolog of NCBI NO: 23040436 NR Description: hypothetical protein [Trichodesmium erythraeum
  misc_feature (220)..(401): Homolog of NCBI NO: 15890541 NR Description: AGR_L_853p [Agrobacterium tumefaciens]
  misc_feature (79)..(406): Homolog of NCBI NO: 21954064 NR Description: unknown protein [Arabidopsis thaliana]
  misc_feature (12)..(406): Homolog of NCBI NO: 15232958 NR Description: expressed protein; protein id: At3g02720.1
  misc_feature (15)..(406): Homolog of NCBI NO: 32488724 NR Description: OSJNBb0004A17.3 [Oryza sativa (japonica
  misc_feature (9)..(406): Homolog of NCBI NO: 15232554 NR Description: putative protein
  misc_feature (9)..(406): Homolog of NCBI NO: 18404881 NR Description: expressed protein
  misc_feature (9)..(406): Homolog of NCBI NO: 30687679 NR Description: (YLS5) proteaseI (pfpI)-like protein, complete
NAHKHLPKMASAVQKSALLLCGDYMEAYETIVPLYVLQSFGVSVHCVSPNRNAGDRCVMSAHDFLGLELYTELVVDQLTLNANFDDVTPENYDVIIIPGGRFTELLSADEKCVDLVARFAESKKLIFTSCHSQVMLMAAGILAGGVKCTAFESIKPLIELSGGEWWQQPGIQSMFEITDCVKDGNFMSTVGWPTLGHGIKLLLESLGGKVCSLEKKQASVLFLIGDYVEDYGINVPFRALQALGCKVDAVTPNKKKGEVCATAVYDLEDGRQIPAEKRGHNFFVTASWDDICVDDYDCVVVPGGRSPELLVMNEKAVALVKSFAEKDKVFAAIGQGKLLLAATGVLKGKRCASGKGMKVMVKVAGGEAVMEKGCVTDGKVVTAASATDLPAFLFDLSTALGLTVMF

SEQ ID NO: 24335 - protein, 398 aa, Arabidopsis thaliana
  peptide (1)..(398): Ceres Seq. ID no. 12371801
  misc_feature (1)..(202): Homolog of NCBI NO: 21954064 NR Description: unknown protein [Arabidopsis thaliana]
  misc_feature (1)..(202): Homolog of NCBI NO: 15232958 NR Description: expressed protein; protein id: At3g02720.1
  misc_feature (212)..(392): Homolog of NCBI NO: 23040436 NR Description: hypothetical protein [Trichodesmium erythraeum
  misc_feature (212)..(393): Homolog of NCBI NO: 15890541 NR Description: AGR_L_853p [Agrobacterium tumefaciens]
  misc_feature (71)..(398): Homolog of NCBI NO: 21954064 NR Description: unknown protein [Arabidopsis thaliana]
  misc_feature (4)..(398): Homolog of NCBI NO: 15232958 NR Description: expressed protein; protein id: At3g02720.1
  misc_feature (7)..(398): Homolog of NCBI NO: 32488724 NR Description: OSJNBb0004A17.3 [Oryza sativa (japonica
  misc_feature (1)..(398): Homolog of NCBI NO: 15232554 NR Description: putative protein
  misc_feature (1)..(398): Homolog of NCBI NO: 18404881 NR Description: expressed protein
  misc_feature (1)..(398): Homolog of NCBI NO: 30687679 NR Description: (YLS5) proteaseI (pfpI)-like protein, complete
MASAVQKSALLLCGDYMEAYETIVPLYVLQSFGVSVHCVSPNRNAGDRCVMSAHDFLGLELYTELVVDQLTLNANFDDVTPENYDVIIIPGGRFTELLSADEKCVDLVARFAESKKLIFTSCHSQVMLMAAGILAGGVKCTAFESIKPLIELSGGEWWQQPGIQSMFEITDCVKDGNFMSTVGWPTLGHGIKLLLESLGGKVCSLEKKQASVLFLIGDYVEDYGINVPFRALQALGCKVDAVTPNKKKGEVCATAVYDLEDGRQIPAEKRGHNFFVTASWDDICVDDYDCVVVPGGRSPELLVMNEKAVALVKSFAEKDKVFAAIGQGKLLLAATGVLKGKRCASGKGMKVMVKVAGGEAVMEKGCVTDGKVVTAASATDLPAFLFDLSTALGLTVMF

SEQ ID NO: 24336 - protein, 382 aa, Arabidopsis thaliana
  peptide (1)..(382): Ceres Seq. ID no. 12371802
  misc_feature (1)..(186): Homolog of NCBI NO: 21954064 NR Description: unknown protein [Arabidopsis thaliana]
  misc_feature (1)..(186): Homolog of NCBI NO: 15232958 NR Description: expressed protein; protein id: At3g02720.1
  misc_feature (196)..(376): Homolog of NCBI NO: 23040436 NR Description: hypothetical protein [Trichodesmium erythraeum
  misc_feature (196)..(377): Homolog of NCBI NO: 15890541 NR Description: AGR_L_853p [Agrobacterium tumefaciens]
  misc_feature (55)..(382): Homolog of NCBI NO: 21954064 NR Description: unknown protein [Arabidopsis thaliana]
  misc_feature (1)..(382): Homolog of NCBI NO: 15232958 NR Description: expressed protein; protein id: At3g02720.1
  misc_feature (1)..(382): Homolog of NCBI NO: 32488724 NR Description: OSJNBb0004A17.3 [Oryza sativa (japonica
  misc_feature (1)..(382): Homolog of NCBI NO: 15232554 NR Description: putative protein
  misc_feature (1)..(382): Homolog of NCBI NO: 18404881 NR Description: expressed protein
  misc_feature (1)..(382): Homolog of NCBI NO: 30687679 NR Description: (YLS5) proteaseI (pfpI)-like protein, complete
MEAYETIVPLYVLQSFGVSVHCVSPNRNAGDRCVMSAHDFLGLELYTELVVDQLTLNANFDDVTPENYDVIIIPGGRFTELLSADEKCVDLVARFAESKKLIFTSCHSQVMLMAAGILAGGVKCTAFESIKPLIELSGGEWWQQPGIQSMFEITDCVKDGNFMSTVGWPTLGHGIKLLLESLGGKVCSLEKKQASVLFLIGDYVEDYGINVPFRALQALGCKVDAVTPNKKKGEVCATAVYDLEDGRQIPAEKRGHNFFVTASWDDICVDDYDCVVVPGGRSPELLVMNEKAVALVKSFAEKDKVFAAIGQGKLLLAATGVLKGKRCASGKGMKVMVKVAGGEAVMEKGCVTDGKVVTAASATDLPAFLFDLSTALGLTVMF

SEQ ID NO: 24337 - DNA, 1200 bp, Arabidopsis thaliana
  misc_feature (1)..(1200): Ceres Seq. ID no. 12422777
  misc_feature: MA Experiment ID: 108561 Result: Up-regulated in Transcription
  misc_feature: MA Experiment 108561 PARAMETER Experiment Name: At_100uM_ABA_cDNA_P Parameter: Timepoint (hr) Value: 6
  misc_feature: MA Experiment 108561 PARAMETER Experiment Name: At_100uM_ABA_cDNA_P Parameter: Tissue Value: Aerial
  misc_feature: MA Experiment 108561 PARAMETER Experiment Name: At_100uM_ABA_cDNA_P Parameter: Treatment Value: 100uM ABA vs. No Treatment
  misc_feature: MA Experiment ID: 108573 Result: Up-regulated in Transcription
  misc_feature: MA Experiment 108573 PARAMETER Experiment Name: At_Drought_cDNA_P Parameter: Timepoint (hr) Value: 6
  misc_feature: MA Experiment 108573 PARAMETER Experiment Name: At_Drought_cDNA_P Parameter: Tissue Value: Aerial
  misc_feature: MA Experiment 108573 PARAMETER Experiment Name: At_Drought_cDNA_P Parameter: Treatment Value: Drought vs. No Drought
  misc_feature: MA Experiment ID: 20000184 Result: Up-regulated in Transcription
  misc_feature: MA Experiment 20000184 PARAMETER Experiment Name: At_Shoots__P Parameter: Age (day) Value: 7
  misc_feature: MA Experiment 20000184 PARAMETER Experiment Name: At_Shoots__P Parameter: Tissue Value: Shoots vs. Whole Plant
  misc_feature: MA Experiment ID: 20000224 Result: Down-regulated in Transcription
  misc_feature: MA Experiment ID: 20001558 Result: Down-regulated in Transcription
  misc_feature: MA Experiment 20001558 PARAMETER Experiment Name: At_Drought_Soil_Dry_P Parameter: Age (day) Value: 27
  misc_feature: MA Experiment 20001558 PARAMETER Experiment Name: At_Drought_Soil_Dry_P Parameter: Organism Value: A. thaliana
  misc_feature: MA Experiment 20001558 PARAMETER Experiment Name: At_Drought_Soil_Dry_P Parameter: Plant Line Value: WS
  misc_feature: MA Experiment 20001558 PARAMETER Experiment Name: At_Drought_Soil_Dry_P Parameter: Post Timepoint (hr) Value: 6
  misc_feature: MA Experiment 20001558 PARAMETER Experiment Name: At_Drought_Soil_Dry_P Parameter: Post-Treatment Value: Re-Water vs. No Drought
  misc_feature: MA Experiment 20001558 PARAMETER Experiment Name: At_Drought_Soil_Dry_P Parameter: Timepoint (day) Value: 13
  misc_feature: MA Experiment 20001558 PARAMETER Experiment Name: At_Drought_Soil_Dry_P Parameter: Treatment Value: Drought vs. No Drought
atttattgaatgttctttgaagaagaagaaggcgacgacacaaaaaccttgcatttgcatccatggcgtcgatgccgagcaaacttcttccagtcctagtctgctacgtttttcttttcccctttgcatcatcatctgattattctggggtatctcttccatcttcgtcgcctaaagtctcggtgggcctgtactacgagtctctctgtccctactgctcttccttcattgttaaccacctcgcgaagctcttcgaagacgatctcatatcaatcgtcgatctccatctctctccgtggggcaataccaagctccgttccgataacgtcactgccgtttgccaggtactccttcgttttcttcaatttacgaattcgatgtttccgattcgattgaattaagcttcaattttgagaaaatcaccctttccttaactgaaatttgatgttgtttgcatctgagattgacaaattggtcttctctcatttgcataaatcttgttgcttttgtgttgcagcatggggcatttgaatgcttcttggataccgtagaagcttgtgcaattgatgcttggcctaaagtaagcgatcatttcccgttcatatactgtgtcgagaagttggtgactgaacataagtatgacaagtgggagacgtgttatgagaagctcaatctcaactcgaaacctgttgcagattgtctcagcagtggacatgggaatgagcttgctttgcactatgctgcagaaacgaatgcgcttcagcctcctcacaagtatgtgccctgggtagtcgtggatggtcagccactttatgaggactatgaaaacttcataagctacatctgcaaggcttacaaaggtaataaagtacctggcgcatgtaccaaatatgcaaccggcaacttcattcgtagtgtcaaattgaaacgctcccctctggtgtcctggaaaggcgtgaataagatgtgggatgtgttggaacgtatcacaacctctttatcgtcatacatcgacatcaccggcctgctatgaacacttcctgtatctttttcccatgtaacaaaccaccccaaaaagctatctagattctgatatttaatgaatgtgtgtaatctttatgtttcatcaaaatgtatgtttgttgtgttgtgagaggcctttcaagaatcacatgttgggtaaaaaacctatttcggttt

SEQ ID NO: 24338 - protein, 112 aa, Arabidopsis thaliana
  peptide (1)..(112): Ceres Seq. ID no. 12422778
  misc_feature (39)..(94): Pfam Name: Gamma interferon inducible lysosomal thiol Pfam Description: Gamma interferon inducible lysosomal thiol
  misc_feature (36)..(94): Homolog of NCBI NO: 15235540 NR Description: putative protein
  misc_feature (3)..(94): Homolog of NCBI NO: 22328587 NR Description: putative protein
  misc_feature (36)..(94): Homolog of NCBI NO: 21593852 NR Description: unknown [Arabidopsis thaliana]
  misc_feature (2)..(94): Homolog of NCBI NO: 21593076 NR Description: unknown [Arabidopsis thaliana]
  misc_feature (32)..(94): Homolog of NCBI NO: 9837556 NR Description: lysosomal thiol reductase IP30 precursor [Mus
  misc_feature (35)..(94): Homolog of NCBI NO: 27668755 NR Description: similar to interferon gamma inducible protein 30
  misc_feature (2)..(94): Homolog of NCBI NO: 18413888 NR Description: putative protein
  misc_feature (1)..(94): Homolog of NCBI NO: 15235523 NR Description: putative protein; protein id: At4g12900.1
  misc_feature (4)..(94): Homolog of NCBI NO: 25406953 NR Description: hypothetical protein [imported] - Arabidopsis
  misc_feature (1)..(94): Homolog of NCBI NO: 18390723 NR Description: expressed protein
MASMPSKLLPVLVCYVFLFPFASSSDYSGVSLPSSSPKVSVGLYYESLCPYCSSFIVNHLAKLFEDDLISIVDLHLSPWGNTKLRSDNVTAVCQVLLRFLQFTNSMFPIRLN

SEQ ID NO: 24339 - protein, 109 aa, Arabidopsis thaliana
  peptide (1)..(109): Ceres Seq. ID no. 12422779
  misc_feature (36)..(91): Pfam Name: Gamma interferon inducible lysosomal thiol Pfam Description: Gamma interferon inducible lysosomal thiol
  misc_feature (29)..(91): Homolog of NCBI NO: 9837556 NR Description: lysosomal thiol reductase IP30 precursor [Mus
  misc_feature (32)..(91): Homolog of NCBI NO: 27668755 NR Description: similar to interferon gamma inducible protein 30
  misc_feature (33)..(91): Homolog of NCBI NO: 15235540 NR Description: putative protein
  misc_feature (1)..(91): Homolog of NCBI NO: 22328587 NR Description: putative protein
  misc_feature (33)..(91): Homolog of NCBI NO: 21593852 NR Description: unknown [Arabidopsis thaliana]
  misc_feature (1)..(91): Homolog of NCBI NO: 21593076 NR Description: unknown [Arabidopsis thaliana]
  misc_feature (1)..(91): Homolog of NCBI NO: 18413888 NR Description: putative protein
  misc_feature (1)..(91): Homolog of NCBI NO: 15235523 NR Description: putative protein; protein id: At4g12900.1
  misc_feature (1)..(91): Homolog of NCBI NO: 25406953 NR Description: hypothetical protein [imported] - Arabidopsis
  misc_feature (1)..(91): Homolog of NCBI NO: 18390723 NR Description: expressed protein
MPSKLLPVLVCYVFLFPFASSSDYSGVSLPSSSPKVSVGLYYESLCPYCSSFIVNHLAKLFEDDLISIVDLHLSPWGNTKLRSDNVTAVCQVLLRFLQFTNSMFPIRLN

SEQ ID NO: 24340 - DNA, 1128 bp, Arabidopsis thaliana
  misc_feature (1)..(1128): Ceres Seq. ID no. 12385382
  misc_feature: MA Experiment ID: 108434 Result: Down-regulated in Transcription
  misc_feature: MA Experiment 108434 PARAMETER Experiment Name: At_Root_Tips_cDNA_P Parameter: Tissue Value: Root Tips
  misc_feature: MA Experiment ID: 108435 Result: Down-regulated in Transcription
  misc_feature: MA Experiment 108435 PARAMETER Experiment Name: At_stm_Mutants_cDNA_P Parameter: Plant Line Value: wt Landsburg vs stm
  misc_feature: MA Experiment 108435 PARAMETER Experiment Name: At_stm_Mutants_cDNA_P Parameter: Tissue Value: Shoot Apical Meristem Region
  misc_feature: MA Experiment ID: 108461 Result: Up-regulated in Transcription
  misc_feature: MA Experiment 108461 PARAMETER Experiment Name: At_Germinating_Seeds_cDNA_P Parameter: Age (day) Value: 1 vs. 0
  misc_feature: MA Experiment 108461 PARAMETER Experiment Name: At_Germinating_Seeds_cDNA_P Parameter: Tissue Value: Germinating Seeds
  misc_feature: MA Experiment ID: 108462 Result: Up-regulated in Transcription
  misc_feature: MA Experiment 108462 PARAMETER Experiment Name: At_Germinating_Seeds_cDNA_P Parameter: Age (day) Value: 2 vs. 0
  misc_feature: MA Experiment 108462 PARAMETER Experiment Name: At_Germinating_Seeds_cDNA_P Parameter: Tissue Value: Germinating Seeds
  misc_feature: MA Experiment ID: 108463 Result: Up-regulated in Transcription
  misc_feature: MA Experiment 108463 PARAMETER Experiment Name: At_Germinating_Seeds_cDNA_P Parameter: Age (day) Value: 3 vs. 0
  misc_feature: MA Experiment 108463 PARAMETER Experiment Name: At_Germinating_Seeds_cDNA_P Parameter: Tissue Value: Germinating Seeds
  misc_feature: MA Experiment ID: 108464 Result: Up-regulated in Transcription
  misc_feature: MA Experiment 108464 PARAMETER Experiment Name: At_Germinating_Seeds_cDNA_P Parameter: Age (day) Value: 4 vs. 0
  misc_feature: MA Experiment 108464 PARAMETER Experiment Name: At_Germinating_Seeds_cDNA_P Parameter: Tissue Value: Germinating Seeds
  misc_feature: MA Experiment ID: 108561 Result: Up-regulated in Transcription
  misc_feature: MA Experiment 108561 PARAMETER Experiment Name: At_100uM_ABA_cDNA_P Parameter: Timepoint (hr) Value: 6
  misc_feature: MA Experiment 108561 PARAMETER Experiment Name: At_100uM_ABA_cDNA_P Parameter: Tissue Value: Aerial
  misc_feature: MA Experiment 108561 PARAMETER Experiment Name: At_100uM_ABA_cDNA_P Parameter: Treatment Value: 100uM ABA vs. No Treatment
  misc_feature: MA Experiment ID: 108594 Result: Down-regulated in Transcription
  misc_feature: MA Experiment 108594 PARAMETER Experiment Name: At_Ler-rhl_Root_cDNA_P Parameter: Plant Line Value: null
  misc_feature: MA Experiment ID: 20000307 Result: Up-regulated in Transcription
  misc_feature: MA Experiment 20000307 PARAMETER Experiment Name: At_Germinating_Seeds_Sub_P Parameter: Age (hr) Value: 24 vs. 0
  misc_feature: MA Experiment 20000307 PARAMETER Experiment Name: At_Germinating_Seeds_Sub_P Parameter: Organism Value: A. thaliana
  misc_feature: MA Experiment 20000307 PARAMETER Experiment Name: At_Germinating_Seeds_Sub_P Parameter: Plant Line Value: WS
  misc_feature: MA Experiment 20000307 PARAMETER Experiment Name: At_Germinating_Seeds_Sub_P Parameter: Tissue Value: Germinating Seeds
  misc_feature: MA Experiment ID: 20000314 Result: Up-regulated in Transcription
  misc_feature: MA Experiment 20000314 PARAMETER Experiment Name: At_14day_Shoots-Roots_Sub_P Parameter: Age (day) Value: 14
  misc_feature: MA Experiment 20000314 PARAMETER Experiment Name: At_14day_Shoots-Roots_Sub_P Parameter: Organism Value: A. thaliana
  misc_feature: MA Experiment 20000314 PARAMETER Experiment Name: At_14day_Shoots-Roots_Sub_P Parameter: Plant Line Value: WS
  misc_feature: MA Experiment 20000314 PARAMETER Experiment Name: At_14day_Shoots-Roots_Sub_P Parameter: Tissue Value: Roots vs. Whole Plant
  misc_feature: MA Experiment ID: 20000352 Result: Up-regulated in Transcription
  misc_feature: MA Experiment 20000352 PARAMETER Experiment Name: At_Drought_Sub_P Parameter: Age (day) Value: 7
  misc_feature: MA Experiment 20000352 PARAMETER Experiment Name: At_Drought_Sub_P Parameter: Organism Value: A. thaliana
  misc_feature: MA Experiment 20000352 PARAMETER Experiment Name: At_Drought_Sub_P Parameter: Plant Line Value: WS
  misc_feature: MA Experiment 20000352 PARAMETER Experiment Name: At_Drought_Sub_P Parameter: Timepoint (hr) Value: 6
  misc_feature: MA Experiment 20000352 PARAMETER Experiment Name: At_Drought_Sub_P Parameter: Tissue Value: Whole Plant
  misc_feature: MA Experiment 20000352 PARAMETER Experiment Name: At_Drought_Sub_P Parameter: Treatment Value: Drought vs. No Drought
  misc_feature: MA Experiment ID: 20000440 Result: Down-regulated in Transcription
  misc_feature: MA Experiment 20000440 PARAMETER Experiment Name: At_Closed-Flower__Sub_P Parameter: Tissue Value: Closed Flower vs. Whole Plant
  misc_feature: MA Experiment ID: 20000634 Result: Down-regulated in Transcription
  misc_feature: MA Experiment 20000634 PARAMETER Experiment Name: At_10percent_PEG_Sub_P Parameter: Age (day) Value: 12
  misc_feature: MA Experiment 20000634 PARAMETER Experiment Name: At_10percent_PEG_Sub_P Parameter: Organism Value: A. thaliana
  misc_feature: MA Experiment 20000634 PARAMETER Experiment Name: At_10percent_PEG_Sub_P Parameter: Plant Line Value: WS
  misc_feature: MA Experiment 20000634 PARAMETER Experiment Name: At_10percent_PEG_Sub_P Parameter: Timepoint (day) Value: 12
  misc_feature: MA Experiment 20000634 PARAMETER Experiment Name: At_10percent_PEG_Sub_P Parameter: Tissue Value: Whole Plant
  misc_feature: MA Experiment 20000634 PARAMETER Experiment Name: At_10percent_PEG_Sub_P Parameter: Treatment Value: 10% PEG vs. No Treatment
aaaacatctctcaacaacaacaacaaaacaaaacttgcacaatggtgaactttgttgaggtacaaaaaccattgttgtacggtctgatgaaaatggctggcgtcgttccttacactttagagatcgaaccagggacgaagatcaacttttgggtccctaaggaaaccctaaagaagaattccggtaccggaaaaccaacgaaacccgataaacctaaaaagcctgtcgtcttgttaatccatggtttcgctggcgaaggaatcgtgacgtggcagttccaagtcggtgcattatccaagaaatactcggtctacataccggacctcctctttttcggtggatcctacaccgacaactcggaccggtctccggcgtttcaagccgactgtttggtcaaggggcttcgtatcctcggcgtggataagtttgttcccgtagggtttagctacgggggcatggtggctttcaagatcgctgaagcttacccggacatggttagagcaatcgttgtgtctggttcgattcccacaatgaccgataccattaatgaggcgagcttgaaccggttagggtttagttcttccacggatctcttgttaccgacttctgttacgggacttaaggctctcttcaccattgctgtgcataaacccttgtggttccctaaacgattgttcaaagactacatcgaggtaatgtttaacaacagaaaagaaagagctgaactgttagaggctgttgtggtcagcaacaaggaagcgcaaatccctcatttcccacggaaaatacatttcttgtggggtgaaagtgatcaaatctttgatctcgaattggctagagacatgaaagaacaaataggtgagaacgcaacaatagagagtataaagaaggcaggccatttggtacaattggaaagaccttgtgtttacaataggcgtctcaaaaagtttcttgcatctattcactcggaagataaaattaaaatgctacattaagttctatttgatcctgatatactgtatgtatggatcatttgtgtcgagattgaataattattgggttgtttttacttgatttgtctttttgtcatttactatgatcacaatatgtaatattaatctttatggg

SEQ ID NO: 24341 - protein, 330 aa, Arabidopsis thaliana
  peptide (1)..(330): Ceres Seq. ID no. 12385383
  misc_feature (101)..(315): Pfam Name: alpha/beta hydrolase fold Pfam Description: alpha/beta hydrolase fold
  misc_feature (73)..(319): Homolog of NCBI NO: 18420566 NR Description: Expressed protein
  misc_feature (29)..(317): Homolog of NCBI NO: 30689631 NR Description: hydrolase, alpha/beta fold family [Arabidopsis
  misc_feature (13)..(317): Homolog of NCBI NO: 22326938 NR Description: similar to putative hydrolase; protein id:
  misc_feature (30)..(317): Homolog of NCBI NO: 18411865 NR Description: hypothetical protein
  misc_feature (14)..(65): Homolog of NCBI NO: 19387256 NR Description: putative hydrolase [Oryza sativa (japonica
  misc_feature (58)..(325): Homolog of NCBI NO: 19387256 NR Description: putative hydrolase [Oryza sativa (japonica
  misc_feature (14)..(324): Homolog of NCBI NO: 25411863 NR Description: hypothetical protein At2g18360 [imported] -
  misc_feature (14)..(324): Homolog of NCBI NO: 18398716 NR Description: expressed protein
  misc_feature (14)..(330): Homolog of NCBI NO: 21593332 NR Description: putative hydrolase [Arabidopsis thaliana]
  misc_feature (14)..(330): Homolog of NCBI NO: 15234460 NR Description: putative protein
NISQQQQQNKTCTMVNFVEVQKPLLYGLMKMAGVVPYTLEIEPGTKINFWVPKETLKKNSGTGKPTKPDKPKKPVVLLIHGFAGEGIVTWQFQVGALSKKYSVYIPDLLFFGGSYTDNSDRSPAFQADCLVKGLRILGVDKFVPVGFSYGGMVAFKIAEAYPDMVRAIVVSGSIPTMTDTINEASLNRLGFSSSTDLLLPTSVTGLKALFTIAVHKPLWFPKRLFKDYIEVMFNNRKERAELLEAVVVSNKEAQIPHFPRKIHFLWGESDQIFDLELARDMKEQIGENATIESIKKAGHLVQLERPCVYNRRLKKFLASIHSEDKIKMLH

SEQ ID NO: 24342 - protein, 317 aa, Arabidopsis thaliana
  peptide (1)..(317): Ceres Seq. ID no. 12385384
  misc_feature (88)..(302): Pfam Name: alpha/beta hydrolase fold Pfam Description: alpha/beta hydrolase fold
  misc_feature (60)..(306): Homolog of NCBI NO: 18420566 NR Description: Expressed protein
  misc_feature (16)..(304): Homolog of NCBI NO: 30689631 NR Description: hydrolase, alpha/beta fold family [Arabidopsis
  misc_feature (1)..(304): Homolog of NCBI NO: 22326938 NR Description: similar to putative hydrolase; protein id:
  misc_feature (17)..(304): Homolog of NCBI NO: 18411865 NR Description: hypothetical protein
  misc_feature (1)..(52): Homolog of NCBI NO: 19387256 NR Description: putative hydrolase [Oryza sativa (japonica
  misc_feature (45)..(312): Homolog of NCBI NO: 19387256 NR Description: putative hydrolase [Oryza sativa (japonica
  misc_feature (1)..(311): Homolog of NCBI NO: 25411863 NR Description: hypothetical protein At2g18360 [imported] -
  misc_feature (1)..(311): Homolog of NCBI NO: 18398716 NR Description: expressed protein
  misc_feature (1)..(317): Homolog of NCBI NO: 21593332 NR Description: putative hydrolase [Arabidopsis thaliana]
  misc_feature (1)..(317): Homolog of NCBI NO: 15234460 NR Description: putative protein
MVNFVEVQKPLLYGLMKMAGVVPYTLEIEPGTKINFWVPKETLKKNSGTGKPTKPDKPKKPVVLLIHGFAGEGIVTWQFQVGALSKKYSVYIPDLLFFGGSYTDNSDRSPAFQADCLVKGLRILGVDKFVPVGFSYGGMVAFKIAEAYPDMVRAIVVSGSIPTMTDTINEASLNRLGFSSSTDLLLPTSVTGLKALFTIAVHKPLWFPKRLFKDYIEVMFNNRKERAELLEAVVVSNKEAQIPHFPRKIHFLWGESDQIFDLELARDMKEQIGENATIESIKKAGHLVQLERPCVYNRRLKKFLASIHSEDKIKMLH

SEQ ID NO: 24343 - protein, 302 aa, Arabidopsis thaliana
  peptide (1)..(302): Ceres Seq. ID no. 12385385
  misc_feature (73)..(287): Pfam Name: alpha/beta hydrolase fold Pfam Description: alpha/beta hydrolase fold
  misc_feature (45)..(291): Homolog of NCBI NO: 18420566 NR Description: Expressed protein
  misc_feature (1)..(289): Homolog of NCBI NO: 30689631 NR Description: hydrolase, alpha/beta fold family [Arabidopsis
  misc_feature (1)..(289): Homolog of NCBI NO: 22326938 NR Description: similar to putative hydrolase; protein id:
  misc_feature (2)..(289): Homolog of NCBI NO: 18411865 NR Description: hypothetical protein
  misc_feature (1)..(37): Homolog of NCBI NO: 19387256 NR Description: putative hydrolase [Oryza sativa (japonica
  misc_feature (30)..(297): Homolog of NCBI NO: 19387256 NR Description: putative hydrolase [Oryza sativa (japonica
  misc_feature (1)..(296): Homolog of NCBI NO: 25411863 NR Description: hypothetical protein At2g18360 [imported] -
  misc_feature (1)..(296): Homolog of NCBI NO: 18398716 NR Description: expressed protein
  misc_feature (1)..(302): Homolog of NCBI NO: 21593332 NR Description: putative hydrolase [Arabidopsis thaliana]
  misc_feature (1)..(302): Homolog of NCBI NO: 15234460 NR Description: putative protein
MKMAGVVPYTLEIEPGTKINFWVPKETLKKNSGTGKPTKPDKPKKPVVLLIHGFAGEGIVTWQFQVGALSKKYSVYIPDLLFFGGSYTDNSDRSPAFQADCLVKGLRILGVDKFVPVGFSYGGMVAFKIAEAYPDMVRAIVVSGSIPTMTDTINEASLNRLGFSSSTDLLLPTSVTGLKALFTIAVHKPLWFPKRLFKDYIEVMFNNRKERAELLEAVVVSNKEAQIPHFPRKIHFLWGESDQIFDLELARDMKEQIGENATIESIKKAGHLVQLERPCVYNRRLKKFLASIHSEDKIKMLH

SEQ ID NO: 24344 - DNA, 1045 bp, Arabidopsis thaliana
  misc_feature (1)..(1045): Ceres Seq. ID no. 12348539
  misc_feature: MA Experiment ID: 108434 Result: Down-regulated in Transcription
  misc_feature: MA Experiment 108434 PARAMETER Experiment Name: At_Root_Tips_cDNA_P Parameter: Tissue Value: Root Tips
  misc_feature: MA Experiment ID: 108577 Result: Down-regulated in Transcription
  misc_feature: MA Experiment 108577 PARAMETER Experiment Name: At_42deg_Heat_cDNA_P Parameter: Temperature (deg C) Value: 42 vs. 22
  misc_feature: MA Experiment 108577 PARAMETER Experiment Name: At_42deg_Heat_cDNA_P Parameter: Timepoint (hr) Value: 6
  misc_feature: MA Experiment 108577 PARAMETER Experiment Name: At_42deg_Heat_cDNA_P Parameter: Tissue Value: Aerial
  misc_feature: MA Experiment ID: 20000184 Result: Down-regulated in Transcription
  misc_feature: MA Experiment 20000184 PARAMETER Experiment Name: At_Shoots__P Parameter: Age (day) Value: 7
  misc_feature: MA Experiment 20000184 PARAMETER Experiment Name: At_Shoots__P Parameter: Tissue Value: Shoots vs. Whole Plant
  misc_feature: MA Experiment ID: 20000211 Result: Up-regulated in Transcription
  misc_feature: MA Experiment 20000211 PARAMETER Experiment Name: At_0.001percent_MeJA__P Parameter: Age (day) Value: 14
  misc_feature: MA Experiment 20000211 PARAMETER Experiment Name: At_0.001percent_MeJA__P Parameter: Organism Value: A. thaliana
  misc_feature: MA Experiment 20000211 PARAMETER Experiment Name: At_0.001percent_MeJA__P Parameter: Plant Line Value: WS
  misc_feature: MA Experiment 20000211 PARAMETER Experiment Name: At_0.001percent_MeJA__P Parameter: Timepoint (hr) Value: 1
  misc_feature: MA Experiment 20000211 PARAMETER Experiment Name: At_0.001percent_MeJA__P Parameter: Tissue Value: Aerial
  misc_feature: MA Experiment 20000211 PARAMETER Experiment Name: At_0.001percent_MeJA__P Parameter: Treatment Value: 0.001percent MeJA vs. No Treatment
  misc_feature: MA Experiment ID: 20000224 Result: Up-regulated in Transcription
  misc_feature: MA Experiment ID: 20000227 Result: Down-regulated in Transcription
  misc_feature: MA Experiment 20000227 PARAMETER Experiment Name: At_Root-Tips-vs-Tops_P Parameter: Tissue Value: Root Tips vs. Root Tops
ttacacatctctctttctctctctcgctctcagttttgtgggattgtttctttaaaaggggttcttagggtttagtgaagctatagatttcaatttcatacatagttaacgtatagaaggaatcttgggttgatcaatggaaggttgtccaagaaacagagaaatcggtccaaaacttcttgatttgattccacaaggaaggaaatggtaccaagaagacaagaacaacacagatcaggagaagaaacttgagctaaggcttggaccacccggtggtgatgaagaagatcattcagcaatcaagaagaagaacacagagataagaaacatcaagaaggaaacagaagacaaatctttccactgttttaatggcaatcacttctctccttccaacaaaaccacttctgttcctcacatctcacagaaaagaactgctcctggtccagtggtgggttggcctccggttcgttcgttcagaaagaatctagcgagcacaagctcttcaaagctaggtaacgaatcctctcatggaggtcaaatcaacaagagtgatgatggtgaaaaacaagttgaaaccaagaaggaaggaatgtttgtcaagatcaacatggatggtgttcctattggtcgtaaagttgatctcaatgcttacaacagctacgaacagctctcttttgtcgttgacaaactcttcagaggtctactcgcagctcaaagagatatctctgatggtcaaggagaagagaaacctatcattggattattagatgggaaaggagaatttactttaacctatgaagacaatgaaggggacaagatgcttgttggggatgttccatggcaaatgtttgtttcatctgtgaagagactgcgtgtgattaaaagctctgagatttcatctgccttgacatttggatgcagtaagcaagagaagatgatgcactgaagagtctttttagaaacttttatttcagacagagagtctcaaagctttataaatgtacatctggtttttgttatatataagagttaatcattggttttt

SEQ ID NO: 24345 - protein, 269 aa, Arabidopsis thaliana
  peptide (1)..(269): Ceres Seq. ID no. 12348540
  misc_feature (36)..(263): Pfam Name: AUX/IAA family Pfam Description: AUX/IAA family
  misc_feature (104)..(252): Homolog of NCBI NO: 30685642 NR Description: auxin-responsive protein IAA13 (Indoleacetic
  misc_feature (90)..(252): Homolog of NCBI NO: 15225833 NR Description: auxin regulated protein (IAA13)
  misc_feature (100)..(253): Homolog of NCBI NO: 34906394 NR Description: P0710E05.9 [Oryza sativa (japonica
  misc_feature (81)..(257): Homolog of NCBI NO: 34909384 NR Description: putative phytochrome-associated protein
  misc_feature (34)..(267): Homolog of NCBI NO: 25296228 NR Description: auxin-induced protein IAA18
  misc_feature (1)..(267): Homolog of NCBI NO: 21594025 NR Description: auxin regulated protein IAA18, putative
  misc_feature (1)..(267): Homolog of NCBI NO: 15218080 NR Description: auxin regulated protein IAA18, putative
  misc_feature (1)..(269): Homolog of NCBI NO: 4093155 NR Description: phytochrome-associated protein 1 [Arabidopsis
  misc_feature (1)..(269): Homolog of NCBI NO: 21593333 NR Description: phytochrome-associated protein 1 (PAP1)
  misc_feature (1)..(269): Homolog of NCBI NO: 15228226 NR Description: phytochrome-associated protein 1 (PAP1)
MEGCPRNREIGPKLLDLIPQGRKWYQEDKNNTDQEKKLELRLGPPGGDEEDHSAIKKKNTEIRNIKKETEDKSFHCFNGNHFSPSNKTTSVPHISQKRTAPGPVVGWPPVRSFRKNLASTSSSKLGNESSHGGQINKSDDGEKQVETKKEGMFVKINMDGVPIGRKVDLNAYNSYEQLSFVVDKLFRGLLAAQRDISDGQGEEKPIIGLLDGKGEFTLTYEDNEGDKMLVGDVPWQMFVSSVKRLRVIKSSEISSALTFGCSKQEKMMH

SEQ ID NO: 24346 - DNA, 1141 bp, Arabidopsis thaliana
  misc_feature (1)..(1141): Ceres Seq. ID no. 12321497
  misc_feature: MA Experiment ID: 108577 Result: Down-regulated in Transcription
  misc_feature: MA Experiment 108577 PARAMETER Experiment Name: At_42deg_Heat_cDNA_P Parameter: Temperature (deg C) Value: 42 vs. 22
  misc_feature: MA Experiment 108577 PARAMETER Experiment Name: At_42deg_Heat_cDNA_P Parameter: Timepoint (hr) Value: 6
  misc_feature: MA Experiment 108577 PARAMETER Experiment Name: At_42deg_Heat_cDNA_P Parameter: Tissue Value: Aerial
  misc_feature: MA Experiment ID: 20000113 Result: Down-regulated in Transcription
  misc_feature: MA Experiment 20000113 PARAMETER Experiment Name: At_42deg_Heat_cDNA_P Parameter: Temperature (deg C) Value: 42 vs. 22
  misc_feature: MA Experiment 20000113 PARAMETER Experiment Name: At_42deg_Heat_cDNA_P Parameter: Timepoint (hr) Value: 8
  misc_feature: MA Experiment 20000113 PARAMETER Experiment Name: At_42deg_Heat_cDNA_P Parameter: Tissue Value: Aerial
  misc_feature: MA Experiment ID: 20000180 Result: Up-regulated in Transcription
  misc_feature: MA Experiment 20000180 PARAMETER Experiment Name: At_Germinating_Seeds_P Parameter: Age (hr) Value: 24 vs. 0
  misc_feature: MA Experiment 20000180 PARAMETER Experiment Name: At_Germinating_Seeds_P Parameter: Tissue Value: Germinating Seeds
  misc_feature: MA Experiment ID: 20000224 Result: Up-regulated in Transcription
  misc_feature: MA Experiment ID: 20000437 Result: Up-regulated in Transcription
  misc_feature: MA Experiment 20000437 PARAMETER Experiment Name: At_Drought_P Parameter: Age (day) Value: 8
  misc_feature: MA Experiment 20000437 PARAMETER Experiment Name: At_Drought_P Parameter: Organism Value: A. thaliana
  misc_feature: MA Experiment 20000437 PARAMETER Experiment Name: At_Drought_P Parameter: Plant Line Value: WS
  misc_feature: MA Experiment 20000437 PARAMETER Experiment Name: At_Drought_P Parameter: Timepoint (hr) Value: 24
  misc_feature: MA Experiment 20000437 PARAMETER Experiment Name: At_Drought_P Parameter: Tissue Value: Whole Plant
  misc_feature: MA Experiment 20000437 PARAMETER Experiment Name: At_Drought_P Parameter: Treatment Value: Drought vs. No Drought
aattttttttttgaatttggttttatatataacaatctggatccgccaccgtcgaattaatctccggaaagctcgtcgaaagatgtcgatgggaggcgacacgacgtgggttgggaagaagccgatcagacgcatcggtggattatctgatgctctctctatcgcctccgatctcggtttcgccgtcgctcctcctccgtcgcaggaagaattacaaagctttgcgtcttcgaatggggaaagaggtgatgatttgataagggtattgagagagttatctgttgttcaaaggaaaattgcagacttgcaggtcgagcttcaagggaggaaggatgataaaaatgtggcgcatttgactcatgttggtgaaatgcaaaagaaaatcgagactttgtcaaggattactcaaatattgaaagatgttatacaaaacaaggatcgcatcattgctcgtctccaacaaccttattcgctagattgcattccagttgaagcagaatatcagaaacaattctcagagttgctaatgaaagccgccagtgattatggcgccttaacagcatccgtgtctgattttcagtggagccaaaactttaaagaacctccttcagtctggggggaaatgctgcgtccaatacctgtggcactagcgtcatgcacgagattctttgaggccatgtctgcgatgagagaatcattcgcgactcttcaagagcttcgagttggtaactctgcagtttctttaccaacaacaccaggaggtaacgaaatgacacatagagactcagattgtgtgactccacctcaagggaggatagagtcaagcttcgacgatttagctgttcataaaacaaggagacaaaacaatgatcaaaatgaagaagaagaagaagaagaagaagaagaagatggtaataacaatgggaaccggagactatcttggcctccttctgtaaaaaagagtagcgtttaaacagttgcttttgtctttgcttgagctttttaatatcgatcgtgttttgtttcatcagcattagtgttctttatggatttacttatttctatttgatagtctttgagtgaaacttaaaacagtgtatattttggtaacactggtttccatggtccatgtgactattat

SEQ ID NO: 24347 - protein, 323 aa, Arabidopsis thaliana
  peptide (1)..(323): Ceres Seq. ID no. 12321498
  misc_feature (28)..(103): Homolog of NCBI NO: 7452463 NR Description: hypothetical protein At2g32980 [imported] -
  misc_feature (39)..(277): Homolog of NCBI NO: 40253396 NR Description: unknown protein [Oryza sativa (japonica
  misc_feature (110)..(323): Homolog of NCBI NO: 7452463 NR Description: hypothetical protein At2g32980 [imported] -
  misc_feature (28)..(323): Homolog of NCBI NO: 21593334 NR Description: unknown [Arabidopsis thaliana]
  misc_feature (28)..(323): Homolog of NCBI NO: 18403146 NR Description: expressed protein
IFFLNLVLYITIWIRHRRINLRKARRKMSMGGDTTWVGKKPIRRIGGLSDALSIASDLGFAVAPPPSQEELQSFASSNGERGDDLIRVLRELSVVQRKIADLQVELQGRKDDKNVAHLTHVGEMQKKIETLSRITQILKDVIQNKDRIIARLQQPYSLDCIPVEAEYQKQFSELLMKAASDYGALTASVSDFQWSQNFKEPPSVWGEMLRPIPVALASCTRFFEAMSAMRESFATLQELRVGNSAVSLPTTPGGNEMTHRDSDCVTPPQGRIESSFDDLAVHKTRRQNNDQNEEEEEEEEEEDGNNNGNRRLSWPPSVKKSSV

SEQ ID NO: 24348 - protein, 296 aa, Arabidopsis thaliana
  peptide (1)..(296): Ceres Seq. ID no. 12321499
  misc_feature (1)..(76): Homolog of NCBI NO: 7452463 NR Description: hypothetical protein At2g32980 [imported] -
  misc_feature (12)..(250): Homolog of NCBI NO: 40253396 NR Description: unknown protein [Oryza sativa (japonica
  misc_feature (83)..(296): Homolog of NCBI NO: 7452463 NR Description: hypothetical protein At2g32980 [imported] -
  misc_feature (1)..(296): Homolog of NCBI NO: 21593334 NR Description: unknown [Arabidopsis thaliana]
  misc_feature (1)..(296): Homolog of NCBI NO: 18403146 NR Description: expressed protein
MSMGGDTTWVGKKPIRRIGGLSDALSIASDLGFAVAPPPSQEELQSFASSNGERGDDLIRVLRELSVVQRKIADLQVELQGRKDDKNVAHLTHVGEMQKKIETLSRITQILKDVIQNKDRIIARLQQPYSLDCIPVEAEYQKQFSELLMKAASDYGALTASVSDFQWSQNFKEPPSVWGEMLRPIPVALASCTRFFEAMSAMRESFATLQELRVGNSAVSLPTTPGGNEMTHRDSDCVTPPQGRIESSFDDLAVHKTRRQNNDQNEEEEEEEEEEDGNNNGNRRLSWPPSVKKSSV

SEQ ID NO: 24349 - protein, 294 aa, Arabidopsis thaliana
  peptide (1)..(294): Ceres Seq. ID no. 12321500
  misc_feature (1)..(74): Homolog of NCBI NO: 7452463 NR Description: hypothetical protein At2g32980 [imported] -
  misc_feature (10)..(248): Homolog of NCBI NO: 40253396 NR Description: unknown protein [Oryza sativa (japonica
  misc_feature (81)..(294): Homolog of NCBI NO: 7452463 NR Description: hypothetical protein At2g32980 [imported] -
  misc_feature (1)..(294): Homolog of NCBI NO: 21593334 NR Description: unknown [Arabidopsis thaliana]
  misc_feature (1)..(294): Homolog of NCBI NO: 18403146 NR Description: expressed protein
MGGDTTWVGKKPIRRIGGLSDALSIASDLGFAVAPPPSQEELQSFASSNGERGDDLIRVLRELSVVQRKIADLQVELQGRKDDKNVAHLTHVGEMQKKIETLSRITQILKDVIQNKDRIIARLQQPYSLDCIPVEAEYQKQFSELLMKAASDYGALTASVSDFQWSQNFKEPPSVWGEMLRPIPVALASCTRFFEAMSAMRESFATLQELRVGNSAVSLPTTPGGNEMTHRDSDCVTPPQGRIESSFDDLAVHKTRRQNNDQNEEEEEEEEEEDGNNNGNRRLSWPPSVKKSSV

SEQ ID NO: 24350 - DNA, 1153 bp, Arabidopsis thaliana
  misc_feature (1)..(1153): Ceres Seq. ID no. 12421479
  misc_feature: MA Experiment ID: 108434 Result: Up-regulated in Transcription
  misc_feature: MA Experiment 108434 PARAMETER Experiment Name: At_Root_Tips_cDNA_P Parameter: Tissue Value: Root Tips
  misc_feature: MA Experiment ID: 108461 Result: Down-regulated in Transcription
  misc_feature: MA Experiment 108461 PARAMETER Experiment Name: At_Germinating_Seeds_cDNA_P Parameter: Age (day) Value: 1 vs. 0
  misc_feature: MA Experiment 108461 PARAMETER Experiment Name: At_Germinating_Seeds_cDNA_P Parameter: Tissue Value: Germinating Seeds
  misc_feature: MA Experiment ID: 108462 Result: Down-regulated in Transcription
  misc_feature: MA Experiment 108462 PARAMETER Experiment Name: At_Germinating_Seeds_cDNA_P Parameter: Age (day) Value: 2 vs. 0
  misc_feature: MA Experiment 108462 PARAMETER Experiment Name: At_Germinating_Seeds_cDNA_P Parameter: Tissue Value: Germinating Seeds
  misc_feature: MA Experiment ID: 108463 Result: Down-regulated in Transcription
  misc_feature: MA Experiment 108463 PARAMETER Experiment Name: At_Germinating_Seeds_cDNA_P Parameter: Age (day) Value: 3 vs. 0
  misc_feature: MA Experiment 108463 PARAMETER Experiment Name: At_Germinating_Seeds_cDNA_P Parameter: Tissue Value: Germinating Seeds
  misc_feature: MA Experiment ID: 108464 Result: Down-regulated in Transcription
  misc_feature: MA Experiment 108464 PARAMETER Experiment Name: At_Germinating_Seeds_cDNA_P Parameter: Age (day) Value: 4 vs. 0
  misc_feature: MA Experiment 108464 PARAMETER Experiment Name: At_Germinating_Seeds_cDNA_P Parameter: Tissue Value: Germinating Seeds
  misc_feature: MA Experiment ID: 108572 Result: Down-regulated in Transcription
  misc_feature: MA Experiment 108572 PARAMETER Experiment Name: At_Drought_cDNA_P Parameter: Timepoint (hr) Value: 1
  misc_feature: MA Experiment 108572 PARAMETER Experiment Name: At_Drought_cDNA_P Parameter: Tissue Value: Aerial
  misc_feature: MA Experiment 108572 PARAMETER Experiment Name: At_Drought_cDNA_P Parameter: Treatment Value: Drought vs. No Drought
  misc_feature: MA Experiment ID: 108576 Result: Down-regulated in Transcription
  misc_feature: MA Experiment 108576 PARAMETER Experiment Name: At_42deg_Heat_cDNA_P Parameter: Temperature (deg C) Value: 42 vs. 22
  misc_feature: MA Experiment 108576 PARAMETER Experiment Name: At_42deg_Heat_cDNA_P Parameter: Timepoint (hr) Value: 1
  misc_feature: MA Experiment 108576 PARAMETER Experiment Name: At_42deg_Heat_cDNA_P Parameter: Tissue Value: Aerial
  misc_feature: MA Experiment ID: 20000072 Result: Up-regulated in Transcription
  misc_feature: MA Experiment 20000072 PARAMETER Experiment Name: At_100uM_ABA_Mutants_cDNA_P Parameter: Plant Line Value: CS8105
  misc_feature: MA Experiment 20000072 PARAMETER Experiment Name: At_100uM_ABA_Mutants_cDNA_P Parameter: Timepoint (hr) Value: 6
  misc_feature: MA Experiment 20000072 PARAMETER Experiment Name: At_100uM_ABA_Mutants_cDNA_P Parameter: Tissue Value: Aerial
  misc_feature: MA Experiment 20000072 PARAMETER Experiment Name: At_100uM_ABA_Mutants_cDNA_P Parameter: Treatment Value: 100uM ABA vs. No Treatment
  misc_feature: MA Experiment ID: 20000111 Result: Down-regulated in Transcription
  misc_feature: MA Experiment 20000111 PARAMETER Experiment Name: At_42deg_Heat_cDNA_P Parameter: Temperature (deg C) Value: 42 vs. 22
  misc_feature: MA Experiment 20000111 PARAMETER Experiment Name: At_42deg_Heat_cDNA_P Parameter: Timepoint (hr) Value: 6
  misc_feature: MA Experiment 20000111 PARAMETER Experiment Name: At_42deg_Heat_cDNA_P Parameter: Tissue Value: Aerial
  misc_feature: MA Experiment ID: 20000113 Result: Down-regulated in Transcription
  misc_feature: MA Experiment 20000113 PARAMETER Experiment Name: At_42deg_Heat_cDNA_P Parameter: Temperature (deg C) Value: 42 vs. 22
  misc_feature: MA Experiment 20000113 PARAMETER Experiment Name: At_42deg_Heat_cDNA_P Parameter: Timepoint (hr) Value: 8
  misc_feature: MA Experiment 20000113 PARAMETER Experiment Name: At_42deg_Heat_cDNA_P Parameter: Tissue Value: Aerial
  misc_feature: MA Experiment ID: 20000144 Result: Down-regulated in Transcription
  misc_feature: MA Experiment 20000144 PARAMETER Experiment Name: At_42deg_Heat_cDNA_P Parameter: Temperature (deg C) Value: 42 vs. 22
  misc_feature: MA Experiment 20000144 PARAMETER Experiment Name: At_42deg_Heat_cDNA_P Parameter: Timepoint (hr) Value: 1
  misc_feature: MA Experiment 20000144 PARAMETER Experiment Name: At_42deg_Heat_cDNA_P Parameter: Tissue Value: Aerial
  misc_feature: MA Experiment ID: 20000173 Result: Down-regulated in Transcription
  misc_feature: MA Experiment 20000173 PARAMETER Experiment Name: At_42deg_Heat_P Parameter: Age (day) Value: 14
  misc_feature: MA Experiment 20000173 PARAMETER Experiment Name: At_42deg_Heat_P Parameter: Organism Value: A. thaliana
  misc_feature: MA Experiment 20000173 PARAMETER Experiment Name: At_42deg_Heat_P Parameter: Plant Line Value: WS
  misc_feature: MA Experiment 20000173 PARAMETER Experiment Name: At_42deg_Heat_P Parameter: Temperature (deg C) Value: 42 vs. 22
  misc_feature: MA Experiment 20000173 PARAMETER Experiment Name: At_42deg_Heat_P Parameter: Timepoint (hr) Value: 6
  misc_feature: MA Experiment 20000173 PARAMETER Experiment Name: At_42deg_Heat_P Parameter: Tissue Value: Aerial
  misc_feature: MA Experiment ID: 20000179 Result: Down-regulated in Transcription
  misc_feature: MA Experiment 20000179 PARAMETER Experiment Name: At_Germinating_Seeds_P Parameter: Age (hr) Value: 6 vs. 0
  misc_feature: MA Experiment 20000179 PARAMETER Experiment Name: At_Germinating_Seeds_P Parameter: Tissue Value: Germinating Seeds
  misc_feature: MA Experiment ID: 20000180 Result: Down-regulated in Transcription
  misc_feature: MA Experiment 20000180 PARAMETER Experiment Name: At_Germinating_Seeds_P Parameter: Age (hr) Value: 24 vs. 0
  misc_feature: MA Experiment 20000180 PARAMETER Experiment Name: At_Germinating_Seeds_P Parameter: Tissue Value: Germinating Seeds
  misc_feature: MA Experiment ID: 20000184 Result: Down-regulated in Transcription
  misc_feature: MA Experiment 20000184 PARAMETER Experiment Name: At_Shoots__P Parameter: Age (day) Value: 7
  misc_feature: MA Experiment 20000184 PARAMETER Experiment Name: At_Shoots__P Parameter: Tissue Value: Shoots vs. Whole Plant
  misc_feature: MA Experiment ID: 20001905 Result: Down-regulated in Transcription
  misc_feature: MA Experiment 20001905 PARAMETER Experiment Name: At_Drought_Reproduction_P Parameter: Age (day) Value: 40
  misc_feature: MA Experiment 20001905 PARAMETER Experiment Name: At_Drought_Reproduction_P Parameter: Organism Value: A. thaliana
  misc_feature: MA Experiment 20001905 PARAMETER Experiment Name: At_Drought_Reproduction_P Parameter: Plant Line Value: WS
  misc_feature: MA Experiment 20001905 PARAMETER Experiment Name: At_Drought_Reproduction_P Parameter: Timepoint (day) Value: 10
  misc_feature: MA Experiment 20001905 PARAMETER Experiment Name: At_Drought_Reproduction_P Parameter: Tissue Value: Rosettes
  misc_feature: MA Experiment 20001905 PARAMETER Experiment Name: At_Drought_Reproduction_P Parameter: Treatment Value: Drought vs. No Drought
aaaataaacagagaagaagaaccaaattcaatgcttccttgtcgccgtcttgttctgtcctgcaagaatcaagctgccagttttctccgaaggtgtggaccatcgaaacgaattcaatcagtcaattactgtaaatcaacaagacagggccatgaaattccagatgtgaaacctctttttcccacaggaggaggaactcaagctccttctcgttctcgtgctcgttatgctgttcctgcgattctacttggttttgccggattcgtcggctttcttcattacaacgacgaaaggagagcagttcctagaggtcaagcaagcagcaatagcggttgtggctgcggttctaatacaactgtcaaaggtccgattatcggaggtccgtttacgcttgtgagcacagaaaacaagatagtcacagagaatgacttttgtggtaaatgggttctactctactttggatactctttttccccggatgttggacctgagcaactgaagatgatgtccaaagctgttgataaactagagtctaaacataacgagaagattctgcctgtctttgtcactcttgaccctcaacgagacacaccttctcatctccacgcatacttgaaagagtttgatagtagaatactaggactaaccgggactgcaagtgcaatgaggcaaatggcacaagagtatcgtgtctacttcaagaaggttcaagaggacggagaagattatctcgttgatacttctcacaacatgtacttgataaatccgaagatggagattgtgaggtgctttggggttgagtataatccagacgagctctcacaagagcttcttaaagaagttgcttctgtttcacagtgacccattttgaccaaacactaaagagagaaacactaggatgctctttgattgttttcttcaattcgtgattttttttaagacgattttgttaatccgtctcttattcttgaaaaaatgaaaattagatggtagatcctgcaaagtcgaaaaaatccaaaatttcccatatagtaatattttattcttcaatgttatttttgttgttagagttgtttcttttacttatttacaaattttctttcaacgtttgtaacataatcatcagttttcagttattaaataattctctggt

SEQ ID NO: 24351 - protein, 286 aa, Arabidopsis thaliana
  peptide (1)..(286): Ceres Seq. ID no. 12421480
  misc_feature (80)..(269): Pfam Name: SCO1/SenC Pfam Description: SCO1/SenC
  misc_feature (123)..(277): Homolog of NCBI NO: 4759068 NR Description: cytochrome oxidase deficient homolog 1 [Homo
  misc_feature (123)..(277): Homolog of NCBI NO: 4406651 NR Description: h-sco1 [Homo sapiens]
  misc_feature (125)..(282): Homolog of NCBI NO: 19920710 NR Description: CG8885-PA [Drosophila melanogaster]
  misc_feature (62)..(277): Homolog of NCBI NO: 19112079 NR Description: putative cytochrome C oxidase assembly protein
  misc_feature (17)..(281): Homolog of NCBI NO: 40740887 NR Description: hypothetical protein AN4842.2 [Aspergillus
  misc_feature (80)..(281): Homolog of NCBI NO: 18398306 NR Description: putative SCO1 protein
  misc_feature (80)..(281): Homolog of NCBI NO: 6403490 NR Description: putative SCO1 protein [Arabidopsis thaliana]
  misc_feature (11)..(176): Homolog of NCBI NO: 26450269 NR Description: unknown protein [Arabidopsis thaliana]
  misc_feature (22)..(286): Homolog of NCBI NO: 7487210 NR Description: hypothetical protein T19P19.130 - Arabidopsis
  misc_feature (11)..(286): Homolog of NCBI NO: 18420515 NR Description: putative protein
KINREEEPNSMLPCRRLVLSCKNQAASFLRRCGPSKRIQSVNYCKSTRQGHEIPDVKPLFPTGGGTQAPSRSRARYAVPAILLGFAGFVGFLHYNDERRAVPRGQASSNSGCGCGSNTTVKGPIIGGPFTLVSTENKIVTENDFCGKWVLLYFGYSFSPDVGPEQLKMMSKAVDKLESKHNEKILPVFVTLDPQRDTPSHLHAYLKEFDSRILGLTGTASAMRQMAQEYRVYFKKVQEDGEDYLVDTSHNMYLINPKMEIVRCFGVEYNPDELSQELLKEVASVSQ

SEQ ID NO: 24352 - protein, 276 aa, Arabidopsis thaliana
  peptide (1)..(276): Ceres Seq. ID no. 12421481
  misc_feature (70)..(259): Pfam Name: SCO1/SenC Pfam Description: SCO1/SenC
  misc_feature (113)..(267): Homolog of NCBI NO: 4759068 NR Description: cytochrome oxidase deficient homolog 1 [Homo
  misc_feature (113)..(267): Homolog of NCBI NO: 4406651 NR Description: h-sco1 [Homo sapiens]
  misc_feature (115)..(272): Homolog of NCBI NO: 19920710 NR Description: CG8885-PA [Drosophila melanogaster]
  misc_feature (52)..(267): Homolog of NCBI NO: 19112079 NR Description: putative cytochrome C oxidase assembly protein
  misc_feature (7)..(271): Homolog of NCBI NO: 40740887 NR Description: hypothetical protein AN4842.2 [Aspergillus
  misc_feature (70)..(271): Homolog of NCBI NO: 18398306 NR Description: putative SCO1 protein
  misc_feature (70)..(271): Homolog of NCBI NO: 6403490 NR Description: putative SCO1 protein [Arabidopsis thaliana]
  misc_feature (1)..(166): Homolog of NCBI NO: 26450269 NR Description: unknown protein [Arabidopsis thaliana]
  misc_feature (12)..(276): Homolog of NCBI NO: 7487210 NR Description: hypothetical protein T19P19.130 - Arabidopsis
  misc_feature (1)..(276): Homolog of NCBI NO: 18420515 NR Description: putative protein
MLPCRRLVLSCKNQAASFLRRCGPSKRIQSVNYCKSTRQGHEIPDVKPLFPTGGGTQAPSRSRARYAVPAILLGFAGFVGFLHYNDERRAVPRGQASSNSGCGCGSNTTVKGPIIGGPFTLVSTENKIVTENDFCGKWVLLYFGYSFSPDVGPEQLKMMSKAVDKLESKHNEKILPVFVTLDPQRDTPSHLHAYLKEFDSRILGLTGTASAMRQMAQEYRVYFKKVQEDGEDYLVDTSHNMYLINPKMEIVRCFGVEYNPDELSQELLKEVASVSQ

SEQ ID NO: 24353 - DNA, 1280 bp, Arabidopsis thaliana
  misc_feature (1)..(1280): Ceres Seq. ID no. 12324722
  misc_feature: MA Experiment ID: 20000166 Result: Up-regulated in Transcription
  misc_feature: MA Experiment 20000166 PARAMETER Experiment Name: At_100uM_ABA_P Parameter: Age (day) Value: 14
  misc_feature: MA Experiment 20000166 PARAMETER Experiment Name: At_100uM_ABA_P Parameter: Organism Value: A. thaliana
  misc_feature: MA Experiment 20000166 PARAMETER Experiment Name: At_100uM_ABA_P Parameter: Plant Line Value: WS
  misc_feature: MA Experiment 20000166 PARAMETER Experiment Name: At_100uM_ABA_P Parameter: Timepoint (hr) Value: 1
  misc_feature: MA Experiment 20000166 PARAMETER Experiment Name: At_100uM_ABA_P Parameter: Tissue Value: Aerial
  misc_feature: MA Experiment 20000166 PARAMETER Experiment Name: At_100uM_ABA_P Parameter: Treatment Value: 100uM ABA vs. No Treatment
  misc_feature: MA Experiment ID: 20000169 Result: Up-regulated in Transcription
  misc_feature: MA Experiment 20000169 PARAMETER Experiment Name: At_100uM_ABA_P Parameter: Age (day) Value: 14
  misc_feature: MA Experiment 20000169 PARAMETER Experiment Name: At_100uM_ABA_P Parameter: Organism Value: A. thaliana
  misc_feature: MA Experiment 20000169 PARAMETER Experiment Name: At_100uM_ABA_P Parameter: Plant Line Value: WS
  misc_feature: MA Experiment 20000169 PARAMETER Experiment Name: At_100uM_ABA_P Parameter: Timepoint (hr) Value: 6
  misc_feature: MA Experiment 20000169 PARAMETER Experiment Name: At_100uM_ABA_P Parameter: Tissue Value: Aerial
  misc_feature: MA Experiment 20000169 PARAMETER Experiment Name: At_100uM_ABA_P Parameter: Treatment Value: 100uM ABA vs. No Treatment
  misc_feature: MA Experiment ID: 20000180 Result: Up-regulated in Transcription
  misc_feature: MA Experiment 20000180 PARAMETER Experiment Name: At_Germinating_Seeds_P Parameter: Age (hr) Value: 24 vs. 0
  misc_feature: MA Experiment 20000180 PARAMETER Experiment Name: At_Germinating_Seeds_P Parameter: Tissue Value: Germinating Seeds
  misc_feature: MA Experiment ID: 20000182 Result: Up-regulated in Transcription
  misc_feature: MA Experiment 20000182 PARAMETER Experiment Name: At_2mM_SA_P Parameter: Age (day) Value: 14
  misc_feature: MA Experiment 20000182 PARAMETER Experiment Name: At_2mM_SA_P Parameter: Organism Value: A. thaliana
  misc_feature: MA Experiment 20000182 PARAMETER Experiment Name: At_2mM_SA_P Parameter: Plant Line Value: WS
  misc_feature: MA Experiment 20000182 PARAMETER Experiment Name: At_2mM_SA_P Parameter: Timepoint (hr) Value: 6
  misc_feature: MA Experiment 20000182 PARAMETER Experiment Name: At_2mM_SA_P Parameter: Tissue Value: Aerial
  misc_feature: MA Experiment 20000182 PARAMETER Experiment Name: At_2mM_SA_P Parameter: Treatment Value: 2mM SA vs. No Treatment
  misc_feature: MA Experiment ID: 20000184 Result: Down-regulated in Transcription
  misc_feature: MA Experiment 20000184 PARAMETER Experiment Name: At_Shoots__P Parameter: Age (day) Value: 7
  misc_feature: MA Experiment 20000184 PARAMETER Experiment Name: At_Shoots__P Parameter: Tissue Value: Shoots vs. Whole Plant
  misc_feature: MA Experiment ID: 20000234 Result: Down-regulated in Transcription
  misc_feature: MA Experiment 20000234 PARAMETER Experiment Name: At_Siliques_P Parameter: Age (day) Value: 21
  misc_feature: MA Experiment 20000234 PARAMETER Experiment Name: At_Siliques_P Parameter: Organism Value: A. thaliana
  misc_feature: MA Experiment 20000234 PARAMETER Experiment Name: At_Siliques_P Parameter: Plant Line Value: WS
  misc_feature: MA Experiment 20000234 PARAMETER Experiment Name: At_Siliques_P Parameter: Tissue Value: Less Than 5mm Siliques vs. Whole Plant
  misc_feature: MA Experiment ID: 20000264 Result: Down-regulated in Transcription
  misc_feature: MA Experiment 20000264 PARAMETER Experiment Name: At_Open_Flower_P Parameter: Age (day) Value: 21
  misc_feature: MA Experiment 20000264 PARAMETER Experiment Name: At_Open_Flower_P Parameter: Plant Line Value: WS
  misc_feature: MA Experiment 20000264 PARAMETER Experiment Name: At_Open_Flower_P Parameter: Tissue Value: Open Flower vs. Whole Plant
  misc_feature: MA Experiment ID: 20000437 Result: Up-regulated in Transcription
  misc_feature: MA Experiment 20000437 PARAMETER Experiment Name: At_Drought_P Parameter: Age (day) Value: 8
  misc_feature: MA Experiment 20000437 PARAMETER Experiment Name: At_Drought_P Parameter: Organism Value: A. thaliana
  misc_feature: MA Experiment 20000437 PARAMETER Experiment Name: At_Drought_P Parameter: Plant Line Value: WS
  misc_feature: MA Experiment 20000437 PARAMETER Experiment Name: At_Drought_P Parameter: Timepoint (hr) Value: 24
  misc_feature: MA Experiment 20000437 PARAMETER Experiment Name: At_Drought_P Parameter: Tissue Value: Whole Plant
  misc_feature: MA Experiment 20000437 PARAMETER Experiment Name: At_Drought_P Parameter: Treatment Value: Drought vs. No Drought
  misc_feature: MA Experiment ID: 20000438 Result: Down-regulated in Transcription
  misc_feature: MA Experiment 20000438 PARAMETER Experiment Name: At_Shoots__P Parameter: Age (day) Value: 14
  misc_feature: MA Experiment 20000438 PARAMETER Experiment Name: At_Shoots__P Parameter: Tissue Value: Shoots vs. Whole Plant
  misc_feature: MA Experiment ID: 20000794 Result: Down-regulated in Transcription
  misc_feature: MA Experiment 20000794 PARAMETER Experiment Name: At_Petals_P Parameter: Age (day) Value: 23-25 days
  misc_feature: MA Experiment 20000794 PARAMETER Experiment Name: At_Petals_P Parameter: Plant Line Value: WS
  misc_feature: MA Experiment 20000794 PARAMETER Experiment Name: At_Petals_P Parameter: Tissue Value: Petals vs. Whole plant
  misc_feature: MA Experiment ID: 20001248 Result: Up-regulated in Transcription
  misc_feature: MA Experiment 20001248 PARAMETER Experiment Name: At_Far-red-induction_P Parameter: Age (day) Value: 7
  misc_feature: MA Experiment 20001248 PARAMETER Experiment Name: At_Far-red-induction_P Parameter: Light Value: Far-red vs. White
  misc_feature: MA Experiment 20001248 PARAMETER Experiment Name: At_Far-red-induction_P Parameter: Organism Value: A. thaliana
  misc_feature: MA Experiment 20001248 PARAMETER Experiment Name: At_Far-red-induction_P Parameter: Plant Line Value: Columbia
  misc_feature: MA Experiment 20001248 PARAMETER Experiment Name: At_Far-red-induction_P Parameter: Timepoint (hr) Value: 4
  misc_feature: MA Experiment 20001248 PARAMETER Experiment Name: At_Far-red-induction_P Parameter: Tissue Value: Whole Plant
  misc_feature: MA Experiment ID: 20001450 Result: Up-regulated in Transcription
  misc_feature: MA Experiment 20001450 PARAMETER Experiment Name: At_Far-red-induction_P Parameter: Age (day) Value: 7
  misc_feature: MA Experiment 20001450 PARAMETER Experiment Name: At_Far-red-induction_P Parameter: Light Value: Far-red vs. White
  misc_feature: MA Experiment 20001450 PARAMETER Experiment Name: At_Far-red-induction_P Parameter: Organism Value: A. thaliana
  misc_feature: MA Experiment 20001450 PARAMETER Experiment Name: At_Far-red-induction_P Parameter: Plant Line Value: Columbia
  misc_feature: MA Experiment 20001450 PARAMETER Experiment Name: At_Far-red-induction_P Parameter: Timepoint (hr) Value: 8
  misc_feature: MA Experiment 20001450 PARAMETER Experiment Name: At_Far-red-induction_P Parameter: Tissue Value: Whole Plant
  misc_feature: MA Experiment ID: 20001451 Result: Up-regulated in Transcription
  misc_feature: MA Experiment 20001451 PARAMETER Experiment Name: At_Far-red-induction_P Parameter: Age (day) Value: 7
  misc_feature: MA Experiment 20001451 PARAMETER Experiment Name: At_Far-red-induction_P Parameter: Light Value: Far-red vs. White
  misc_feature: MA Experiment 20001451 PARAMETER Experiment Name: At_Far-red-induction_P Parameter: Organism Value: A. thaliana
  misc_feature: MA Experiment 20001451 PARAMETER Experiment Name: At_Far-red-induction_P Parameter: Plant Line Value: Columbia
  misc_feature: MA Experiment 20001451 PARAMETER Experiment Name: At_Far-red-induction_P Parameter: Timepoint (hr) Value: 24
  misc_feature: MA Experiment 20001451 PARAMETER Experiment Name: At_Far-red-induction_P Parameter: Tissue Value: Whole Plant
  misc_feature: MA Experiment ID: 20001557 Result: Down-regulated in Transcription
  misc_feature: MA Experiment 20001557 PARAMETER Experiment Name: At_Drought_Soil_Dry_P Parameter: Age (day) Value: 27
  misc_feature: MA Experiment 20001557 PARAMETER Experiment Name: At_Drought_Soil_Dry_P Parameter: Organism Value: A. thaliana
  misc_feature: MA Experiment 20001557 PARAMETER Experiment Name: At_Drought_Soil_Dry_P Parameter: Plant Line Value: WS
  misc_feature: MA Experiment 20001557 PARAMETER Experiment Name: At_Drought_Soil_Dry_P Parameter: Post Timepoint (hr) Value: 3
  misc_feature: MA Experiment 20001557 PARAMETER Experiment Name: At_Drought_Soil_Dry_P Parameter: Post-Treatment Value: Re-Water vs. No Drought
  misc_feature: MA Experiment 20001557 PARAMETER Experiment Name: At_Drought_Soil_Dry_P Parameter: Timepoint (day) Value: 13
  misc_feature: MA Experiment 20001557 PARAMETER Experiment Name: At_Drought_Soil_Dry_P Parameter: Treatment Value: Drought vs. No Drought
  misc_feature: MA Experiment ID: 20001558 Result: Down-regulated in Transcription
  misc_feature: MA Experiment 20001558 PARAMETER Experiment Name: At_Drought_Soil_Dry_P Parameter: Age (day) Value: 27
  misc_feature: MA Experiment 20001558 PARAMETER Experiment Name: At_Drought_Soil_Dry_P Parameter: Organism Value: A. thaliana
  misc_feature: MA Experiment 20001558 PARAMETER Experiment Name: At_Drought_Soil_Dry_P Parameter: Plant Line Value: WS
  misc_feature: MA Experiment 20001558 PARAMETER Experiment Name: At_Drought_Soil_Dry_P Parameter: Post Timepoint (hr) Value: 6
  misc_feature: MA Experiment 20001558 PARAMETER Experiment Name: At_Drought_Soil_Dry_P Parameter: Post-Treatment Value: Re-Water vs. No Drought
  misc_feature: MA Experiment 20001558 PARAMETER Experiment Name: At_Drought_Soil_Dry_P Parameter: Timepoint (day) Value: 13
  misc_feature: MA Experiment 20001558 PARAMETER Experiment Name: At_Drought_Soil_Dry_P Parameter: Treatment Value: Drought vs. No Drought
aatttctcaactcttgtgataaagtcttcaccttggtcgctgatttttcttctctctctcacaactatcaccaacaagaatcatgacgagctctgttagagagaagaagatcaagaccaacgggatttggttaaacgttgctgagaaaggagacgaagaagggcctttggttctgttactccatggtttccctgagacatggtactcttggcgtcaccagatcgatttcttgtctagccatggttaccacgtggtcgctccagatctcagaggctacggtgactccgattctctaccgagccacgagtcttacactgtgagtcacctagtcgctgatgtcatcggtttactcgatcactacggcactactcaggcttttgtggctgggcatgactggggagcaatcataggttggtgtctatgcttgtttagaccagaccgagtcaaaggtttcataagtctctctgttccatatttcccaagagatccaaaactcaaaccttcagattttttcaaaatttttggagatggtttatacatcactcagtttcaggtaaaacccaaatttactttcaagatttatgatgttagtgttactattatggtactcattgttgtcgttgattcgatttctcggttctgttttttacaagaaacccggaagagctgaggctgcatttgccaagcatgattgtttatcggtaatgaagaagttcttgctaataacaagaacagactacttagtggctcctcctgacacagagatcatagatcatcttgagataccgtcgacgattccagattggataacagaagaagagattcaagtgtatgcggaaaagtttcaaagatctggattcactggccctttgaattactacagatccatggatatgaattgggagatattggcgccgtggcaagactccaaaatcgtcgttcctactaagtttatagcgggagacaaagatatcggatatgaaggacctaatggaacaatggagtatgtgaaaggagaggtgttcaagatttttgtgcctaatcttgagatagttgttattgaaggtggtcatcattttatccagcaggagaagtctgaacaagtatctcaagagattctctctttcttaaacaagttaagcaaaacagagtaaaatcataccgttctctgtggccttatagaagaaccatgatgctctagtcttaagtaaactactaataatgtgtattcaagaacgaaacccgagtgtgatctccgcaataataatggttcttaaagc

SEQ ID NO: 24354 - protein, 195 aa, Arabidopsis thaliana
  peptide (1)..(195): Ceres Seq. ID no. 12324723
  misc_feature (55)..(160): Pfam Name: alpha/beta hydrolase fold Pfam Description: alpha/beta hydrolase fold
  misc_feature (1)..(160): Homolog of NCBI NO: 15230367 NR Description: epoxide hydrolase-like protein
  misc_feature (3)..(160): Homolog of NCBI NO: 34902880 NR Description: unnamed protein product [Oryza sativa (japonica
MTSSVREKKIKTNGIWLNVAEKGDEEGPLVLLLHGFPETWYSWRHQIDFLSSHGYHVVAPDLRGYGDSDSLPSHESYTVSHLVADVIGLLDHYGTTQAFVAGHDWGAIIGWCLCLFRPDRVKGFISLSVPYFPRDPKLKPSDFFKIFGDGLYITQFQVKPKFTFKIYDVSVTIMVLIVVVDSISRFCFLQETRKS

SEQ ID NO: 24355 - protein, 190 aa, Arabidopsis thaliana
  peptide (1)..(190): Ceres Seq. ID no. 12324724
  misc_feature (22)..(185): Homolog of NCBI NO: 34902880 NR Description: unnamed protein product [Oryza sativa (japonica
  misc_feature (23)..(190): Homolog of NCBI NO: 15230367 NR Description: epoxide hydrolase-like protein
MMLVLLLWYSLLSLIRFLGSVFYKKPGRAEAAFAKHDCLSVMKKFLLITRTDYLVAPPDTEIIDHLEIPSTIPDWITEEEIQVYAEKFQRSGFTGPLNYYRSMDMNWEILAPWQDSKIVVPTKFIAGDKDIGYEGPNGTMEYVKGEVFKIFVPNLEIVVIEGGHHFIQQEKSEQVSQEILSFLNKLSKTE

SEQ ID NO: 24356 - protein, 189 aa, Arabidopsis thaliana
  peptide (1)..(189): Ceres Seq. ID no. 12324725
  misc_feature (21)..(184): Homolog of NCBI NO: 34902880 NR Description: unnamed protein product [Oryza sativa (japonica
  misc_feature (22)..(189): Homolog of NCBI NO: 15230367 NR Description: epoxide hydrolase-like protein
MLVLLLWYSLLSLIRFLGSVFYKKPGRAEAAFAKHDCLSVMKKFLLITRTDYLVAPPDTEIIDHLEIPSTIPDWITEEEIQVYAEKFQRSGFTGPLNYYRSMDMNWEILAPWQDSKIVVPTKFIAGDKDIGYEGPNGTMEYVKGEVFKIFVPNLEIVVIEGGHHFIQQEKSEQVSQEILSFLNKLSKTE

SEQ ID NO: 24357 - DNA, 1362 bp, Arabidopsis thaliana
  misc_feature (1)..(1362): Ceres Seq. ID no. 12395178
  misc_feature: MA Experiment ID: 108501 Result: Up-regulated in Transcription
  misc_feature: MA Experiment 108501 PARAMETER Experiment Name: At_ap2_floral_buds_cDNA_P Parameter: Plant Line Value: ap2 (Ler.)
  misc_feature: MA Experiment 108501 PARAMETER Experiment Name: At_ap2_floral_buds_cDNA_P Parameter: Tissue Value: Closed Flower
  misc_feature: MA Experiment ID: 108569 Result: Up-regulated in Transcription
  misc_feature: MA Experiment 108569 PARAMETER Experiment Name: At_0.001%_MeJA__cDNA_P Parameter: Timepoint (hr) Value: 6
  misc_feature: MA Experiment 108569 PARAMETER Experiment Name: At_0.001%_MeJA__cDNA_P Parameter: Tissue Value: Aerial
  misc_feature: MA Experiment 108569 PARAMETER Experiment Name: At_0.001%_MeJA__cDNA_P Parameter: Treatment Value: 0.001% MeJA vs. No Treatment
  misc_feature: MA Experiment ID: 108572 Result: Up-regulated in Transcription
  misc_feature: MA Experiment 108572 PARAMETER Experiment Name: At_Drought_cDNA_P Parameter: Timepoint (hr) Value: 1
  misc_feature: MA Experiment 108572 PARAMETER Experiment Name: At_Drought_cDNA_P Parameter: Tissue Value: Aerial
  misc_feature: MA Experiment 108572 PARAMETER Experiment Name: At_Drought_cDNA_P Parameter: Treatment Value: Drought vs. No Drought
  misc_feature: MA Experiment ID: 108573 Result: Up-regulated in Transcription
  misc_feature: MA Experiment 108573 PARAMETER Experiment Name: At_Drought_cDNA_P Parameter: Timepoint (hr) Value: 6
  misc_feature: MA Experiment 108573 PARAMETER Experiment Name: At_Drought_cDNA_P Parameter: Tissue Value: Aerial
  misc_feature: MA Experiment 108573 PARAMETER Experiment Name: At_Drought_cDNA_P Parameter: Treatment Value: Drought vs. No Drought
  misc_feature: MA Experiment ID: 108607 Result: Up-regulated in Transcription
  misc_feature: MA Experiment 108607 PARAMETER Experiment Name: At_100uM_ABA_cDNA_P Parameter: Timepoint (hr) Value: 4
  misc_feature: MA Experiment 108607 PARAMETER Experiment Name: At_100uM_ABA_cDNA_P Parameter: Tissue Value: Aerial
  misc_feature: MA Experiment 108607 PARAMETER Experiment Name: At_100uM_ABA_cDNA_P Parameter: Treatment Value: 100uM ABA vs. No Treatment
  misc_feature: MA Experiment ID: 20000111 Result: Down-regulated in Transcription
  misc_feature: MA Experiment 20000111 PARAMETER Experiment Name: At_42deg_Heat_cDNA_P Parameter: Temperature (deg C) Value: 42 vs. 22
  misc_feature: MA Experiment 20000111 PARAMETER Experiment Name: At_42deg_Heat_cDNA_P Parameter: Timepoint (hr) Value: 6
  misc_feature: MA Experiment 20000111 PARAMETER Experiment Name: At_42deg_Heat_cDNA_P Parameter: Tissue Value: Aerial
  misc_feature: MA Experiment ID: 20000144 Result: Down-regulated in Transcription
  misc_feature: MA Experiment 20000144 PARAMETER Experiment Name: At_42deg_Heat_cDNA_P Parameter: Temperature (deg C) Value: 42 vs. 22
  misc_feature: MA Experiment 20000144 PARAMETER Experiment Name: At_42deg_Heat_cDNA_P Parameter: Timepoint (hr) Value: 1
  misc_feature: MA Experiment 20000144 PARAMETER Experiment Name: At_42deg_Heat_cDNA_P Parameter: Tissue Value: Aerial
atattaaccccttgtgtctctcacaatcccactagtactgaaacatagagatagacttagctcaagaaaagctaatttggtttcactctaatatatagagagagaaagagatcggagagaaaaaaatggcgggaggaacagggttgggagacacgacatacacgaaggtgtttgtgggaggattagcttgggagacgcataaggagacgatgaagaagcactttgagcagtttggagagattttggaagccgtagtcatcaccgacaaggcctccggtagatccaagggctacggattcgtgacattcagggaagcggaggcggcgaggagtgcttgtgtggatgctactccggtgatcgacgggagaagagcaaattgcaaccttgcctctctcggtcttcaaagatccaaaccctccactcctaaccatggaggaggaggcaggattaacaatatgagagtgatgatgagcacaatgcagactggctttggaccacctccaccaccacaaccacccaccttcactcactatccccatctccctctcaatctctttgggtactctccatactcgccagactactcatcattccctacgaacttatacggcatgtacggctgcacttctggaggacaatacggagtctatggaaacagaaacagcggaggcggtggactaaccgcagcagccgcatccgctactcctttttatccttgtggtggaggacatggtggggtccagttctctcaaccacaaccattttatcatcacttgtcttcttataaccctcaccattactctcctccgaccttttctatgcaacaagtgtgttttgttgtgccacaggcgtaacaggctttccgcttcaaccacctcttattccttaccgttaaagaagcttagagtctttggtagctatcaagcttcatatcatcatcttcttcttctcaggtcaagagccattctatggtttaaaggatgctcctggctaatctcaacacttagtttctctccctctgctctaaaagctaccccattttatggaatttggaggtggctttttaagcagatcccaatgggatctcctgtttcagatggtgatcatgtcgtatttgtcatctctcaccttcttgcaattgcatcttctcgagagaatgggtttctctttgagagatattgctaatggagcatcatcatcatcaatcactcatgtgccaatctcaagctgatgcatgtatcagcttaattagtttatgttgttttagcctaaggatggctaatcaacaagacaaagaaaatgtctgttaggataatgtaaaaaaaaaatcaagcaccaaaacaattttctgtttgaaagacc

SEQ ID NO: 24358 - protein, 242 aa, Arabidopsis thaliana
  peptide (1)..(242): Ceres Seq. ID no. 12395179
  misc_feature (15)..(70): Pfam Name: RNA recognition motif. (a.k.a. RRM, RBD, or RNP domain) Pfam Description: RNA recognition motif. (a.k.a. RRM, RBD, or RNP
  misc_feature (8)..(234): Homolog of NCBI NO: 25518109 NR Description: T16E15.6 protein - Arabidopsis thaliana
  misc_feature (8)..(230): Homolog of NCBI NO: 18411885 NR Description: RRM-containing protein
  misc_feature (8)..(240): Homolog of NCBI NO: 23505939 NR Description: At1g20880/F9H16_14 [Arabidopsis thaliana]
  misc_feature (8)..(240): Homolog of NCBI NO: 18394923 NR Description: RRM-containing protein
  misc_feature (8)..(222): Homolog of NCBI NO: 15010636 NR Description: At1g20880/F9H16_14 [Arabidopsis thaliana]
  misc_feature (3)..(201): Homolog of NCBI NO: 34905758 NR Description: similar to RNA-binding protein
  misc_feature (9)..(242): Homolog of NCBI NO: 14532532 NR Description: At1g33470/F10C21_14 [Arabidopsis thaliana]
  misc_feature (8)..(197): Homolog of NCBI NO: 34907334 NR Description: P0698A10.29 [Oryza sativa (japonica
  misc_feature (1)..(234): Homolog of NCBI NO: 18395177 NR Description: RRM-containing protein
  misc_feature (1)..(206): Homolog of NCBI NO: 25518372 NR Description: hypothetical protein F19G10.13 - Arabidopsis
MAGGTGLGDTTYTKVFVGGLAWETHKETMKKHFEQFGEILEAVVITDKASGRSKGYGFVTFREAEAARSACVDATPVIDGRRANCNLASLGLQRSKPSTPNHGGGGRINNMRVMMSTMQTGFGPPPPPQPPTFTHYPHLPLNLFGYSPYSPDYSSFPTNLYGMYGCTSGGQYGVYGNRNSGGGGLTAAAASATPFYPCGGGHGGVQFSQPQPFYHHLSSYNPHHYSPPTFSMQQVCFVVPQA

SEQ ID NO: 24359 - protein, 214 aa, Arabidopsis thaliana
  peptide (1)..(214): Ceres Seq. ID no. 12395180
  misc_feature (1)..(42): Pfam Name: RNA recognition motif. (a.k.a. RRM, RBD, or RNP domain) Pfam Description: RNA recognition motif. (a.k.a. RRM, RBD, or RNP
  misc_feature (1)..(206): Homolog of NCBI NO: 25518109 NR Description: T16E15.6 protein - Arabidopsis thaliana
  misc_feature (1)..(202): Homolog of NCBI NO: 18411885 NR Description: RRM-containing protein
  misc_feature (1)..(212): Homolog of NCBI NO: 23505939 NR Description: At1g20880/F9H16_14 [Arabidopsis thaliana]
  misc_feature (1)..(212): Homolog of NCBI NO: 18394923 NR Description: RRM-containing protein
  misc_feature (1)..(194): Homolog of NCBI NO: 15010636 NR Description: At1g20880/F9H16_14 [Arabidopsis thaliana]
  misc_feature (1)..(173): Homolog of NCBI NO: 34905758 NR Description: similar to RNA-binding protein
  misc_feature (1)..(214): Homolog of NCBI NO: 14532532 NR Description: At1g33470/F10C21_14 [Arabidopsis thaliana]
  misc_feature (1)..(169): Homolog of NCBI NO: 34907334 NR Description: P0698A10.29 [Oryza sativa (japonica
  misc_feature (1)..(206): Homolog of NCBI NO: 18395177 NR Description: RRM-containing protein
  misc_feature (1)..(178): Homolog of NCBI NO: 25518372 NR Description: hypothetical protein F19G10.13 - Arabidopsis
MKKHFEQFGEILEAVVITDKASGRSKGYGFVTFREAEAARSACVDATPVIDGRRANCNLASLGLQRSKPSTPNHGGGGRINNMRVMMSTMQTGFGPPPPPQPPTFTHYPHLPLNLFGYSPYSPDYSSFPTNLYGMYGCTSGGQYGVYGNRNSGGGGLTAAAASATPFYPCGGGHGGVQFSQPQPFYHHLSSYNPHHYSPPTFSMQQVCFVVPQA

SEQ ID NO: 24360 - protein, 151 aa, Arabidopsis thaliana
  peptide (1)..(151): Ceres Seq. ID no. 12395181
  misc_feature (40)..(151): Homolog of NCBI NO: 25518372 NR Description: hypothetical protein F19G10.13 - Arabidopsis
MVGSSSLNHNHFIITCLLITLTITLLRPFLCNKCVLLCHRRNRLSASTTSYSLPLKKLRVFGSYQASYHHLLLLRSRAILWFKGCSWLISTLSFSPSALKATPFYGIWRWLFKQIPMGSPVSDGDHVVFVISHLLAIASSRENGFLFERYC

SEQ ID NO: 24361 - DNA, 1176 bp, Arabidopsis thaliana
  misc_feature (1)..(1176): Ceres Seq. ID no. 12322874
  misc_feature: MA Experiment ID: 108434 Result: Up-regulated in Transcription
  misc_feature: MA Experiment 108434 PARAMETER Experiment Name: At_Root_Tips_cDNA_P Parameter: Tissue Value: Root Tips
  misc_feature: MA Experiment ID: 108461 Result: Down-regulated in Transcription
  misc_feature: MA Experiment 108461 PARAMETER Experiment Name: At_Germinating_Seeds_cDNA_P Parameter: Age (day) Value: 1 vs. 0
  misc_feature: MA Experiment 108461 PARAMETER Experiment Name: At_Germinating_Seeds_cDNA_P Parameter: Tissue Value: Germinating Seeds
  misc_feature: MA Experiment ID: 108462 Result: Down-regulated in Transcription
  misc_feature: MA Experiment 108462 PARAMETER Experiment Name: At_Germinating_Seeds_cDNA_P Parameter: Age (day) Value: 2 vs. 0
  misc_feature: MA Experiment 108462 PARAMETER Experiment Name: At_Germinating_Seeds_cDNA_P Parameter: Tissue Value: Germinating Seeds
  misc_feature: MA Experiment ID: 108463 Result: Down-regulated in Transcription
  misc_feature: MA Experiment 108463 PARAMETER Experiment Name: At_Germinating_Seeds_cDNA_P Parameter: Age (day) Value: 3 vs. 0
  misc_feature: MA Experiment 108463 PARAMETER Experiment Name: At_Germinating_Seeds_cDNA_P Parameter: Tissue Value: Germinating Seeds
  misc_feature: MA Experiment ID: 108464 Result: Down-regulated in Transcription
  misc_feature: MA Experiment 108464 PARAMETER Experiment Name: At_Germinating_Seeds_cDNA_P Parameter: Age (day) Value: 4 vs. 0
  misc_feature: MA Experiment 108464 PARAMETER Experiment Name: At_Germinating_Seeds_cDNA_P Parameter: Tissue Value: Germinating Seeds
  misc_feature: MA Experiment ID: 108573 Result: Up-regulated in Transcription
  misc_feature: MA Experiment 108573 PARAMETER Experiment Name: At_Drought_cDNA_P Parameter: Timepoint (hr) Value: 6
  misc_feature: MA Experiment 108573 PARAMETER Experiment Name: At_Drought_cDNA_P Parameter: Tissue Value: Aerial
  misc_feature: MA Experiment 108573 PARAMETER Experiment Name: At_Drought_cDNA_P Parameter: Treatment Value: Drought vs. No Drought
  misc_feature: MA Experiment ID: 108585 Result: Up-regulated in Transcription
  misc_feature: MA Experiment 108585 PARAMETER Experiment Name: At_5mM_NaNP_cDNA_P Parameter: Timepoint (hr) Value: 6
  misc_feature: MA Experiment 108585 PARAMETER Experiment Name: At_5mM_NaNP_cDNA_P Parameter: Tissue Value: Aerial
  misc_feature: MA Experiment 108585 PARAMETER Experiment Name: At_5mM_NaNP_cDNA_P Parameter: Treatment Value: null
  misc_feature: MA Experiment ID: 108595 Result: Down-regulated in Transcription
  misc_feature: MA Experiment 108595 PARAMETER Experiment Name: At_Ler-pi_Ovule_cDNA_P Parameter: Plant Line Value: null
  misc_feature: MA Experiment ID: 20000179 Result: Down-regulated in Transcription
  misc_feature: MA Experiment 20000179 PARAMETER Experiment Name: At_Germinating_Seeds_P Parameter: Age (hr) Value: 6 vs. 0
  misc_feature: MA Experiment 20000179 PARAMETER Experiment Name: At_Germinating_Seeds_P Parameter: Tissue Value: Germinating Seeds
  misc_feature: MA Experiment ID: 20000180 Result: Down-regulated in Transcription
  misc_feature: MA Experiment 20000180 PARAMETER Experiment Name: At_Germinating_Seeds_P Parameter: Age (hr) Value: 24 vs. 0
  misc_feature: MA Experiment 20000180 PARAMETER Experiment Name: At_Germinating_Seeds_P Parameter: Tissue Value: Germinating Seeds
atactgtcgtctccctggattctatcttctcgattttggtgattcgaacacgattttacctatccttgagcgatctcgatcccaactttttgagttgattttatttcaggagttttcaaaaaatctgttgttaagtggtgaatcggaaaatgtcgcagtcttccgtcgatataccgccaaaaggtgggtttagcttcgatctgtgcaaaaggaatgatatgctgacacagaagggtcttaaagcgccgtcgtttctcaagactggaacgactatcgttggattgatatttaaggatggtgtaatacttggggctgatacacgggcaactgaagggcctattgtggctgataagaactgtgagaagattcactacatggcaccaaacatttactgttgtggtgcaggaaccgctgctgacactgaagcagtaactgatatggtcagctcacagctgcggttgcatagataccagactggccgagattctcgagtcgttactgcattgacccttctcaaaaaacatcttttcagctaccaaggccatgtctcagctgctcttgtgcttggtggagttgatattaccgggcctcatcttcacacgatatacccacacggttctactgacactctaccatttgctacaatgggttctggttcccttgctgccatgtcagtgtttgaagcaaagtataaagaaggtctaactagagatgaaggaatcaagttggttgctgaagccatatgctctggtatattcaacgaccttggtagtggtagcaatgtggatatctgtgtgatcactaaagggcacaaggaatacttgaggaattacatggaaccaaacccaagaacctatgttagcagcaaaggctattcattcaccaagaaaaccgaggttctactcaccaaaattacaccattattggagcgagtcgaaattgtagaagtggctggtgaagctatggaggaatgaatctcgtgtgagagacagatactaagagtgaaaccattgttctacctcacatgacagtcatgtttacgttttctactttgttcaatatgaacgactaaaatcgaatcgtagttgcctccatttcgtctttaaatttggcttgaacttgtgattaatgagtatggatgattcggttttgaaatttagctctcacataattttc

SEQ ID NO: 24362 - protein, 274 aa, Arabidopsis thaliana
  peptide (1)..(274): Ceres Seq. ID no. 12322875
  misc_feature (36)..(217): Pfam Name: Proteasome A-type and B-type Pfam Description: Proteasome A-type and B-type
  misc_feature (10)..(265): Homolog of NCBI NO: 2582506 NR Description: 20S proteasome beta2 subunit [Drosophila
  misc_feature (10)..(265): Homolog of NCBI NO: 24664391 NR Description: Proteasome beta2 subunit CG3329-PA
  misc_feature (57)..(274): Homolog of NCBI NO: 2511576 NR Description: multicatalytic endopeptidase [Arabidopsis
  misc_feature (5)..(274): Homolog of NCBI NO: 8671504 NR Description: beta 2 subunit of 20S proteasome
  misc_feature (1)..(248): Homolog of NCBI NO: 30688785 NR Description: 20S proteasome beta subunit B (PBB1) [Arabidopsis
  misc_feature (1)..(274): Homolog of NCBI NO: 2511578 NR Description: multicatalytic endopeptidase [Arabidopsis
  misc_feature (1)..(274): Homolog of NCBI NO: 18405364 NR Description: 20S proteasome beta subunit B (PBB1)
  misc_feature (1)..(274): Homolog of NCBI NO: 21593337 NR Description: 20S proteasome beta subunit PBB2 [Arabidopsis
  misc_feature (1)..(274): Homolog of NCBI NO: 20260224 NR Description: 20S proteasome beta subunit PBB2 [Arabidopsis
  misc_feature (1)..(274): Homolog of NCBI NO: 15237451 NR Description: 20S proteasome beta subunit B (PBB2)
MSQSSVDIPPKGGFSFDLCKRNDMLTQKGLKAPSFLKTGTTIVGLIFKDGVILGADTRATEGPIVADKNCEKIHYMAPNIYCCGAGTAADTEAVTDMVSSQLRLHRYQTGRDSRVVTALTLLKKHLFSYQGHVSAALVLGGVDITGPHLHTIYPHGSTDTLPFATMGSGSLAAMSVFEAKYKEGLTRDEGIKLVAEAICSGIFNDLGSGSNVDICVITKGHKEYLRNYMEPNPRTYVSSKGYSFTKKTEVLLTKITPLLERVEIVEVAGEAMEE

SEQ ID NO: 24363 - protein, 251 aa, Arabidopsis thaliana
  peptide (1)..(251): Ceres Seq. ID no. 12322876
  misc_feature (13)..(194): Pfam Name: Proteasome A-type and B-type Pfam Description: Proteasome A-type and B-type
  misc_feature (1)..(242): Homolog of NCBI NO: 2582506 NR Description: 20S proteasome beta2 subunit [Drosophila
  misc_feature (1)..(242): Homolog of NCBI NO: 24664391 NR Description: Proteasome beta2 subunit CG3329-PA
  misc_feature (34)..(251): Homolog of NCBI NO: 2511576 NR Description: multicatalytic endopeptidase [Arabidopsis
  misc_feature (1)..(251): Homolog of NCBI NO: 8671504 NR Description: beta 2 subunit of 20S proteasome
  misc_feature (1)..(225): Homolog of NCBI NO: 30688785 NR Description: 20S proteasome beta subunit B (PBB1) [Arabidopsis
  misc_feature (1)..(251): Homolog of NCBI NO: 2511578 NR Description: multicatalytic endopeptidase [Arabidopsis
  misc_feature (1)..(251): Homolog of NCBI NO: 18405364 NR Description: 20S proteasome beta subunit B (PBB1)
  misc_feature (1)..(251): Homolog of NCBI NO: 21593337 NR Description: 20S proteasome beta subunit PBB2 [Arabidopsis
  misc_feature (1)..(251): Homolog of NCBI NO: 20260224 NR Description: 20S proteasome beta subunit PBB2 [Arabidopsis
  misc_feature (1)..(251): Homolog of NCBI NO: 15237451 NR Description: 20S proteasome beta subunit B (PBB2)
MLTQKGLKAPSFLKTGTTIVGLIFKDGVILGADTRATEGPIVADKNCEKIHYMAPNIYCCGAGTAADTEAVTDMVSSQLRLHRYQTGRDSRVVTALTLLKKHLFSYQGHVSAALVLGGVDITGPHLHTIYPHGSTDTLPFATMGSGSLAAMSVFEAKYKEGLTRDEGIKLVAEAICSGIFNDLGSGSNVDICVITKGHKEYLRNYMEPNPRTYVSSKGYSFTKKTEVLLTKITPLLERVEIVEVAGEAMEE

SEQ ID NO: 24364 - protein, 199 aa, Arabidopsis thaliana
  peptide (1)..(199): Ceres Seq. ID no. 12322877
  misc_feature (1)..(142): Pfam Name: Proteasome A-type and B-type Pfam Description: Proteasome A-type and B-type
  misc_feature (1)..(190): Homolog of NCBI NO: 2582506 NR Description: 20S proteasome beta2 subunit [Drosophila
  misc_feature (1)..(190): Homolog of NCBI NO: 24664391 NR Description: Proteasome beta2 subunit CG3329-PA
  misc_feature (1)..(199): Homolog of NCBI NO: 2511576 NR Description: multicatalytic endopeptidase [Arabidopsis
  misc_feature (1)..(199): Homolog of NCBI NO: 8671504 NR Description: beta 2 subunit of 20S proteasome
  misc_feature (1)..(173): Homolog of NCBI NO: 30688785 NR Description: 20S proteasome beta subunit B (PBB1) [Arabidopsis
  misc_feature (1)..(199): Homolog of NCBI NO: 2511578 NR Description: multicatalytic endopeptidase [Arabidopsis
  misc_feature (1)..(199): Homolog of NCBI NO: 18405364 NR Description: 20S proteasome beta subunit B (PBB1)
  misc_feature (1)..(199): Homolog of NCBI NO: 21593337 NR Description: 20S proteasome beta subunit PBB2 [Arabidopsis
  misc_feature (1)..(199): Homolog of NCBI NO: 20260224 NR Description: 20S proteasome beta subunit PBB2 [Arabidopsis
  misc_feature (1)..(199): Homolog of NCBI NO: 15237451 NR Description: 20S proteasome beta subunit B (PBB2)
MAPNIYCCGAGTAADTEAVTDMVSSQLRLHRYQTGRDSRVVTALTLLKKHLFSYQGHVSAALVLGGVDITGPHLHTIYPHGSTDTLPFATMGSGSLAAMSVFEAKYKEGLTRDEGIKLVAEAICSGIFNDLGSGSNVDICVITKGHKEYLRNYMEPNPRTYVSSKGYSFTKKTEVLLTKITPLLERVEIVEVAGEAMEE

SEQ ID NO: 24365 - DNA, 2121 bp, Arabidopsis thaliana
  misc_feature (1)..(2121): Ceres Seq. ID no. 12601883
  misc_feature: MA Experiment ID: 20000169 Result: Down-regulated in Transcription
  misc_feature: MA Experiment 20000169 PARAMETER Experiment Name: At_100uM_ABA_P Parameter: Age (day) Value: 14
  misc_feature: MA Experiment 20000169 PARAMETER Experiment Name: At_100uM_ABA_P Parameter: Organism Value: A. thaliana
  misc_feature: MA Experiment 20000169 PARAMETER Experiment Name: At_100uM_ABA_P Parameter: Plant Line Value: WS
  misc_feature: MA Experiment 20000169 PARAMETER Experiment Name: At_100uM_ABA_P Parameter: Timepoint (hr) Value: 6
  misc_feature: MA Experiment 20000169 PARAMETER Experiment Name: At_100uM_ABA_P Parameter: Tissue Value: Aerial
  misc_feature: MA Experiment 20000169 PARAMETER Experiment Name: At_100uM_ABA_P Parameter: Treatment Value: 100uM ABA vs. No Treatment
  misc_feature: MA Experiment ID: 20000180 Result: Up-regulated in Transcription
  misc_feature: MA Experiment 20000180 PARAMETER Experiment Name: At_Germinating_Seeds_P Parameter: Age (hr) Value: 24 vs. 0
  misc_feature: MA Experiment 20000180 PARAMETER Experiment Name: At_Germinating_Seeds_P Parameter: Tissue Value: Germinating Seeds
  misc_feature: MA Experiment ID: 20000214 Result: Up-regulated in Transcription
  misc_feature: MA Experiment 20000214 PARAMETER Experiment Name: At_4deg_Cold_P Parameter: Timepoint (hr) Value: 6
  misc_feature: MA Experiment ID: 20000234 Result: Up-regulated in Transcription
  misc_feature: MA Experiment 20000234 PARAMETER Experiment Name: At_Siliques_P Parameter: Age (day) Value: 21
  misc_feature: MA Experiment 20000234 PARAMETER Experiment Name: At_Siliques_P Parameter: Organism Value: A. thaliana
  misc_feature: MA Experiment 20000234 PARAMETER Experiment Name: At_Siliques_P Parameter: Plant Line Value: WS
  misc_feature: MA Experiment 20000234 PARAMETER Experiment Name: At_Siliques_P Parameter: Tissue Value: Less Than 5mm Siliques vs. Whole Plant
  misc_feature: MA Experiment ID: 20000436 Result: Down-regulated in Transcription
  misc_feature: MA Experiment 20000436 PARAMETER Experiment Name: At_Drought_P Parameter: Age (day) Value: 7
  misc_feature: MA Experiment 20000436 PARAMETER Experiment Name: At_Drought_P Parameter: Organism Value: A. thaliana
  misc_feature: MA Experiment 20000436 PARAMETER Experiment Name: At_Drought_P Parameter: Plant Line Value: WS
  misc_feature: MA Experiment 20000436 PARAMETER Experiment Name: At_Drought_P Parameter: Timepoint (hr) Value: 12
  misc_feature: MA Experiment 20000436 PARAMETER Experiment Name: At_Drought_P Parameter: Tissue Value: Whole Plant
  misc_feature: MA Experiment 20000436 PARAMETER Experiment Name: At_Drought_P Parameter: Treatment Value: Drought vs. No Drought
  misc_feature: MA Experiment ID: 20000437 Result: Down-regulated in Transcription
  misc_feature: MA Experiment 20000437 PARAMETER Experiment Name: At_Drought_P Parameter: Age (day) Value: 8
  misc_feature: MA Experiment 20000437 PARAMETER Experiment Name: At_Drought_P Parameter: Organism Value: A. thaliana
  misc_feature: MA Experiment 20000437 PARAMETER Experiment Name: At_Drought_P Parameter: Plant Line Value: WS
  misc_feature: MA Experiment 20000437 PARAMETER Experiment Name: At_Drought_P Parameter: Timepoint (hr) Value: 24
  misc_feature: MA Experiment 20000437 PARAMETER Experiment Name: At_Drought_P Parameter: Tissue Value: Whole Plant
  misc_feature: MA Experiment 20000437 PARAMETER Experiment Name: At_Drought_P Parameter: Treatment Value: Drought vs. No Drought
  misc_feature: MA Experiment ID: 20000438 Result: Up-regulated in Transcription
  misc_feature: MA Experiment 20000438 PARAMETER Experiment Name: At_Shoots__P Parameter: Age (day) Value: 14
  misc_feature: MA Experiment 20000438 PARAMETER Experiment Name: At_Shoots__P Parameter: Tissue Value: Shoots vs. Whole Plant
  misc_feature: MA Experiment ID: 20000439 Result: Down-regulated in Transcription
  misc_feature: MA Experiment 20000439 PARAMETER Experiment Name: At_Roots__P Parameter: Age (day) Value: 14 vs. 21
  misc_feature: MA Experiment 20000439 PARAMETER Experiment Name: At_Roots__P Parameter: Organism Value: A. thaliana
  misc_feature: MA Experiment 20000439 PARAMETER Experiment Name: At_Roots__P Parameter: Tissue Value: Roots vs. Whole Plant
  misc_feature: MA Experiment ID: 20000451 Result: Up-regulated in Transcription
  misc_feature: MA Experiment 20000451 PARAMETER Experiment Name: At_CS6879_Shoots-Roots_P Parameter: Age (day) Value: 14
  misc_feature: MA Experiment 20000451 PARAMETER Experiment Name: At_CS6879_Shoots-Roots_P Parameter: Organism Value: A. thaliana
  misc_feature: MA Experiment 20000451 PARAMETER Experiment Name: At_CS6879_Shoots-Roots_P Parameter: Plant Line Value: CS6879 vs. WS
  misc_feature: MA Experiment 20000451 PARAMETER Experiment Name: At_CS6879_Shoots-Roots_P Parameter: Tissue Value: Roots
  misc_feature: MA Experiment ID: 20000794 Result: Down-regulated in Transcription
  misc_feature: MA Experiment 20000794 PARAMETER Experiment Name: At_Petals_P Parameter: Age (day) Value: 23-25 days
  misc_feature: MA Experiment 20000794 PARAMETER Experiment Name: At_Petals_P Parameter: Plant Line Value: WS
  misc_feature: MA Experiment 20000794 PARAMETER Experiment Name: At_Petals_P Parameter: Tissue Value: Petals vs. Whole plant
  misc_feature: MA Experiment ID: 20001248 Result: Down-regulated in Transcription
  misc_feature: MA Experiment 20001248 PARAMETER Experiment Name: At_Far-red-induction_P Parameter: Age (day) Value: 7
  misc_feature: MA Experiment 20001248 PARAMETER Experiment Name: At_Far-red-induction_P Parameter: Light Value: Far-red vs. White
  misc_feature: MA Experiment 20001248 PARAMETER Experiment Name: At_Far-red-induction_P Parameter: Organism Value: A. thaliana
  misc_feature: MA Experiment 20001248 PARAMETER Experiment Name: At_Far-red-induction_P Parameter: Plant Line Value: Columbia
  misc_feature: MA Experiment 20001248 PARAMETER Experiment Name: At_Far-red-induction_P Parameter: Timepoint (hr) Value: 4
  misc_feature: MA Experiment 20001248 PARAMETER Experiment Name: At_Far-red-induction_P Parameter: Tissue Value: Whole Plant
  misc_feature: MA Experiment ID: 20001450 Result: Down-regulated in Transcription
  misc_feature: MA Experiment 20001450 PARAMETER Experiment Name: At_Far-red-induction_P Parameter: Age (day) Value: 7
  misc_feature: MA Experiment 20001450 PARAMETER Experiment Name: At_Far-red-induction_P Parameter: Light Value: Far-red vs. White
  misc_feature: MA Experiment 20001450 PARAMETER Experiment Name: At_Far-red-induction_P Parameter: Organism Value: A. thaliana
  misc_feature: MA Experiment 20001450 PARAMETER Experiment Name: At_Far-red-induction_P Parameter: Plant Line Value: Columbia
  misc_feature: MA Experiment 20001450 PARAMETER Experiment Name: At_Far-red-induction_P Parameter: Timepoint (hr) Value: 8
  misc_feature: MA Experiment 20001450 PARAMETER Experiment Name: At_Far-red-induction_P Parameter: Tissue Value: Whole Plant
  misc_feature: MA Experiment ID: 20001451 Result: Down-regulated in Transcription
  misc_feature: MA Experiment 20001451 PARAMETER Experiment Name: At_Far-red-induction_P Parameter: Age (day) Value: 7
  misc_feature: MA Experiment 20001451 PARAMETER Experiment Name: At_Far-red-induction_P Parameter: Light Value: Far-red vs. White
  misc_feature: MA Experiment 20001451 PARAMETER Experiment Name: At_Far-red-induction_P Parameter: Organism Value: A. thaliana
  misc_feature: MA Experiment 20001451 PARAMETER Experiment Name: At_Far-red-induction_P Parameter: Plant Line Value: Columbia
  misc_feature: MA Experiment 20001451 PARAMETER Experiment Name: At_Far-red-induction_P Parameter: Timepoint (hr) Value: 24
  misc_feature: MA Experiment 20001451 PARAMETER Experiment Name: At_Far-red-induction_P Parameter: Tissue Value: Whole Plant
  misc_feature: MA Experiment ID: 20001757 Result: Up-regulated in Transcription
  misc_feature: MA Experiment 20001757 PARAMETER Experiment Name: At_50mM_NH4NO3_L-to-H_P Parameter: Timepoint (hr) Value: 6
  misc_feature: MA Experiment 20001757 PARAMETER Experiment Name: At_50mM_NH4NO3_L-to-H_P Parameter: Tissue Value: Leaf
  misc_feature: MA Experiment 20001757 PARAMETER Experiment Name: At_50mM_NH4NO3_L-to-H_P Parameter: Treatment Value: 50mM NH4NO3 vs 100mM Mannitol
  misc_feature: MA Experiment ID: 20001904 Result: Down-regulated in Transcription
  misc_feature: MA Experiment 20001904 PARAMETER Experiment Name: At_Drought_Reproduction_P Parameter: Age (day) Value: 37
  misc_feature: MA Experiment 20001904 PARAMETER Experiment Name: At_Drought_Reproduction_P Parameter: Organism Value: A. thaliana
  misc_feature: MA Experiment 20001904 PARAMETER Experiment Name: At_Drought_Reproduction_P Parameter: Plant Line Value: WS
  misc_feature: MA Experiment 20001904 PARAMETER Experiment Name: At_Drought_Reproduction_P Parameter: Timepoint (day) Value: 7
  misc_feature: MA Experiment 20001904 PARAMETER Experiment Name: At_Drought_Reproduction_P Parameter: Tissue Value: Rosettes
  misc_feature: MA Experiment 20001904 PARAMETER Experiment Name: At_Drought_Reproduction_P Parameter: Treatment Value: Drought vs. No Drought
  misc_feature: MA Experiment ID: 20001906 Result: Down-regulated in Transcription
  misc_feature: MA Experiment 20001906 PARAMETER Experiment Name: At_Drought_Reproduction_P Parameter: Age (day) Value: 35
  misc_feature: MA Experiment 20001906 PARAMETER Experiment Name: At_Drought_Reproduction_P Parameter: Organism Value: A. thaliana
  misc_feature: MA Experiment 20001906 PARAMETER Experiment Name: At_Drought_Reproduction_P Parameter: Plant Line Value: WS
  misc_feature: MA Experiment 20001906 PARAMETER Experiment Name: At_Drought_Reproduction_P Parameter: Timepoint (day) Value: 5
  misc_feature: MA Experiment 20001906 PARAMETER Experiment Name: At_Drought_Reproduction_P Parameter: Tissue Value: Siliques
  misc_feature: MA Experiment 20001906 PARAMETER Experiment Name: At_Drought_Reproduction_P Parameter: Treatment Value: Drought vs. No Drought
gcaagtggcatcgtttttttctttctcatataaatcttttcacattagagtcggcataaaaattccatttcgtatttttctcttcttcctcttctgaaaaattagggtttgagttcttcttctaatcgatcagaaagatgggtggaggaaacgcacagaaatcagccatggctcgtgccaaaaacttggagaaggctaaggctgcaggaaaaggtagccaattggaagctaacaagaaagctatgtcgattcagtgcaaggtttgtatgcaaacattcatctgcacgacatcggaagtgaaatgcagggagcacgcggaggcgaagcatccgaaagccgatgttgtcgcttgtttccctcacctcaagaagtgatgaaagctattatctcaactataaaggattccaatgtataacgtatggatcctcatctttcctatgtttgtatcaaagtctcgacaaattttatggtttctatttctctctacttgtttcaacaataagtctcttgctatgattatataatgaagctttgtgtggaacctttttttttaatataagttggcttcttttcgctaaaaaaaaaaaaagaaaaaaaaaaaaaaaagagctcttttttttttttttttgcttgcaaaaaaattgtagctaaatgcaaaagctcaattaagctaaaagacttttgattattctacaaagtaagagtgcgtctgtagagaacttcatcatcactctcatcttcttcctcatcagtcactatctcgccaccaggcatttctaacttcccacccatgtcaaacgttggaccttcagtatctggatcaatgaagttaccttgtaatcgttcctcgaatctttggtcactgcaattgaggaaccagttcaatgaactcctgattcctttgctctgtagtttttggtacctcggtttgattcttgactccaagctataagtaaagtactcagggtactccacgagttctttcatcggtctccccatctcggtcttgtaaaagtagtaactattcttcatgagttccactcgggaacagaggatctgaggacatctcacaaccattttcgcaatgtcctcaacttgaaatgccctgcccaagagaaactcaatgggtttcattatcacattctgcttaagacttacaatctgtggcattttctctaccacacgagcaaatccttcaggatcaatcttgagcttcaagctgaaaaagtactgttgtgtagacatcttggctttcactggtaacccgagaatttgaggatattgagctataagcaaaggtagtagttctttcttgacgccaaaactaatcaagcaatctacgtttggtttaacagtctcctcgagttaattaaattaatccccccccccccccccgaattaagcaaaagaagaagaagaagaagtaatggcttcctctatgctctcctctgccgctgtggttacctccccggctcaagccaccatggtcgctccattcactggtttgaagtcatccgcttctttcccggtcacccgcaaggccaacaacgacattacttccatcacaagcaatgggggaagagttagctgcatgaaggtgtggccaccaatcggaaagaagaagtttgggactctatcttacctccctgaccttactgacgtcgaattggctaaggaagttgactaccttctccgcaacaagtggattccttgtgttgaattcgagttggagcacggatttgtgtaccgtgagcacggaaacactcccggatactacgatggacggtactggacaatgtggaagcttccattgttcggatgcaccgactctgctcaagtattgaaggaagttgaagaatgcaagaaggagtacccgggcgccttcattaggatcatcggattcgacaacacccgtcaagtccaatgcatcagtttcattgcctacaagcccccaagcttcactgatgcttaaatccttttctggaatattcaatgttgactatccggaacccaattttgtatggtcaatgtaaatttaagtaattattttgccaaagtgaaaaaactgaaggtttgtttttctatcgtttcctctataaaaatctctattcatatcacttc

SEQ ID NO: 24366 - protein, 181 aa, Arabidopsis thaliana
  peptide (1)..(181): Ceres Seq. ID no. 12601884
  misc_feature (56)..(175): Pfam Name: Ribulose bisphosphate carboxylase, small chain Pfam Description: Ribulose bisphosphate carboxylase, small chain
  misc_feature (56)..(175): Pfam Name: Ribulose bisphosphate carboxylase, small chain Pfam Description: Ribulose bisphosphate carboxylase, small chain
  misc_feature (56)..(175): Pfam Name: Ribulose bisphosphate carboxylase, small chain Pfam Description: Ribulose bisphosphate carboxylase, small chain
  misc_feature (56)..(175): Pfam Name: Ribulose bisphosphate carboxylase, small chain Pfam Description: Ribulose bisphosphate carboxylase, small chain
  misc_feature (1)..(179): Homolog of NCBI NO: 68063 NR Description: ribulose-bisphosphate carboxylase (EC 4.1.1.39)
  misc_feature (1)..(181): Homolog of NCBI NO: 132154 NR Description: Ribulose bisphosphate carboxylase small chain,
  misc_feature (1)..(179): Homolog of NCBI NO: 15219826 NR Description: ribulose-bisphosphate carboxylase small unit,
  misc_feature (1)..(181): Homolog of NCBI NO: 266891 NR Description: Ribulose bisphosphate carboxylase small chain,
  misc_feature (1)..(181): Homolog of NCBI NO: 132091 NR Description: Ribulose bisphosphate carboxylase small chain F1,
  misc_feature (1)..(179): Homolog of NCBI NO: 68063 NR Description: ribulose-bisphosphate carboxylase (EC 4.1.1.39)
  misc_feature (1)..(179): Homolog of NCBI NO: 15219826 NR Description: ribulose-bisphosphate carboxylase small unit,
  misc_feature (1)..(181): Homolog of NCBI NO: 132091 NR Description: Ribulose bisphosphate carboxylase small chain F1,
  misc_feature (1)..(181): Homolog of NCBI NO: 266891 NR Description: Ribulose bisphosphate carboxylase small chain,
  misc_feature (1)..(179): Homolog of NCBI NO: 15219826 NR Description: ribulose-bisphosphate carboxylase small unit,
  misc_feature (1)..(181): Homolog of NCBI NO: 132154 NR Description: Ribulose bisphosphate carboxylase small chain,
  misc_feature (1)..(179): Homolog of NCBI NO: 68063 NR Description: ribulose-bisphosphate carboxylase (EC 4.1.1.39)
  misc_feature (1)..(181): Homolog of NCBI NO: 15240912 NR Description: ribulose bisphosphate carboxylase small chain 1b
  misc_feature (1)..(181): Homolog of NCBI NO: 68061 NR Description: ribulose-bisphosphate carboxylase (EC 4.1.1.39)
  misc_feature (1)..(181): Homolog of NCBI NO: 15240903 NR Description: ribulose bisphosphate carboxylase small chain 2b
  misc_feature (1)..(181): Homolog of NCBI NO: 68060 NR Description: ribulose-bisphosphate carboxylase (EC 4.1.1.39)
  misc_feature (1)..(181): Homolog of NCBI NO: 15240901 NR Description: ribulose bisphosphate carboxylase small chain 3b
  misc_feature (1)..(181): Homolog of NCBI NO: 15240912 NR Description: ribulose bisphosphate carboxylase small chain 1b
  misc_feature (1)..(181): Homolog of NCBI NO: 68061 NR Description: ribulose-bisphosphate carboxylase (EC 4.1.1.39)
  misc_feature (1)..(181): Homolog of NCBI NO: 15240903 NR Description: ribulose bisphosphate carboxylase small chain 2b
  misc_feature (1)..(181): Homolog of NCBI NO: 68060 NR Description: ribulose-bisphosphate carboxylase (EC 4.1.1.39)
  misc_feature (1)..(181): Homolog of NCBI NO: 15240901 NR Description: ribulose bisphosphate carboxylase small chain 3b
  misc_feature (1)..(181): Homolog of NCBI NO: 132091 NR Description: Ribulose bisphosphate carboxylase small chain F1,
  misc_feature (1)..(181): Homolog of NCBI NO: 266891 NR Description: Ribulose bisphosphate carboxylase small chain,
  misc_feature (1)..(179): Homolog of NCBI NO: 15219826 NR Description: ribulose-bisphosphate carboxylase small unit,
  misc_feature (1)..(181): Homolog of NCBI NO: 132154 NR Description: Ribulose bisphosphate carboxylase small chain,
  misc_feature (1)..(179): Homolog of NCBI NO: 68063 NR Description: ribulose-bisphosphate carboxylase (EC 4.1.1.39)
  misc_feature (1)..(181): Homolog of NCBI NO: 15240912 NR Description: ribulose bisphosphate carboxylase small chain 1b
  misc_feature (1)..(181): Homolog of NCBI NO: 68061 NR Description: ribulose-bisphosphate carboxylase (EC 4.1.1.39)
  misc_feature (1)..(181): Homolog of NCBI NO: 15240903 NR Description: ribulose bisphosphate carboxylase small chain 2b
  misc_feature (1)..(181): Homolog of NCBI NO: 68060 NR Description: ribulose-bisphosphate carboxylase (EC 4.1.1.39)
  misc_feature (1)..(181): Homolog of NCBI NO: 15240901 NR Description: ribulose bisphosphate carboxylase small chain 3b
  misc_feature (1)..(181): Homolog of NCBI NO: 132091 NR Description: Ribulose bisphosphate carboxylase small chain F1,
  misc_feature (1)..(181): Homolog of NCBI NO: 266891 NR Description: Ribulose bisphosphate carboxylase small chain,
  misc_feature (1)..(181): Homolog of NCBI NO: 132154 NR Description: Ribulose bisphosphate carboxylase small chain,
  misc_feature (1)..(181): Homolog of NCBI NO: 15240901 NR Description: ribulose bisphosphate carboxylase small chain 3b
  misc_feature (1)..(181): Homolog of NCBI NO: 68060 NR Description: ribulose-bisphosphate carboxylase (EC 4.1.1.39)
  misc_feature (1)..(181): Homolog of NCBI NO: 15240903 NR Description: ribulose bisphosphate carboxylase small chain 2b
  misc_feature (1)..(181): Homolog of NCBI NO: 68061 NR Description: ribulose-bisphosphate carboxylase (EC 4.1.1.39)
  misc_feature (1)..(181): Homolog of NCBI NO: 15240912 NR Description: ribulose bisphosphate carboxylase small chain 1b
MASSMLSSAAVVTSPAQATMVAPFTGLKSSASFPVTRKANNDITSITSNGGRVSCMKVWPPIGKKKFGTLSYLPDLTDVELAKEVDYLLRNKWIPCVEFELEHGFVYREHGNTPGYYDGRYWTMWKLPLFGCTDSAQVLKEVEECKKEYPGAFIRIIGFDNTRQVQCISFIAYKPPSFTDA

SEQ ID NO: 24367 - protein, 177 aa, Arabidopsis thaliana
  peptide (1)..(177): Ceres Seq. ID no. 12601885
  misc_feature (52)..(171): Pfam Name: Ribulose bisphosphate carboxylase, small chain Pfam Description: Ribulose bisphosphate carboxylase, small chain
  misc_feature (52)..(171): Pfam Name: Ribulose bisphosphate carboxylase, small chain Pfam Description: Ribulose bisphosphate carboxylase, small chain
  misc_feature (52)..(171): Pfam Name: Ribulose bisphosphate carboxylase, small chain Pfam Description: Ribulose bisphosphate carboxylase, small chain
  misc_feature (52)..(171): Pfam Name: Ribulose bisphosphate carboxylase, small chain Pfam Description: Ribulose bisphosphate carboxylase, small chain
  misc_feature (1)..(175): Homolog of NCBI NO: 68063 NR Description: ribulose-bisphosphate carboxylase (EC 4.1.1.39)
  misc_feature (1)..(177): Homolog of NCBI NO: 132154 NR Description: Ribulose bisphosphate carboxylase small chain,
  misc_feature (1)..(175): Homolog of NCBI NO: 15219826 NR Description: ribulose-bisphosphate carboxylase small unit,
  misc_feature (1)..(177): Homolog of NCBI NO: 266891 NR Description: Ribulose bisphosphate carboxylase small chain,
  misc_feature (1)..(177): Homolog of NCBI NO: 132091 NR Description: Ribulose bisphosphate carboxylase small chain F1,
  misc_feature (1)..(175): Homolog of NCBI NO: 68063 NR Description: ribulose-bisphosphate carboxylase (EC 4.1.1.39)
  misc_feature (1)..(175): Homolog of NCBI NO: 15219826 NR Description: ribulose-bisphosphate carboxylase small unit,
  misc_feature (1)..(177): Homolog of NCBI NO: 132091 NR Description: Ribulose bisphosphate carboxylase small chain F1,
  misc_feature (1)..(177): Homolog of NCBI NO: 266891 NR Description: Ribulose bisphosphate carboxylase small chain,
  misc_feature (1)..(175): Homolog of NCBI NO: 15219826 NR Description: ribulose-bisphosphate carboxylase small unit,
  misc_feature (1)..(177): Homolog of NCBI NO: 132154 NR Description: Ribulose bisphosphate carboxylase small chain,
  misc_feature (1)..(175): Homolog of NCBI NO: 68063 NR Description: ribulose-bisphosphate carboxylase (EC 4.1.1.39)
  misc_feature (1)..(177): Homolog of NCBI NO: 15240912 NR Description: ribulose bisphosphate carboxylase small chain 1b
  misc_feature (1)..(177): Homolog of NCBI NO: 68061 NR Description: ribulose-bisphosphate carboxylase (EC 4.1.1.39)
  misc_feature (1)..(177): Homolog of NCBI NO: 15240903 NR Description: ribulose bisphosphate carboxylase small chain 2b
  misc_feature (1)..(177): Homolog of NCBI NO: 68060 NR Description: ribulose-bisphosphate carboxylase (EC 4.1.1.39)
  misc_feature (1)..(177): Homolog of NCBI NO: 15240901 NR Description: ribulose bisphosphate carboxylase small chain 3b
  misc_feature (1)..(177): Homolog of NCBI NO: 15240901 NR Description: ribulose bisphosphate carboxylase small chain 3b
  misc_feature (1)..(177): Homolog of NCBI NO: 132091 NR Description: Ribulose bisphosphate carboxylase small chain F1,
  misc_feature (1)..(177): Homolog of NCBI NO: 266891 NR Description: Ribulose bisphosphate carboxylase small chain,
  misc_feature (1)..(175): Homolog of NCBI NO: 15219826 NR Description: ribulose-bisphosphate carboxylase small unit,
  misc_feature (1)..(177): Homolog of NCBI NO: 132154 NR Description: Ribulose bisphosphate carboxylase small chain,
  misc_feature (1)..(175): Homolog of NCBI NO: 68063 NR Description: ribulose-bisphosphate carboxylase (EC 4.1.1.39)
  misc_feature (1)..(177): Homolog of NCBI NO: 15240912 NR Description: ribulose bisphosphate carboxylase small chain 1b
  misc_feature (1)..(177): Homolog of NCBI NO: 68061 NR Description: ribulose-bisphosphate carboxylase (EC 4.1.1.39)
  misc_feature (1)..(177): Homolog of NCBI NO: 15240903 NR Description: ribulose bisphosphate carboxylase small chain 2b
  misc_feature (1)..(177): Homolog of NCBI NO: 68060 NR Description: ribulose-bisphosphate carboxylase (EC 4.1.1.39)
  misc_feature (1)..(177): Homolog of NCBI NO: 15240912 NR Description: ribulose bisphosphate carboxylase small chain 1b
  misc_feature (1)..(177): Homolog of NCBI NO: 68061 NR Description: ribulose-bisphosphate carboxylase (EC 4.1.1.39)
  misc_feature (1)..(177): Homolog of NCBI NO: 15240903 NR Description: ribulose bisphosphate carboxylase small chain 2b
  misc_feature (1)..(177): Homolog of NCBI NO: 68060 NR Description: ribulose-bisphosphate carboxylase (EC 4.1.1.39)
  misc_feature (1)..(177): Homolog of NCBI NO: 15240901 NR Description: ribulose bisphosphate carboxylase small chain 3b
  misc_feature (1)..(177): Homolog of NCBI NO: 132091 NR Description: Ribulose bisphosphate carboxylase small chain F1,
  misc_feature (1)..(177): Homolog of NCBI NO: 266891 NR Description: Ribulose bisphosphate carboxylase small chain,
  misc_feature (1)..(177): Homolog of NCBI NO: 132154 NR Description: Ribulose bisphosphate carboxylase small chain,
  misc_feature (1)..(177): Homolog of NCBI NO: 15240901 NR Description: ribulose bisphosphate carboxylase small chain 3b
  misc_feature (1)..(177): Homolog of NCBI NO: 68060 NR Description: ribulose-bisphosphate carboxylase (EC 4.1.1.39)
  misc_feature (1)..(177): Homolog of NCBI NO: 15240903 NR Description: ribulose bisphosphate carboxylase small chain 2b
  misc_feature (1)..(177): Homolog of NCBI NO: 68061 NR Description: ribulose-bisphosphate carboxylase (EC 4.1.1.39)
  misc_feature (1)..(177): Homolog of NCBI NO: 15240912 NR Description: ribulose bisphosphate carboxylase small chain 1b
MLSSAAVVTSPAQATMVAPFTGLKSSASFPVTRKANNDITSITSNGGRVSCMKVWPPIGKKKFGTLSYLPDLTDVELAKEVDYLLRNKWIPCVEFELEHGFVYREHGNTPGYYDGRYWTMWKLPLFGCTDSAQVLKEVEECKKEYPGAFIRIIGFDNTRQVQCISFIAYKPPSFTDA

SEQ ID NO: 24368 - protein, 162 aa, Arabidopsis thaliana
  peptide (1)..(162): Ceres Seq. ID no. 12601886
  misc_feature (37)..(156): Pfam Name: Ribulose bisphosphate carboxylase, small chain Pfam Description: Ribulose bisphosphate carboxylase, small chain
  misc_feature (37)..(156): Pfam Name: Ribulose bisphosphate carboxylase, small chain Pfam Description: Ribulose bisphosphate carboxylase, small chain
  misc_feature (37)..(156): Pfam Name: Ribulose bisphosphate carboxylase, small chain Pfam Description: Ribulose bisphosphate carboxylase, small chain
  misc_feature (37)..(156): Pfam Name: Ribulose bisphosphate carboxylase, small chain Pfam Description: Ribulose bisphosphate carboxylase, small chain
  misc_feature (1)..(160): Homolog of NCBI NO: 68063 NR Description: ribulose-bisphosphate carboxylase (EC 4.1.1.39)
  misc_feature (1)..(162): Homolog of NCBI NO: 132154 NR Description: Ribulose bisphosphate carboxylase small chain,
  misc_feature (1)..(160): Homolog of NCBI NO: 15219826 NR Description: ribulose-bisphosphate carboxylase small unit,
  misc_feature (1)..(162): Homolog of NCBI NO: 266891 NR Description: Ribulose bisphosphate carboxylase small chain,
  misc_feature (1)..(162): Homolog of NCBI NO: 132091 NR Description: Ribulose bisphosphate carboxylase small chain F1,
  misc_feature (1)..(160): Homolog of NCBI NO: 68063 NR Description: ribulose-bisphosphate carboxylase (EC 4.1.1.39)
  misc_feature (1)..(160): Homolog of NCBI NO: 15219826 NR Description: ribulose-bisphosphate carboxylase small unit,
  misc_feature (1)..(162): Homolog of NCBI NO: 132091 NR Description: Ribulose bisphosphate carboxylase small chain F1,
  misc_feature (1)..(162): Homolog of NCBI NO: 266891 NR Description: Ribulose bisphosphate carboxylase small chain,
  misc_feature (1)..(160): Homolog of NCBI NO: 15219826 NR Description: ribulose-bisphosphate carboxylase small unit,
  misc_feature (1)..(162): Homolog of NCBI NO: 132154 NR Description: Ribulose bisphosphate carboxylase small chain,
  misc_feature (1)..(160): Homolog of NCBI NO: 68063 NR Description: ribulose-bisphosphate carboxylase (EC 4.1.1.39)
  misc_feature (1)..(162): Homolog of NCBI NO: 15240912 NR Description: ribulose bisphosphate carboxylase small chain 1b
  misc_feature (1)..(162): Homolog of NCBI NO: 68061 NR Description: ribulose-bisphosphate carboxylase (EC 4.1.1.39)
  misc_feature (1)..(162): Homolog of NCBI NO: 15240903 NR Description: ribulose bisphosphate carboxylase small chain 2b
  misc_feature (1)..(162): Homolog of NCBI NO: 68060 NR Description: ribulose-bisphosphate carboxylase (EC 4.1.1.39)
  misc_feature (1)..(162): Homolog of NCBI NO: 15240901 NR Description: ribulose bisphosphate carboxylase small chain 3b
  misc_feature (1)..(162): Homolog of NCBI NO: 15240912 NR Description: ribulose bisphosphate carboxylase small chain 1b
  misc_feature (1)..(162): Homolog of NCBI NO: 68061 NR Description: ribulose-bisphosphate carboxylase (EC 4.1.1.39)
  misc_feature (1)..(162): Homolog of NCBI NO: 15240903 NR Description: ribulose bisphosphate carboxylase small chain 2b
  misc_feature (1)..(162): Homolog of NCBI NO: 68060 NR Description: ribulose-bisphosphate carboxylase (EC 4.1.1.39)
  misc_feature (1)..(162): Homolog of NCBI NO: 15240901 NR Description: ribulose bisphosphate carboxylase small chain 3b
  misc_feature (1)..(162): Homolog of NCBI NO: 132091 NR Description: Ribulose bisphosphate carboxylase small chain F1,
  misc_feature (1)..(162): Homolog of NCBI NO: 266891 NR Description: Ribulose bisphosphate carboxylase small chain,
  misc_feature (1)..(160): Homolog of NCBI NO: 15219826 NR Description: ribulose-bisphosphate carboxylase small unit,
  misc_feature (1)..(162): Homolog of NCBI NO: 132154 NR Description: Ribulose bisphosphate carboxylase small chain,
  misc_feature (1)..(160): Homolog of NCBI NO: 68063 NR Description: ribulose-bisphosphate carboxylase (EC 4.1.1.39)
  misc_feature (1)..(162): Homolog of NCBI NO: 15240912 NR Description: ribulose bisphosphate carboxylase small chain 1b
  misc_feature (1)..(162): Homolog of NCBI NO: 68061 NR Description: ribulose-bisphosphate carboxylase (EC 4.1.1.39)
  misc_feature (1)..(162): Homolog of NCBI NO: 15240903 NR Description: ribulose bisphosphate carboxylase small chain 2b
  misc_feature (1)..(162): Homolog of NCBI NO: 68060 NR Description: ribulose-bisphosphate carboxylase (EC 4.1.1.39)
  misc_feature (1)..(162): Homolog of NCBI NO: 15240901 NR Description: ribulose bisphosphate carboxylase small chain 3b
  misc_feature (1)..(162): Homolog of NCBI NO: 132091 NR Description: Ribulose bisphosphate carboxylase small chain F1,
  misc_feature (1)..(162): Homolog of NCBI NO: 266891 NR Description: Ribulose bisphosphate carboxylase small chain,
  misc_feature (1)..(162): Homolog of NCBI NO: 132154 NR Description: Ribulose bisphosphate carboxylase small chain,
  misc_feature (1)..(162): Homolog of NCBI NO: 15240901 NR Description: ribulose bisphosphate carboxylase small chain 3b
  misc_feature (1)..(162): Homolog of NCBI NO: 68060 NR Description: ribulose-bisphosphate carboxylase (EC 4.1.1.39)
  misc_feature (1)..(162): Homolog of NCBI NO: 15240903 NR Description: ribulose bisphosphate carboxylase small chain 2b
  misc_feature (1)..(162): Homolog of NCBI NO: 68061 NR Description: ribulose-bisphosphate carboxylase (EC 4.1.1.39)
  misc_feature (1)..(162): Homolog of NCBI NO: 15240912 NR Description: ribulose bisphosphate carboxylase small chain 1b
MVAPFTGLKSSASFPVTRKANNDITSITSNGGRVSCMKVWPPIGKKKFGTLSYLPDLTDVELAKEVDYLLRNKWIPCVEFELEHGFVYREHGNTPGYYDGRYWTMWKLPLFGCTDSAQVLKEVEECKKEYPGAFIRIIGFDNTRQVQCISFIAYKPPSFTDA

SEQ ID NO: 24369 - DNA, 1306 bp, Arabidopsis thaliana
  misc_feature (1)..(1306): Ceres Seq. ID no. 12371585
  misc_feature: MA Experiment ID: 108434 Result: Down-regulated in Transcription
  misc_feature: MA Experiment 108434 PARAMETER Experiment Name: At_Root_Tips_cDNA_P Parameter: Tissue Value: Root Tips
  misc_feature: MA Experiment ID: 108462 Result: Down-regulated in Transcription
  misc_feature: MA Experiment 108462 PARAMETER Experiment Name: At_Germinating_Seeds_cDNA_P Parameter: Age (day) Value: 2 vs. 0
  misc_feature: MA Experiment 108462 PARAMETER Experiment Name: At_Germinating_Seeds_cDNA_P Parameter: Tissue Value: Germinating Seeds
  misc_feature: MA Experiment ID: 108463 Result: Down-regulated in Transcription
  misc_feature: MA Experiment 108463 PARAMETER Experiment Name: At_Germinating_Seeds_cDNA_P Parameter: Age (day) Value: 3 vs. 0
  misc_feature: MA Experiment 108463 PARAMETER Experiment Name: At_Germinating_Seeds_cDNA_P Parameter: Tissue Value: Germinating Seeds
  misc_feature: MA Experiment ID: 108574 Result: Up-regulated in Transcription
  misc_feature: MA Experiment 108574 PARAMETER Experiment Name: At_Wounding__cDNA_P Parameter: Timepoint (hr) Value: 1
  misc_feature: MA Experiment 108574 PARAMETER Experiment Name: At_Wounding__cDNA_P Parameter: Tissue Value: Aerial
  misc_feature: MA Experiment 108574 PARAMETER Experiment Name: At_Wounding__cDNA_P Parameter: Treatment Value: Wounding vs. No Wounding
  misc_feature: MA Experiment ID: 20000072 Result: Up-regulated in Transcription
  misc_feature: MA Experiment 20000072 PARAMETER Experiment Name: At_100uM_ABA_Mutants_cDNA_P Parameter: Plant Line Value: CS8105
  misc_feature: MA Experiment 20000072 PARAMETER Experiment Name: At_100uM_ABA_Mutants_cDNA_P Parameter: Timepoint (hr) Value: 6
  misc_feature: MA Experiment 20000072 PARAMETER Experiment Name: At_100uM_ABA_Mutants_cDNA_P Parameter: Tissue Value: Aerial
  misc_feature: MA Experiment 20000072 PARAMETER Experiment Name: At_100uM_ABA_Mutants_cDNA_P Parameter: Treatment Value: 100uM ABA vs. No Treatment
  misc_feature: MA Experiment ID: 20000224 Result: Down-regulated in Transcription
atattttcgaaactcgaatcaaaattcaaatggcgggctaaacttcgattcagtctctctctttctctctttggtgatggaacaaattagcaacatcgctggtggagacacaacgaaagagactatggcgtctctgggtctcatctgtgagaaagatattcatgaacagcgtcttaaaatcgattctttcatcgcttctcctttccggagatcgatgaactctttagtggagcgagctcaagccactgctcaaagccaagtggaactaatgaatttgaaagcggatctgagagaagcagaggatgagctagttaaagtgttggcagtgaaaacccgtaaagaggcacggcaaatggggataagagattccatttctgcaacacaatctaggattgaagtacttagaagaaatttgcagctacagaagtcaaagaaggatgattctgtgagaattatctcccaacagttgcaagccttgtcaaaatcgaaggacaacgctggtaaagtcaccgaagacaaagcagatattcatgaagcaatctcttggtataatcatgctctcggttttcacgttgaagctggacatggagttaaattcacattcaccaacattgatgcaaaaaggccgacccgcgaattttcgttcacagttcactatggaaatgacatctacacactattggatagcgatctgcaattggattacatcaacgagatggttcaagaattgaataaaaccaatgaccttttcagatttgttcgtctgatgagggagcagtttctgaaatccactttatctgagctgccaacacattcaggacaactgcaacaggaaacgtctgccatatctgcttcagctccagctatatcattttccactgatacaaacatgtcaactccagaaaacaaaagatctaaggttcaagtgaatcggcgacaaaaaagaggtagcgaatcaccactcctagctcctgtatccacatctgccactcgccgttcttctcgctttaagggtaagaaatgaaggtggagctctgttttccttttcacaagcatcaaggaataaacttaagcgtagatgatgctgcggaactttcgacaacaacagattgttgtttgaaattcctataaatattagaatgtcattgtaatcacgcttattgacaatgttgatttctttactagtgtggatgctatgcttatacaccaatcgatgatggagcttgtgggactagattttaatcgatgtaatctcgcgcttctctatttctagatttcgttagctaatggatgcttgtctagcttc

SEQ ID NO: 24370 - protein, 340 aa, Arabidopsis thaliana
  peptide (1)..(340): Ceres Seq. ID no. 12371586
  misc_feature (36)..(260): Homolog of NCBI NO: 19075708 NR Description: hypothetical protein [Schizosaccharomyces pombe]
  misc_feature (34)..(267): Homolog of NCBI NO: 34906038 NR Description: P0518C01.32 [Oryza sativa (japonica
  misc_feature (88)..(317): Homolog of NCBI NO: 14719337 NR Description: hypothetical protein [Oryza sativa]
  misc_feature (266)..(340): Homolog of NCBI NO: 7487387 NR Description: hypothetical protein T24C20.90 - Arabidopsis
  misc_feature (26)..(227): Homolog of NCBI NO: 7487387 NR Description: hypothetical protein T24C20.90 - Arabidopsis
  misc_feature (42)..(340): Homolog of NCBI NO: 21593341 NR Description: unknown [Arabidopsis thaliana]
  misc_feature (26)..(340): Homolog of NCBI NO: 18408605 NR Description: putative protein
YFRNSNQNSNGGLNFDSVSLFLSLVMEQISNIAGGDTTKETMASLGLICEKDIHEQRLKIDSFIASPFRRSMNSLVERAQATAQSQVELMNLKADLREAEDELVKVLAVKTRKEARQMGIRDSISATQSRIEVLRRNLQLQKSKKDDSVRIISQQLQALSKSKDNAGKVTEDKADIHEAISWYNHALGFHVEAGHGVKFTFTNIDAKRPTREFSFTVHYGNDIYTLLDSDLQLDYINEMVQELNKTNDLFRFVRLMREQFLKSTLSELPTHSGQLQQETSAISASAPAISFSTDTNMSTPENKRSKVQVNRRQKRGSESPLLAPVSTSATRRSSRFKGKK

SEQ ID NO: 24371 - protein, 315 aa, Arabidopsis thaliana
  peptide (1)..(315): Ceres Seq. ID no. 12371587
  misc_feature (11)..(235): Homolog of NCBI NO: 19075708 NR Description: hypothetical protein [Schizosaccharomyces pombe]
  misc_feature (9)..(242): Homolog of NCBI NO: 34906038 NR Description: P0518C01.32 [Oryza sativa (japonica
  misc_feature (63)..(292): Homolog of NCBI NO: 14719337 NR Description: hypothetical protein [Oryza sativa]
  misc_feature (241)..(315): Homolog of NCBI NO: 7487387 NR Description: hypothetical protein T24C20.90 - Arabidopsis
  misc_feature (1)..(202): Homolog of NCBI NO: 7487387 NR Description: hypothetical protein T24C20.90 - Arabidopsis
  misc_feature (17)..(315): Homolog of NCBI NO: 21593341 NR Description: unknown [Arabidopsis thaliana]
  misc_feature (1)..(315): Homolog of NCBI NO: 18408605 NR Description: putative protein
MEQISNIAGGDTTKETMASLGLICEKDIHEQRLKIDSFIASPFRRSMNSLVERAQATAQSQVELMNLKADLREAEDELVKVLAVKTRKEARQMGIRDSISATQSRIEVLRRNLQLQKSKKDDSVRIISQQLQALSKSKDNAGKVTEDKADIHEAISWYNHALGFHVEAGHGVKFTFTNIDAKRPTREFSFTVHYGNDIYTLLDSDLQLDYINEMVQELNKTNDLFRFVRLMREQFLKSTLSELPTHSGQLQQETSAISASAPAISFSTDTNMSTPENKRSKVQVNRRQKRGSESPLLAPVSTSATRRSSRFKGKK

SEQ ID NO: 24372 - protein, 299 aa, Arabidopsis thaliana
  peptide (1)..(299): Ceres Seq. ID no. 12371588
  misc_feature (1)..(219): Homolog of NCBI NO: 19075708 NR Description: hypothetical protein [Schizosaccharomyces pombe]
  misc_feature (1)..(226): Homolog of NCBI NO: 34906038 NR Description: P0518C01.32 [Oryza sativa (japonica
  misc_feature (47)..(276): Homolog of NCBI NO: 14719337 NR Description: hypothetical protein [Oryza sativa]
  misc_feature (225)..(299): Homolog of NCBI NO: 7487387 NR Description: hypothetical protein T24C20.90 - Arabidopsis
  misc_feature (1)..(186): Homolog of NCBI NO: 7487387 NR Description: hypothetical protein T24C20.90 - Arabidopsis
  misc_feature (1)..(299): Homolog of NCBI NO: 21593341 NR Description: unknown [Arabidopsis thaliana]
  misc_feature (1)..(299): Homolog of NCBI NO: 18408605 NR Description: putative protein
MASLGLICEKDIHEQRLKIDSFIASPFRRSMNSLVERAQATAQSQVELMNLKADLREAEDELVKVLAVKTRKEARQMGIRDSISATQSRIEVLRRNLQLQKSKKDDSVRIISQQLQALSKSKDNAGKVTEDKADIHEAISWYNHALGFHVEAGHGVKFTFTNIDAKRPTREFSFTVHYGNDIYTLLDSDLQLDYINEMVQELNKTNDLFRFVRLMREQFLKSTLSELPTHSGQLQQETSAISASAPAISFSTDTNMSTPENKRSKVQVNRRQKRGSESPLLAPVSTSATRRSSRFKGKK

SEQ ID NO: 24373 - DNA, 1177 bp, Arabidopsis thaliana
  misc_feature (1)..(1177): Ceres Seq. ID no. 12481884
  misc_feature: MA Experiment ID: 108461 Result: Up-regulated in Transcription
  misc_feature: MA Experiment 108461 PARAMETER Experiment Name: At_Germinating_Seeds_cDNA_P Parameter: Age (day) Value: 1 vs. 0
  misc_feature: MA Experiment 108461 PARAMETER Experiment Name: At_Germinating_Seeds_cDNA_P Parameter: Tissue Value: Germinating Seeds
  misc_feature: MA Experiment ID: 108462 Result: Up-regulated in Transcription
  misc_feature: MA Experiment 108462 PARAMETER Experiment Name: At_Germinating_Seeds_cDNA_P Parameter: Age (day) Value: 2 vs. 0
  misc_feature: MA Experiment 108462 PARAMETER Experiment Name: At_Germinating_Seeds_cDNA_P Parameter: Tissue Value: Germinating Seeds
  misc_feature: MA Experiment ID: 108464 Result: Up-regulated in Transcription
  misc_feature: MA Experiment 108464 PARAMETER Experiment Name: At_Germinating_Seeds_cDNA_P Parameter: Age (day) Value: 4 vs. 0
  misc_feature: MA Experiment 108464 PARAMETER Experiment Name: At_Germinating_Seeds_cDNA_P Parameter: Tissue Value: Germinating Seeds
  misc_feature: MA Experiment ID: 108579 Result: Up-regulated in Transcription
  misc_feature: MA Experiment 108579 PARAMETER Experiment Name: At_4deg_Cold_cDNA_P Parameter: Temperature (deg C) Value: 4 vs. 22
  misc_feature: MA Experiment 108579 PARAMETER Experiment Name: At_4deg_Cold_cDNA_P Parameter: Timepoint (hr) Value: 6
  misc_feature: MA Experiment 108579 PARAMETER Experiment Name: At_4deg_Cold_cDNA_P Parameter: Tissue Value: Aerial
  misc_feature: MA Experiment ID: 108595 Result: Down-regulated in Transcription
  misc_feature: MA Experiment 108595 PARAMETER Experiment Name: At_Ler-pi_Ovule_cDNA_P Parameter: Plant Line Value: null
  misc_feature: MA Experiment ID: 20000307 Result: Up-regulated in Transcription
  misc_feature: MA Experiment 20000307 PARAMETER Experiment Name: At_Germinating_Seeds_Sub_P Parameter: Age (hr) Value: 24 vs. 0
  misc_feature: MA Experiment 20000307 PARAMETER Experiment Name: At_Germinating_Seeds_Sub_P Parameter: Organism Value: A. thaliana
  misc_feature: MA Experiment 20000307 PARAMETER Experiment Name: At_Germinating_Seeds_Sub_P Parameter: Plant Line Value: WS
  misc_feature: MA Experiment 20000307 PARAMETER Experiment Name: At_Germinating_Seeds_Sub_P Parameter: Tissue Value: Germinating Seeds
  misc_feature: MA Experiment ID: 20000314 Result: Down-regulated in Transcription
  misc_feature: MA Experiment 20000314 PARAMETER Experiment Name: At_14day_Shoots-Roots_Sub_P Parameter: Age (day) Value: 14
  misc_feature: MA Experiment 20000314 PARAMETER Experiment Name: At_14day_Shoots-Roots_Sub_P Parameter: Organism Value: A. thaliana
  misc_feature: MA Experiment 20000314 PARAMETER Experiment Name: At_14day_Shoots-Roots_Sub_P Parameter: Plant Line Value: WS
  misc_feature: MA Experiment 20000314 PARAMETER Experiment Name: At_14day_Shoots-Roots_Sub_P Parameter: Tissue Value: Roots vs. Whole Plant
attgtttttgtatgcatttggtctgtgtgttgtgttgtttatcttcttcttcttcaacccgaccaaatacacatccgacggggaaaaagagttccgacaagaatcgagaactgaaagatttgtcatttgtctctcaaatatctgtggagagaagagaaattggaataaagaagacagtgttgtgagagagagagagagagagagagatgagttcgtctctacctctgaggctacttcttcctcttacaacttctctgatttctcctcctcctcctcctccagattctttccatgctccttcgtcgttcagatcgaaaaaccctaatttcaaacgccgattgtcttcttcttcctgttgttcttcccagtcgcagcttttctctgggagatgcagatcctattcgcggtgtgttaccatgtgcttaccagaacacatgagaaatcaagagaacacagaaatcttgacagataaagatgaccacattgaatgtgtgcttgaatcggatgaagattctggcctcaggattccgactcaagcacaggctatcgttgaaggatctggttcagttgcagtgtcagagctaaaacccgctgctgatgtagattacatacaagagctattggcgatacagcagcaaggtcctagatcaattggcttctttgggacaagaaatatgggtttcatgcatcaagaactgattgagatacttagctacgccatggttataaccaaaaatcatatatacacatcaggtgcatctggaactaatgctgcagtcatcagaggtgcattgagagcagagagaccagagctgcttacagtaattctaccccaaagtttgaaaaaacaacctcctgagagccaagaactattgtctaaagtacaaaacgtggtagaaaagccacataatgaccatttgccattgttagaagccaggttgtgtaatatggacatcatatcacaagttcaacaagtgatctgcttcgcgtttcatgacagtaagcttcttatggagacatgtcaagaagccaaaaatctgcgcaagattgtcactctcttctacctcgattgattcacattcactctttattttcttctcgttacaaaacagagaagataatcctccttgtaaattatgaatcttgattaaacaaacacacacaaccacaattatat

SEQ ID NO: 24374 - protein, 288 aa, Arabidopsis thaliana
  peptide (1)..(288): Ceres Seq. ID no. 12481885
  misc_feature (139)..(288): Homolog of NCBI NO: 37522470 NR Description: hypothetical protein gll2901 [Gloeobacter
  misc_feature (153)..(288): Homolog of NCBI NO: 23043068 NR Description: hypothetical protein [Trichodesmium erythraeum
  misc_feature (128)..(288): Homolog of NCBI NO: 16331173 NR Description: unknown protein [Synechocystis sp. PCC 6803]
  misc_feature (135)..(288): Homolog of NCBI NO: 13812204 NR Description: hypothetical protein [Guillardia theta]
  misc_feature (100)..(225): Homolog of NCBI NO: 34894968 NR Description: B1088D01.6 [Oryza sativa (japonica
  misc_feature (1)..(92): Homolog of NCBI NO: 28393677 NR Description: unknown protein [Arabidopsis thaliana]
  misc_feature (1)..(288): Homolog of NCBI NO: 15232185 NR Description: putative protein
  misc_feature (1)..(288): Homolog of NCBI NO: 21537298 NR Description: unknown [Arabidopsis thaliana]
  misc_feature (1)..(264): Homolog of NCBI NO: 7486491 NR Description: hypothetical protein At2g43940 [imported] -
  misc_feature (1)..(288): Homolog of NCBI NO: 30689549 NR Description: predicted protein [Arabidopsis thaliana]
MSSSLPLRLLLPLTTSLISPPPPPPDSFHAPSSFRSKNPNFKRRLSSSSCCSSQSQLFSGRCRSYSRCVTMCLPEHMRNQENTEILTDKDDHIECVLESDEDSGLRIPTQAQAIVEGSGSVAVSELKPAADVDYIQELLAIQQQGPRSIGFFGTRNMGFMHQELIEILSYAMVITKNHIYTSGASGTNAAVIRGALRAERPELLTVILPQSLKKQPPESQELLSKVQNVVEKPHNDHLPLLEARLCNMDIISQVQQVICFAFHDSKLLMETCQEAKNLRKIVTLFYLD

SEQ ID NO: 24375 - protein, 218 aa, Arabidopsis thaliana
  peptide (1)..(218): Ceres Seq. ID no. 12481886
  misc_feature (69)..(218): Homolog of NCBI NO: 37522470 NR Description: hypothetical protein gll2901 [Gloeobacter
  misc_feature (83)..(218): Homolog of NCBI NO: 23043068 NR Description: hypothetical protein [Trichodesmium erythraeum
  misc_feature (58)..(218): Homolog of NCBI NO: 16331173 NR Description: unknown protein [Synechocystis sp. PCC 6803]
  misc_feature (65)..(218): Homolog of NCBI NO: 13812204 NR Description: hypothetical protein [Guillardia theta]
  misc_feature (30)..(155): Homolog of NCBI NO: 34894968 NR Description: B1088D01.6 [Oryza sativa (japonica
  misc_feature (1)..(22): Homolog of NCBI NO: 28393677 NR Description: unknown protein [Arabidopsis thaliana]
  misc_feature (1)..(218): Homolog of NCBI NO: 15232185 NR Description: putative protein
  misc_feature (1)..(218): Homolog of NCBI NO: 21537298 NR Description: unknown [Arabidopsis thaliana]
  misc_feature (1)..(194): Homolog of NCBI NO: 7486491 NR Description: hypothetical protein At2g43940 [imported] -
  misc_feature (1)..(218): Homolog of NCBI NO: 30689549 NR Description: predicted protein [Arabidopsis thaliana]
MCLPEHMRNQENTEILTDKDDHIECVLESDEDSGLRIPTQAQAIVEGSGSVAVSELKPAADVDYIQELLAIQQQGPRSIGFFGTRNMGFMHQELIEILSYAMVITKNHIYTSGASGTNAAVIRGALRAERPELLTVILPQSLKKQPPESQELLSKVQNVVEKPHNDHLPLLEARLCNMDIISQVQQVICFAFHDSKLLMETCQEAKNLRKIVTLFYLD

SEQ ID NO: 24376 - protein, 212 aa, Arabidopsis thaliana
  peptide (1)..(212): Ceres Seq. ID no. 12481887
  misc_feature (63)..(212): Homolog of NCBI NO: 37522470 NR Description: hypothetical protein gll2901 [Gloeobacter
  misc_feature (77)..(212): Homolog of NCBI NO: 23043068 NR Description: hypothetical protein [Trichodesmium erythraeum
  misc_feature (52)..(212): Homolog of NCBI NO: 16331173 NR Description: unknown protein [Synechocystis sp. PCC 6803]
  misc_feature (59)..(212): Homolog of NCBI NO: 13812204 NR Description: hypothetical protein [Guillardia theta]
  misc_feature (24)..(149): Homolog of NCBI NO: 34894968 NR Description: B1088D01.6 [Oryza sativa (japonica
  misc_feature (1)..(16): Homolog of NCBI NO: 28393677 NR Description: unknown protein [Arabidopsis thaliana]
  misc_feature (1)..(212): Homolog of NCBI NO: 15232185 NR Description: putative protein
  misc_feature (1)..(212): Homolog of NCBI NO: 21537298 NR Description: unknown [Arabidopsis thaliana]
  misc_feature (1)..(188): Homolog of NCBI NO: 7486491 NR Description: hypothetical protein At2g43940 [imported] -
  misc_feature (1)..(212): Homolog of NCBI NO: 30689549 NR Description: predicted protein [Arabidopsis thaliana]
MRNQENTEILTDKDDHIECVLESDEDSGLRIPTQAQAIVEGSGSVAVSELKPAADVDYIQELLAIQQQGPRSIGFFGTRNMGFMHQELIEILSYAMVITKNHIYTSGASGTNAAVIRGALRAERPELLTVILPQSLKKQPPESQELLSKVQNVVEKPHNDHLPLLEARLCNMDIISQVQQVICFAFHDSKLLMETCQEAKNLRKIVTLFYLD

SEQ ID NO: 24377 - DNA, 1499 bp, Arabidopsis thaliana
  misc_feature (1)..(1499): Ceres Seq. ID no. 13494257
  misc_feature: MA Experiment ID: 108462 Result: Down-regulated in Transcription
  misc_feature: MA Experiment 108462 PARAMETER Experiment Name: At_Germinating_Seeds_cDNA_P Parameter: Age (day) Value: 2 vs. 0
  misc_feature: MA Experiment 108462 PARAMETER Experiment Name: At_Germinating_Seeds_cDNA_P Parameter: Tissue Value: Germinating Seeds
  misc_feature: MA Experiment ID: 108463 Result: Down-regulated in Transcription
  misc_feature: MA Experiment 108463 PARAMETER Experiment Name: At_Germinating_Seeds_cDNA_P Parameter: Age (day) Value: 3 vs. 0
  misc_feature: MA Experiment 108463 PARAMETER Experiment Name: At_Germinating_Seeds_cDNA_P Parameter: Tissue Value: Germinating Seeds
  misc_feature: MA Experiment ID: 108464 Result: Down-regulated in Transcription
  misc_feature: MA Experiment 108464 PARAMETER Experiment Name: At_Germinating_Seeds_cDNA_P Parameter: Age (day) Value: 4 vs. 0
  misc_feature: MA Experiment 108464 PARAMETER Experiment Name: At_Germinating_Seeds_cDNA_P Parameter: Tissue Value: Germinating Seeds
  misc_feature: MA Experiment ID: 108595 Result: Down-regulated in Transcription
  misc_feature: MA Experiment 108595 PARAMETER Experiment Name: At_Ler-pi_Ovule_cDNA_P Parameter: Plant Line Value: null
aatgccaccaactgttcttttcctgtaatttccagtttagagctttcttcttcctttccctatcctcaaccccaaacgaacgctcttcaagaattagggtttcgttttgaatcttctctgattcccaaatccaaagatatgaagagatcttcagggagaaaggattcaaatttcatagaacaattgatactttacgtcgctagtgctgcattgagtagcttggttctctacgttggtctccgtcaacttgacccgaaccgtgacgccgctaaaaagtctctcgagcacaaaagagaaatcgccaaacgtttgggtcgtcctcttattcaaaccaatcaatacgaggatgtgattgcgtgtgatgtaataaacccattacacatagatgttgaatttggttctattggaggattggagtcaattaagcaagctttgtatgagcttgtgattctaccattgaaaagacctgagctttttgcttatgggaagttactgggtcctcaaaagggtgttttgttgtatggtcctcctggaactgggaagactatgcttgctaaagcgattgcgagagagtctgaagctgtttttattaatgtaaaggtttctaatttgatgagcaagtggtttggtgatgcacagaagcttgtgtctgctgtgtttagcttggcgtataaactccaacctgctattatttttatcgatgaggtggatagctttcttggccagcgacggtcgactgataatgaagcaatgtcgaatatgaagaccgagtttatggctttatgggatggatttactacagaccagaatgcgagggtgatggttcttgctgcaactaacagaccatcagagctcgatgaagcgatattgaggcgttttcctcagtcatttgagatcgggatgcctgattgccaggagagagcgcaaatattgaaagttgttttgaaaggagagagtgttgaatcagatattaactatgatcgtatagctcgtttatgtgaggactataccggatcagatatttttgaactctgcaaaaaagcagcttacttcccaatccgagaaatcctagaggcagagaaagagggcaaacgagtttctgttcctagaccattgacacaactggacttggagaaggttcttgctacctcaaagaagacacaagttgctgcaagcgagtacactggtttaagctctcaatcttctgtctggggaagtccaagcaatgccgatgaggtccaagcagctataaacggcatctccaagctttttgtctcgcagcttagaaacattcagccagattctcaggattcatatcaacaacatccttcagaaggagattcggaatagaagcaaactcttcactagagcttcgtatagtccaaaaagagtacaacccaagaatatacactttttgtaaacctcatatttctctgaataagttggagcattgttgccgtaagatgtttttagaaaatttaattcatgtctcgttagtg

SEQ ID NO: 24378 - protein, 449 aa, Arabidopsis thaliana
  peptide (1)..(449): Ceres Seq. ID no. 13494258
  misc_feature (170)..(354): Pfam Name: ATPase family associated with various cellular Pfam Description: ATPase family associated with various cellular
  misc_feature (109)..(386): Homolog of NCBI NO: 25405352 NR Description: hypothetical protein F2J10.1 [imported] -
  misc_feature (109)..(386): Homolog of NCBI NO: 15222886 NR Description: expressed protein [Arabidopsis thaliana]
  misc_feature (106)..(373): Homolog of NCBI NO: 15234019 NR Description: expressed protein [Arabidopsis thaliana]
  misc_feature (94)..(403): Homolog of NCBI NO: 30678418 NR Description: expressed protein [Arabidopsis thaliana]
  misc_feature (101)..(403): Homolog of NCBI NO: 25518408 NR Description: hypothetical protein F22D16.11 - Arabidopsis
  misc_feature (94)..(414): Homolog of NCBI NO: 30679158 NR Description: expressed protein [Arabidopsis thaliana]
  misc_feature (94)..(414): Homolog of NCBI NO: 20259341 NR Description: unknown protein [Arabidopsis thaliana]
  misc_feature (94)..(414): Homolog of NCBI NO: 7487016 NR Description: hypothetical protein T14P8.7 - Arabidopsis
  misc_feature (52)..(448): Homolog of NCBI NO: 15234242 NR Description: expressed protein [Arabidopsis thaliana]
  misc_feature (47)..(449): Homolog of NCBI NO: 15238774 NR Description: 26S proteasome regulatory particle chain
NATNCSFPVISSLELSSSFPYPQPQTNALQELGFRFESSLIPKSKDMKRSSGRKDSNFIEQLILYVASAALSSLVLYVGLRQLDPNRDAAKKSLEHKREIAKRLGRPLIQTNQYEDVIACDVINPLHIDVEFGSIGGLESIKQALYELVILPLKRPELFAYGKLLGPQKGVLLYGPPGTGKTMLAKAIARESEAVFINVKVSNLMSKWFGDAQKLVSAVFSLAYKLQPAIIFIDEVDSFLGQRRSTDNEAMSNMKTEFMALWDGFTTDQNARVMVLAATNRPSELDEAILRRFPQSFEIGMPDCQERAQILKVVLKGESVESDINYDRIARLCEDYTGSDIFELCKKAAYFPIREILEAEKEGKRVSVPRPLTQLDLEKVLATSKKTQVAASEYTGLSSQSSVWGSPSNADEVQAAINGISKLFVSQLRNIQPDSQDSYQQHPSEGDSE

SEQ ID NO: 24379 - protein, 403 aa, Arabidopsis thaliana
  peptide (1)..(403): Ceres Seq. ID no. 13494259
  misc_feature (124)..(308): Pfam Name: ATPase family associated with various cellular Pfam Description: ATPase family associated with various cellular
  misc_feature (63)..(340): Homolog of NCBI NO: 25405352 NR Description: hypothetical protein F2J10.1 [imported] -
  misc_feature (63)..(340): Homolog of NCBI NO: 15222886 NR Description: expressed protein [Arabidopsis thaliana]
  misc_feature (60)..(327): Homolog of NCBI NO: 15234019 NR Description: expressed protein [Arabidopsis thaliana]
  misc_feature (48)..(357): Homolog of NCBI NO: 30678418 NR Description: expressed protein [Arabidopsis thaliana]
  misc_feature (55)..(357): Homolog of NCBI NO: 25518408 NR Description: hypothetical protein F22D16.11 - Arabidopsis
  misc_feature (48)..(368): Homolog of NCBI NO: 30679158 NR Description: expressed protein [Arabidopsis thaliana]
  misc_feature (48)..(368): Homolog of NCBI NO: 20259341 NR Description: unknown protein [Arabidopsis thaliana]
  misc_feature (48)..(368): Homolog of NCBI NO: 7487016 NR Description: hypothetical protein T14P8.7 - Arabidopsis
  misc_feature (6)..(402): Homolog of NCBI NO: 15234242 NR Description: expressed protein [Arabidopsis thaliana]
  misc_feature (1)..(403): Homolog of NCBI NO: 15238774 NR Description: 26S proteasome regulatory particle chain
MKRSSGRKDSNFIEQLILYVASAALSSLVLYVGLRQLDPNRDAAKKSLEHKREIAKRLGRPLIQTNQYEDVIACDVINPLHIDVEFGSIGGLESIKQALYELVILPLKRPELFAYGKLLGPQKGVLLYGPPGTGKTMLAKAIARESEAVFINVKVSNLMSKWFGDAQKLVSAVFSLAYKLQPAIIFIDEVDSFLGQRRSTDNEAMSNMKTEFMALWDGFTTDQNARVMVLAATNRPSELDEAILRRFPQSFEIGMPDCQERAQILKVVLKGESVESDINYDRIARLCEDYTGSDIFELCKKAAYFPIREILEAEKEGKRVSVPRPLTQLDLEKVLATSKKTQVAASEYTGLSSQSSVWGSPSNADEVQAAINGISKLFVSQLRNIQPDSQDSYQQHPSEGDSE

SEQ ID NO: 24380 - protein, 267 aa, Arabidopsis thaliana
  peptide (1)..(267): Ceres Seq. ID no. 13494260
  misc_feature (1)..(172): Pfam Name: ATPase family associated with various cellular Pfam Description: ATPase family associated with various cellular
  misc_feature (1)..(204): Homolog of NCBI NO: 25405352 NR Description: hypothetical protein F2J10.1 [imported] -
  misc_feature (1)..(204): Homolog of NCBI NO: 15222886 NR Description: expressed protein [Arabidopsis thaliana]
  misc_feature (1)..(191): Homolog of NCBI NO: 15234019 NR Description: expressed protein [Arabidopsis thaliana]
  misc_feature (1)..(221): Homolog of NCBI NO: 30678418 NR Description: expressed protein [Arabidopsis thaliana]
  misc_feature (1)..(221): Homolog of NCBI NO: 25518408 NR Description: hypothetical protein F22D16.11 - Arabidopsis
  misc_feature (1)..(232): Homolog of NCBI NO: 30679158 NR Description: expressed protein [Arabidopsis thaliana]
  misc_feature (1)..(232): Homolog of NCBI NO: 20259341 NR Description: unknown protein [Arabidopsis thaliana]
  misc_feature (1)..(232): Homolog of NCBI NO: 7487016 NR Description: hypothetical protein T14P8.7 - Arabidopsis
  misc_feature (1)..(266): Homolog of NCBI NO: 15234242 NR Description: expressed protein [Arabidopsis thaliana]
  misc_feature (1)..(267): Homolog of NCBI NO: 15238774 NR Description: 26S proteasome regulatory particle chain
MLAKAIARESEAVFINVKVSNLMSKWFGDAQKLVSAVFSLAYKLQPAIIFIDEVDSFLGQRRSTDNEAMSNMKTEFMALWDGFTTDQNARVMVLAATNRPSELDEAILRRFPQSFEIGMPDCQERAQILKVVLKGESVESDINYDRIARLCEDYTGSDIFELCKKAAYFPIREILEAEKEGKRVSVPRPLTQLDLEKVLATSKKTQVAASEYTGLSSQSSVWGSPSNADEVQAAINGISKLFVSQLRNIQPDSQDSYQQHPSEGDSE

SEQ ID NO: 24381 - DNA, 1606 bp, Arabidopsis thaliana
  misc_feature (1)..(1606): Ceres Seq. ID no. 12343570
  misc_feature: MA Experiment ID: 108434 Result: Down-regulated in Transcription
  misc_feature: MA Experiment 108434 PARAMETER Experiment Name: At_Root_Tips_cDNA_P Parameter: Tissue Value: Root Tips
  misc_feature: MA Experiment ID: 108464 Result: Up-regulated in Transcription
  misc_feature: MA Experiment 108464 PARAMETER Experiment Name: At_Germinating_Seeds_cDNA_P Parameter: Age (day) Value: 4 vs. 0
  misc_feature: MA Experiment 108464 PARAMETER Experiment Name: At_Germinating_Seeds_cDNA_P Parameter: Tissue Value: Germinating Seeds
  misc_feature: MA Experiment ID: 108501 Result: Down-regulated in Transcription
  misc_feature: MA Experiment 108501 PARAMETER Experiment Name: At_ap2_floral_buds_cDNA_P Parameter: Plant Line Value: ap2 (Ler.)
  misc_feature: MA Experiment 108501 PARAMETER Experiment Name: At_ap2_floral_buds_cDNA_P Parameter: Tissue Value: Closed Flower
  misc_feature: MA Experiment ID: 20000070 Result: Down-regulated in Transcription
  misc_feature: MA Experiment 20000070 PARAMETER Experiment Name: At_100uM_ABA_Mutants_cDNA_P Parameter: Plant Line Value: CS24
  misc_feature: MA Experiment 20000070 PARAMETER Experiment Name: At_100uM_ABA_Mutants_cDNA_P Parameter: Timepoint (hr) Value: 6
  misc_feature: MA Experiment 20000070 PARAMETER Experiment Name: At_100uM_ABA_Mutants_cDNA_P Parameter: Tissue Value: Aerial
  misc_feature: MA Experiment 20000070 PARAMETER Experiment Name: At_100uM_ABA_Mutants_cDNA_P Parameter: Treatment Value: 100uM ABA vs. No Treatment
  misc_feature: MA Experiment ID: 20000071 Result: Down-regulated in Transcription
  misc_feature: MA Experiment 20000071 PARAMETER Experiment Name: At_100uM_ABA_Mutants_cDNA_P Parameter: Plant Line Value: CS8104
  misc_feature: MA Experiment 20000071 PARAMETER Experiment Name: At_100uM_ABA_Mutants_cDNA_P Parameter: Timepoint (hr) Value: 6
  misc_feature: MA Experiment 20000071 PARAMETER Experiment Name: At_100uM_ABA_Mutants_cDNA_P Parameter: Tissue Value: Aerial
  misc_feature: MA Experiment 20000071 PARAMETER Experiment Name: At_100uM_ABA_Mutants_cDNA_P Parameter: Treatment Value: 100uM ABA vs. No Treatment
  misc_feature: MA Experiment ID: 20000087 Result: Down-regulated in Transcription
  misc_feature: MA Experiment 20000087 PARAMETER Experiment Name: At_100uM_ABA_Mutants_cDNA_P Parameter: Plant Line Value: WS
  misc_feature: MA Experiment 20000087 PARAMETER Experiment Name: At_100uM_ABA_Mutants_cDNA_P Parameter: Timepoint (hr) Value: 6
  misc_feature: MA Experiment 20000087 PARAMETER Experiment Name: At_100uM_ABA_Mutants_cDNA_P Parameter: Tissue Value: Aerial
  misc_feature: MA Experiment 20000087 PARAMETER Experiment Name: At_100uM_ABA_Mutants_cDNA_P Parameter: Treatment Value: 100uM ABA vs. No Treatment
  misc_feature: MA Experiment ID: 20000089 Result: Down-regulated in Transcription
  misc_feature: MA Experiment ID: 20000090 Result: Down-regulated in Transcription
  misc_feature: MA Experiment ID: 20000117 Result: Down-regulated in Transcription
  misc_feature: MA Experiment 20000117 PARAMETER Experiment Name: At_100uM_ABA_Mutants_cDNA_P Parameter: Plant Line Value: Columbia
  misc_feature: MA Experiment 20000117 PARAMETER Experiment Name: At_100uM_ABA_Mutants_cDNA_P Parameter: Timepoint (hr) Value: 6
  misc_feature: MA Experiment 20000117 PARAMETER Experiment Name: At_100uM_ABA_Mutants_cDNA_P Parameter: Tissue Value: Aerial
  misc_feature: MA Experiment 20000117 PARAMETER Experiment Name: At_100uM_ABA_Mutants_cDNA_P Parameter: Treatment Value: 100uM ABA vs. No Treatment
  misc_feature: MA Experiment ID: 20000180 Result: Up-regulated in Transcription
  misc_feature: MA Experiment 20000180 PARAMETER Experiment Name: At_Germinating_Seeds_P Parameter: Age (hr) Value: 24 vs. 0
  misc_feature: MA Experiment 20000180 PARAMETER Experiment Name: At_Germinating_Seeds_P Parameter: Tissue Value: Germinating Seeds
  misc_feature: MA Experiment ID: 20000184 Result: Down-regulated in Transcription
  misc_feature: MA Experiment 20000184 PARAMETER Experiment Name: At_Shoots__P Parameter: Age (day) Value: 7
  misc_feature: MA Experiment 20000184 PARAMETER Experiment Name: At_Shoots__P Parameter: Tissue Value: Shoots vs. Whole Plant
  misc_feature: MA Experiment ID: 20000227 Result: Down-regulated in Transcription
  misc_feature: MA Experiment 20000227 PARAMETER Experiment Name: At_Root-Tips-vs-Tops_P Parameter: Tissue Value: Root Tips vs. Root Tops
  misc_feature: MA Experiment ID: 20000234 Result: Down-regulated in Transcription
  misc_feature: MA Experiment 20000234 PARAMETER Experiment Name: At_Siliques_P Parameter: Age (day) Value: 21
  misc_feature: MA Experiment 20000234 PARAMETER Experiment Name: At_Siliques_P Parameter: Organism Value: A. thaliana
  misc_feature: MA Experiment 20000234 PARAMETER Experiment Name: At_Siliques_P Parameter: Plant Line Value: WS
  misc_feature: MA Experiment 20000234 PARAMETER Experiment Name: At_Siliques_P Parameter: Tissue Value: Less Than 5mm Siliques vs. Whole Plant
  misc_feature: MA Experiment ID: 20000437 Result: Down-regulated in Transcription
  misc_feature: MA Experiment 20000437 PARAMETER Experiment Name: At_Drought_P Parameter: Age (day) Value: 8
  misc_feature: MA Experiment 20000437 PARAMETER Experiment Name: At_Drought_P Parameter: Organism Value: A. thaliana
  misc_feature: MA Experiment 20000437 PARAMETER Experiment Name: At_Drought_P Parameter: Plant Line Value: WS
  misc_feature: MA Experiment 20000437 PARAMETER Experiment Name: At_Drought_P Parameter: Timepoint (hr) Value: 24
  misc_feature: MA Experiment 20000437 PARAMETER Experiment Name: At_Drought_P Parameter: Tissue Value: Whole Plant
  misc_feature: MA Experiment 20000437 PARAMETER Experiment Name: At_Drought_P Parameter: Treatment Value: Drought vs. No Drought
  misc_feature: MA Experiment ID: 20000452 Result: Up-regulated in Transcription
  misc_feature: MA Experiment 20000452 PARAMETER Experiment Name: At_CS6879_Shoots-Roots_P Parameter: Age (day) Value: 14
  misc_feature: MA Experiment 20000452 PARAMETER Experiment Name: At_CS6879_Shoots-Roots_P Parameter: Organism Value: A. thaliana
  misc_feature: MA Experiment 20000452 PARAMETER Experiment Name: At_CS6879_Shoots-Roots_P Parameter: Plant Line Value: CS6879 vs. WS
  misc_feature: MA Experiment 20000452 PARAMETER Experiment Name: At_CS6879_Shoots-Roots_P Parameter: Tissue Value: Shoots
  misc_feature: MA Experiment ID: 20000496 Result: Down-regulated in Transcription
  misc_feature: MA Experiment 20000496 PARAMETER Experiment Name: At_Guard_Cells_P Parameter: Harvest Date Value: 7/19/2002
  misc_feature: MA Experiment 20000496 PARAMETER Experiment Name: At_Guard_Cells_P Parameter: Organism Value: Canola
  misc_feature: MA Experiment 20000496 PARAMETER Experiment Name: At_Guard_Cells_P Parameter: Tissue Value: Guard Cells vs. Leaves
  misc_feature: MA Experiment ID: 20001247 Result: Up-regulated in Transcription
  misc_feature: MA Experiment 20001247 PARAMETER Experiment Name: At_Far-red-induction_P Parameter: Age (day) Value: 7
  misc_feature: MA Experiment 20001247 PARAMETER Experiment Name: At_Far-red-induction_P Parameter: Light Value: Far-red vs. White
  misc_feature: MA Experiment 20001247 PARAMETER Experiment Name: At_Far-red-induction_P Parameter: Organism Value: A. thaliana
  misc_feature: MA Experiment 20001247 PARAMETER Experiment Name: At_Far-red-induction_P Parameter: Plant Line Value: Columbia
  misc_feature: MA Experiment 20001247 PARAMETER Experiment Name: At_Far-red-induction_P Parameter: Timepoint (hr) Value: 1
  misc_feature: MA Experiment 20001247 PARAMETER Experiment Name: At_Far-red-induction_P Parameter: Tissue Value: Whole Plant
  misc_feature: MA Experiment ID: 20001459 Result: Up-regulated in Transcription
  misc_feature: MA Experiment 20001459 PARAMETER Experiment Name: At_50mM_NH4NO3_L-to-H_P Parameter: Age (day) Value: Undefined
  misc_feature: MA Experiment 20001459 PARAMETER Experiment Name: At_50mM_NH4NO3_L-to-H_P Parameter: Organism Value: Undefined
  misc_feature: MA Experiment 20001459 PARAMETER Experiment Name: At_50mM_NH4NO3_L-to-H_P Parameter: Plant Line Value: Undefined
  misc_feature: MA Experiment 20001459 PARAMETER Experiment Name: At_50mM_NH4NO3_L-to-H_P Parameter: Timepoint (hr) Value: 4
  misc_feature: MA Experiment 20001459 PARAMETER Experiment Name: At_50mM_NH4NO3_L-to-H_P Parameter: Tissue Value: Siliques
  misc_feature: MA Experiment 20001459 PARAMETER Experiment Name: At_50mM_NH4NO3_L-to-H_P Parameter: Treatment Value: 50mM NH4NO3 vs. 100mM Manitol
  misc_feature: MA Experiment ID: 20001556 Result: Down-regulated in Transcription
  misc_feature: MA Experiment 20001556 PARAMETER Experiment Name: At_Drought_Soil_Dry_P Parameter: Age (day) Value: 26
  misc_feature: MA Experiment 20001556 PARAMETER Experiment Name: At_Drought_Soil_Dry_P Parameter: Organism Value: A. thaliana
  misc_feature: MA Experiment 20001556 PARAMETER Experiment Name: At_Drought_Soil_Dry_P Parameter: Plant Line Value: WS
  misc_feature: MA Experiment 20001556 PARAMETER Experiment Name: At_Drought_Soil_Dry_P Parameter: Post Timepoint (hr) Value: None
  misc_feature: MA Experiment 20001556 PARAMETER Experiment Name: At_Drought_Soil_Dry_P Parameter: Post-Treatment Value: None
  misc_feature: MA Experiment 20001556 PARAMETER Experiment Name: At_Drought_Soil_Dry_P Parameter: Timepoint (day) Value: 12
  misc_feature: MA Experiment 20001556 PARAMETER Experiment Name: At_Drought_Soil_Dry_P Parameter: Treatment Value: Drought vs. No Drought
  misc_feature: MA Experiment ID: 20001557 Result: Down-regulated in Transcription
  misc_feature: MA Experiment 20001557 PARAMETER Experiment Name: At_Drought_Soil_Dry_P Parameter: Age (day) Value: 27
  misc_feature: MA Experiment 20001557 PARAMETER Experiment Name: At_Drought_Soil_Dry_P Parameter: Organism Value: A. thaliana
  misc_feature: MA Experiment 20001557 PARAMETER Experiment Name: At_Drought_Soil_Dry_P Parameter: Plant Line Value: WS
  misc_feature: MA Experiment 20001557 PARAMETER Experiment Name: At_Drought_Soil_Dry_P Parameter: Post Timepoint (hr) Value: 3
  misc_feature: MA Experiment 20001557 PARAMETER Experiment Name: At_Drought_Soil_Dry_P Parameter: Post-Treatment Value: Re-Water vs. No Drought
  misc_feature: MA Experiment 20001557 PARAMETER Experiment Name: At_Drought_Soil_Dry_P Parameter: Timepoint (day) Value: 13
  misc_feature: MA Experiment 20001557 PARAMETER Experiment Name: At_Drought_Soil_Dry_P Parameter: Treatment Value: Drought vs. No Drought
  misc_feature: MA Experiment ID: 20001558 Result: Down-regulated in Transcription
  misc_feature: MA Experiment 20001558 PARAMETER Experiment Name: At_Drought_Soil_Dry_P Parameter: Age (day) Value: 27
  misc_feature: MA Experiment 20001558 PARAMETER Experiment Name: At_Drought_Soil_Dry_P Parameter: Organism Value: A. thaliana
  misc_feature: MA Experiment 20001558 PARAMETER Experiment Name: At_Drought_Soil_Dry_P Parameter: Plant Line Value: WS
  misc_feature: MA Experiment 20001558 PARAMETER Experiment Name: At_Drought_Soil_Dry_P Parameter: Post Timepoint (hr) Value: 6
  misc_feature: MA Experiment 20001558 PARAMETER Experiment Name: At_Drought_Soil_Dry_P Parameter: Post-Treatment Value: Re-Water vs. No Drought
  misc_feature: MA Experiment 20001558 PARAMETER Experiment Name: At_Drought_Soil_Dry_P Parameter: Timepoint (day) Value: 13
  misc_feature: MA Experiment 20001558 PARAMETER Experiment Name: At_Drought_Soil_Dry_P Parameter: Treatment Value: Drought vs. No Drought
  misc_feature: MA Experiment ID: 20001560 Result: Down-regulated in Transcription
  misc_feature: MA Experiment 20001560 PARAMETER Experiment Name: At_Drought_Soil_Dry_P Parameter: Age (day) Value: 28
  misc_feature: MA Experiment 20001560 PARAMETER Experiment Name: At_Drought_Soil_Dry_P Parameter: Organism Value: A. thaliana
  misc_feature: MA Experiment 20001560 PARAMETER Experiment Name: At_Drought_Soil_Dry_P Parameter: Plant Line Value: WS
  misc_feature: MA Experiment 20001560 PARAMETER Experiment Name: At_Drought_Soil_Dry_P Parameter: Post Timepoint (hr) Value: None
  misc_feature: MA Experiment 20001560 PARAMETER Experiment Name: At_Drought_Soil_Dry_P Parameter: Post-Treatment Value: None
  misc_feature: MA Experiment 20001560 PARAMETER Experiment Name: At_Drought_Soil_Dry_P Parameter: Timepoint (day) Value: 14
  misc_feature: MA Experiment 20001560 PARAMETER Experiment Name: At_Drought_Soil_Dry_P Parameter: Treatment Value: Drought vs. No Drought
  misc_feature: Phenotype: SENESCENCE TIME Senescence Time-Early Senescence
  misc_feature: Phenotype: ROSETTE LEAVES Shape-Lanceolate
  misc_feature: Phenotype: WHOLE PLANT Color-Dark Green
  misc_feature: Phenotype: INFLORESCENCE Height-Short
  misc_feature: Phenotype: INFLORESCENCE Other
  misc_feature: Phenotype: FERTILITY Fertility-Sterile
  misc_feature: Phenotype: ROSETTE LEAVES Shape-Lanceolate
  misc_feature: Phenotype: WHOLE PLANT Color-Dark Green
  misc_feature: Phenotype: INFLORESCENCE Height-Short
  misc_feature: Phenotype: INFLORESCENCE Other
  misc_feature: Phenotype: FERTILITY Fertility-Sterile
aaaaacaaataatatctaacaaaaaaccattcacaaaaaaaatagagagaatcatctgagagactagtagtgatgagatgagcttcttctcctacaatctcagaaacctccgatcactgttttagataatctctacaacggatacaatggaaagcaccgattcttccggtggtccaccaccgccacaacctaaccttcctccaggcttccggtttcaccctaccgacgaagagcttgttgttcactacctcaaacgcaaagcagcctctgctcctttacctgtcgccatcatcgccgaagtcgatctctataaatttgatccatgggaacttcccgctaaagcatcgtttggagaacaagaatggtacttctttagtccacgagatcggaagtatccaaacggagcaagaccaaacagagcggcgacttcaggttattggaaagcgaccggtacagataaaccggtacttgcttccgacggtaaccaaaaggtgggcgtgaagaaggcactagtcttctacagtggtaaaccaccaaaaggcgttaaaagtgattggatcatgcatgagtatcgtctcatcgaaaacaaaccaaacaatcgacctcctggctgtgatttcggcaacaagaaaaactcactcagacttgatgattgggtgttatgtagaatctacaagaagaacaacgcaagtcgacatgttgataacgataaggatcatgatatgatcgattacattttcaggaagattcctccatctttatcaatggcggctgcttctacaggacttcaccatcatcatcataatgtctcaagatcaatgaatttcttccctggcaaattctccggtggtggttacgggattttctctgacggtggtaacacgagtatatacgacggcggtggcatgatcaacaatattggtactgactcagtggatcacgacaataacgcagacgtcgttggtttaaatcatgcttcgtcgtctggtcctatgatgatggcgaatttgaaacgaactctcccggtgccgtattggcctgtagcagaggaggagcaagatgcatctccgagcaaacggtttcacggtgtaggaggaggaggaggagattgttcgaacatgtcttcttcgatgatggaagagacacctccactaatgcaacaacaaggtggtgtattaggagatggattattcagaacgacatcgtaccaattacccggtttaaattggtactcttcttaatcaaatgtgtttcgccgccggtgtgaagaattttccggtgacagtgaagattttttccgattggtggggtcatttgcatgcattatataatttgagatttgtgtatatgttttgggttaattaattggtcataggggttaggggaagaagattatttagagagcggagaagatcagaagtgaggcaacatatagaaaacataggtttaaaaaatattactgtttgttaagtttaatgattaaatgtataaatcttatacttagatgtttatatatagtttgtatagatgcatatagtttctctcaatgctattttgagattgtattttcttgttaaggaaatgattaaaaaaaaaatagttgtgc

SEQ ID NO: 24382 - protein, 364 aa, Arabidopsis thaliana
  peptide (1)..(364): Ceres Seq. ID no. 12343571
  misc_feature (17)..(145): Pfam Name: No apical meristem (NAM) protein Pfam Description: No apical meristem (NAM) protein
  misc_feature (13)..(182): Homolog of NCBI NO: 6223651 NR Description: NAM-like protein (no apical meristem)
  misc_feature (13)..(182): Homolog of NCBI NO: 30679026 NR Description: No apical meristem (NAM) protein family
  misc_feature (1)..(214): Homolog of NCBI NO: 34899790 NR Description: OJ1773_H01.21 [Oryza sativa (japonica
  misc_feature (5)..(230): Homolog of NCBI NO: 25352286 NR Description: hypothetical protein F11P17.16 [imported] -
  misc_feature (1)..(230): Homolog of NCBI NO: 18407026 NR Description: NAM protein, putative
  misc_feature (1)..(230): Homolog of NCBI NO: 21593425 NR Description: NAM protein, putative [Arabidopsis thaliana]
  misc_feature (1)..(262): Homolog of NCBI NO: 21554226 NR Description: NAM-like protein [Arabidopsis thaliana]
  misc_feature (1)..(262): Homolog of NCBI NO: 20466640 NR Description: NAM-like protein [Arabidopsis thaliana]
  misc_feature (1)..(262): Homolog of NCBI NO: 15219110 NR Description: NAM-like protein
  misc_feature (1)..(364): Homolog of NCBI NO: 15232606 NR Description: putative jasmonic acid regulatory protein
MESTDSSGGPPPPQPNLPPGFRFHPTDEELVVHYLKRKAASAPLPVAIIAEVDLYKFDPWELPAKASFGEQEWYFFSPRDRKYPNGARPNRAATSGYWKATGTDKPVLASDGNQKVGVKKALVFYSGKPPKGVKSDWIMHEYRLIENKPNNRPPGCDFGNKKNSLRLDDWVLCRIYKKNNASRHVDNDKDHDMIDYIFRKIPPSLSMAAASTGLHHHHHNVSRSMNFFPGKFSGGGYGIFSDGGNTSIYDGGGMINNIGTDSVDHDNNADVVGLNHASSSGPMMMANLKRTLPVPYWPVAEEEQDASPSKRFHGVGGGGGDCSNMSSSMMEETPPLMQQQGGVLGDGLFRTTSYQLPGLNWYSS

SEQ ID NO: 24383 - protein, 226 aa, Arabidopsis thaliana
  peptide (1)..(226): Ceres Seq. ID no. 12343572
  misc_feature (1)..(44): Homolog of NCBI NO: 6223651 NR Description: NAM-like protein (no apical meristem)
  misc_feature (1)..(44): Homolog of NCBI NO: 30679026 NR Description: No apical meristem (NAM) protein family
  misc_feature (1)..(76): Homolog of NCBI NO: 34899790 NR Description: OJ1773_H01.21 [Oryza sativa (japonica
  misc_feature (1)..(92): Homolog of NCBI NO: 25352286 NR Description: hypothetical protein F11P17.16 [imported] -
  misc_feature (1)..(92): Homolog of NCBI NO: 18407026 NR Description: NAM protein, putative
  misc_feature (1)..(92): Homolog of NCBI NO: 21593425 NR Description: NAM protein, putative [Arabidopsis thaliana]
  misc_feature (1)..(124): Homolog of NCBI NO: 21554226 NR Description: NAM-like protein [Arabidopsis thaliana]
  misc_feature (1)..(124): Homolog of NCBI NO: 20466640 NR Description: NAM-like protein [Arabidopsis thaliana]
  misc_feature (1)..(124): Homolog of NCBI NO: 15219110 NR Description: NAM-like protein
  misc_feature (1)..(226): Homolog of NCBI NO: 15232606 NR Description: putative jasmonic acid regulatory protein
MHEYRLIENKPNNRPPGCDFGNKKNSLRLDDWVLCRIYKKNNASRHVDNDKDHDMIDYIFRKIPPSLSMAAASTGLHHHHHNVSRSMNFFPGKFSGGGYGIFSDGGNTSIYDGGGMINNIGTDSVDHDNNADVVGLNHASSSGPMMMANLKRTLPVPYWPVAEEEQDASPSKRFHGVGGGGGDCSNMSSSMMEETPPLMQQQGGVLGDGLFRTTSYQLPGLNWYSS

SEQ ID NO: 24384 - DNA, 1346 bp, Arabidopsis thaliana
  misc_feature (1)..(1346): Ceres Seq. ID no. 12562433
  misc_feature: MA Experiment ID: 20000070 Result: Down-regulated in Transcription
  misc_feature: MA Experiment 20000070 PARAMETER Experiment Name: At_100uM_ABA_Mutants_cDNA_P Parameter: Plant Line Value: CS24
  misc_feature: MA Experiment 20000070 PARAMETER Experiment Name: At_100uM_ABA_Mutants_cDNA_P Parameter: Timepoint (hr) Value: 6
  misc_feature: MA Experiment 20000070 PARAMETER Experiment Name: At_100uM_ABA_Mutants_cDNA_P Parameter: Tissue Value: Aerial
  misc_feature: MA Experiment 20000070 PARAMETER Experiment Name: At_100uM_ABA_Mutants_cDNA_P Parameter: Treatment Value: 100uM ABA vs. No Treatment
  misc_feature: MA Experiment ID: 20000071 Result: Down-regulated in Transcription
  misc_feature: MA Experiment 20000071 PARAMETER Experiment Name: At_100uM_ABA_Mutants_cDNA_P Parameter: Plant Line Value: CS8104
  misc_feature: MA Experiment 20000071 PARAMETER Experiment Name: At_100uM_ABA_Mutants_cDNA_P Parameter: Timepoint (hr) Value: 6
  misc_feature: MA Experiment 20000071 PARAMETER Experiment Name: At_100uM_ABA_Mutants_cDNA_P Parameter: Tissue Value: Aerial
  misc_feature: MA Experiment 20000071 PARAMETER Experiment Name: At_100uM_ABA_Mutants_cDNA_P Parameter: Treatment Value: 100uM ABA vs. No Treatment
  misc_feature: MA Experiment ID: 20000086 Result: Down-regulated in Transcription
  misc_feature: MA Experiment 20000086 PARAMETER Experiment Name: At_100uM_ABA_Mutants_cDNA_P Parameter: Plant Line Value: CS22
  misc_feature: MA Experiment 20000086 PARAMETER Experiment Name: At_100uM_ABA_Mutants_cDNA_P Parameter: Timepoint (hr) Value: 6
  misc_feature: MA Experiment 20000086 PARAMETER Experiment Name: At_100uM_ABA_Mutants_cDNA_P Parameter: Tissue Value: Aerial
  misc_feature: MA Experiment 20000086 PARAMETER Experiment Name: At_100uM_ABA_Mutants_cDNA_P Parameter: Treatment Value: 100uM ABA vs. No Treatment
  misc_feature: MA Experiment ID: 20000087 Result: Down-regulated in Transcription
  misc_feature: MA Experiment 20000087 PARAMETER Experiment Name: At_100uM_ABA_Mutants_cDNA_P Parameter: Plant Line Value: WS
  misc_feature: MA Experiment 20000087 PARAMETER Experiment Name: At_100uM_ABA_Mutants_cDNA_P Parameter: Timepoint (hr) Value: 6
  misc_feature: MA Experiment 20000087 PARAMETER Experiment Name: At_100uM_ABA_Mutants_cDNA_P Parameter: Tissue Value: Aerial
  misc_feature: MA Experiment 20000087 PARAMETER Experiment Name: At_100uM_ABA_Mutants_cDNA_P Parameter: Treatment Value: 100uM ABA vs. No Treatment
  misc_feature: MA Experiment ID: 20000117 Result: Down-regulated in Transcription
  misc_feature: MA Experiment 20000117 PARAMETER Experiment Name: At_100uM_ABA_Mutants_cDNA_P Parameter: Plant Line Value: Columbia
  misc_feature: MA Experiment 20000117 PARAMETER Experiment Name: At_100uM_ABA_Mutants_cDNA_P Parameter: Timepoint (hr) Value: 6
  misc_feature: MA Experiment 20000117 PARAMETER Experiment Name: At_100uM_ABA_Mutants_cDNA_P Parameter: Tissue Value: Aerial
  misc_feature: MA Experiment 20000117 PARAMETER Experiment Name: At_100uM_ABA_Mutants_cDNA_P Parameter: Treatment Value: 100uM ABA vs. No Treatment
  misc_feature: MA Experiment ID: 20000180 Result: Up-regulated in Transcription
  misc_feature: MA Experiment 20000180 PARAMETER Experiment Name: At_Germinating_Seeds_P Parameter: Age (hr) Value: 24 vs. 0
  misc_feature: MA Experiment 20000180 PARAMETER Experiment Name: At_Germinating_Seeds_P Parameter: Tissue Value: Germinating Seeds
  misc_feature: MA Experiment ID: 20000185 Result: Down-regulated in Transcription
  misc_feature: MA Experiment 20000185 PARAMETER Experiment Name: At_Roots__P Parameter: Age (day) Value: 7 vs. 21
  misc_feature: MA Experiment 20000185 PARAMETER Experiment Name: At_Roots__P Parameter: Organism Value: A. thaliana
  misc_feature: MA Experiment 20000185 PARAMETER Experiment Name: At_Roots__P Parameter: Tissue Value: Roots vs. Whole Plant
  misc_feature: MA Experiment ID: 20000234 Result: Up-regulated in Transcription
  misc_feature: MA Experiment 20000234 PARAMETER Experiment Name: At_Siliques_P Parameter: Age (day) Value: 21
  misc_feature: MA Experiment 20000234 PARAMETER Experiment Name: At_Siliques_P Parameter: Organism Value: A. thaliana
  misc_feature: MA Experiment 20000234 PARAMETER Experiment Name: At_Siliques_P Parameter: Plant Line Value: WS
  misc_feature: MA Experiment 20000234 PARAMETER Experiment Name: At_Siliques_P Parameter: Tissue Value: Less Than 5mm Siliques vs. Whole Plant
  misc_feature: MA Experiment ID: 20000436 Result: Down-regulated in Transcription
  misc_feature: MA Experiment 20000436 PARAMETER Experiment Name: At_Drought_P Parameter: Age (day) Value: 7
  misc_feature: MA Experiment 20000436 PARAMETER Experiment Name: At_Drought_P Parameter: Organism Value: A. thaliana
  misc_feature: MA Experiment 20000436 PARAMETER Experiment Name: At_Drought_P Parameter: Plant Line Value: WS
  misc_feature: MA Experiment 20000436 PARAMETER Experiment Name: At_Drought_P Parameter: Timepoint (hr) Value: 12
  misc_feature: MA Experiment 20000436 PARAMETER Experiment Name: At_Drought_P Parameter: Tissue Value: Whole Plant
  misc_feature: MA Experiment 20000436 PARAMETER Experiment Name: At_Drought_P Parameter: Treatment Value: Drought vs. No Drought
  misc_feature: MA Experiment ID: 20000437 Result: Down-regulated in Transcription
  misc_feature: MA Experiment 20000437 PARAMETER Experiment Name: At_Drought_P Parameter: Age (day) Value: 8
  misc_feature: MA Experiment 20000437 PARAMETER Experiment Name: At_Drought_P Parameter: Organism Value: A. thaliana
  misc_feature: MA Experiment 20000437 PARAMETER Experiment Name: At_Drought_P Parameter: Plant Line Value: WS
  misc_feature: MA Experiment 20000437 PARAMETER Experiment Name: At_Drought_P Parameter: Timepoint (hr) Value: 24
  misc_feature: MA Experiment 20000437 PARAMETER Experiment Name: At_Drought_P Parameter: Tissue Value: Whole Plant
  misc_feature: MA Experiment 20000437 PARAMETER Experiment Name: At_Drought_P Parameter: Treatment Value: Drought vs. No Drought
  misc_feature: MA Experiment ID: 20000438 Result: Up-regulated in Transcription
  misc_feature: MA Experiment 20000438 PARAMETER Experiment Name: At_Shoots__P Parameter: Age (day) Value: 14
  misc_feature: MA Experiment 20000438 PARAMETER Experiment Name: At_Shoots__P Parameter: Tissue Value: Shoots vs. Whole Plant
  misc_feature: MA Experiment ID: 20000439 Result: Down-regulated in Transcription
  misc_feature: MA Experiment 20000439 PARAMETER Experiment Name: At_Roots__P Parameter: Age (day) Value: 14 vs. 21
  misc_feature: MA Experiment 20000439 PARAMETER Experiment Name: At_Roots__P Parameter: Organism Value: A. thaliana
  misc_feature: MA Experiment 20000439 PARAMETER Experiment Name: At_Roots__P Parameter: Tissue Value: Roots vs. Whole Plant
  misc_feature: MA Experiment ID: 20000794 Result: Down-regulated in Transcription
  misc_feature: MA Experiment 20000794 PARAMETER Experiment Name: At_Petals_P Parameter: Age (day) Value: 23-25 days
  misc_feature: MA Experiment 20000794 PARAMETER Experiment Name: At_Petals_P Parameter: Plant Line Value: WS
  misc_feature: MA Experiment 20000794 PARAMETER Experiment Name: At_Petals_P Parameter: Tissue Value: Petals vs. Whole plant
  misc_feature: MA Experiment ID: 20001450 Result: Down-regulated in Transcription
  misc_feature: MA Experiment 20001450 PARAMETER Experiment Name: At_Far-red-induction_P Parameter: Age (day) Value: 7
  misc_feature: MA Experiment 20001450 PARAMETER Experiment Name: At_Far-red-induction_P Parameter: Light Value: Far-red vs. White
  misc_feature: MA Experiment 20001450 PARAMETER Experiment Name: At_Far-red-induction_P Parameter: Organism Value: A. thaliana
  misc_feature: MA Experiment 20001450 PARAMETER Experiment Name: At_Far-red-induction_P Parameter: Plant Line Value: Columbia
  misc_feature: MA Experiment 20001450 PARAMETER Experiment Name: At_Far-red-induction_P Parameter: Timepoint (hr) Value: 8
  misc_feature: MA Experiment 20001450 PARAMETER Experiment Name: At_Far-red-induction_P Parameter: Tissue Value: Whole Plant
  misc_feature: MA Experiment ID: 20001757 Result: Up-regulated in Transcription
  misc_feature: MA Experiment 20001757 PARAMETER Experiment Name: At_50mM_NH4NO3_L-to-H_P Parameter: Timepoint (hr) Value: 6
  misc_feature: MA Experiment 20001757 PARAMETER Experiment Name: At_50mM_NH4NO3_L-to-H_P Parameter: Tissue Value: Leaf
  misc_feature: MA Experiment 20001757 PARAMETER Experiment Name: At_50mM_NH4NO3_L-to-H_P Parameter: Treatment Value: 50mM NH4NO3 vs 100mM Mannitol
  misc_feature: MA Experiment ID: 20001905 Result: Down-regulated in Transcription
  misc_feature: MA Experiment 20001905 PARAMETER Experiment Name: At_Drought_Reproduction_P Parameter: Age (day) Value: 40
  misc_feature: MA Experiment 20001905 PARAMETER Experiment Name: At_Drought_Reproduction_P Parameter: Organism Value: A. thaliana
  misc_feature: MA Experiment 20001905 PARAMETER Experiment Name: At_Drought_Reproduction_P Parameter: Plant Line Value: WS
  misc_feature: MA Experiment 20001905 PARAMETER Experiment Name: At_Drought_Reproduction_P Parameter: Timepoint (day) Value: 10
  misc_feature: MA Experiment 20001905 PARAMETER Experiment Name: At_Drought_Reproduction_P Parameter: Tissue Value: Rosettes
  misc_feature: MA Experiment 20001905 PARAMETER Experiment Name: At_Drought_Reproduction_P Parameter: Treatment Value: Drought vs. No Drought
  misc_feature: MA Experiment ID: 20001906 Result: Down-regulated in Transcription
  misc_feature: MA Experiment 20001906 PARAMETER Experiment Name: At_Drought_Reproduction_P Parameter: Age (day) Value: 35
  misc_feature: MA Experiment 20001906 PARAMETER Experiment Name: At_Drought_Reproduction_P Parameter: Organism Value: A. thaliana
  misc_feature: MA Experiment 20001906 PARAMETER Experiment Name: At_Drought_Reproduction_P Parameter: Plant Line Value: WS
  misc_feature: MA Experiment 20001906 PARAMETER Experiment Name: At_Drought_Reproduction_P Parameter: Timepoint (day) Value: 5
  misc_feature: MA Experiment 20001906 PARAMETER Experiment Name: At_Drought_Reproduction_P Parameter: Tissue Value: Siliques
  misc_feature: MA Experiment 20001906 PARAMETER Experiment Name: At_Drought_Reproduction_P Parameter: Treatment Value: Drought vs. No Drought
  misc_feature: MA Experiment ID: 20001911 Result: Down-regulated in Transcription
  misc_feature: MA Experiment 20001911 PARAMETER Experiment Name: At_Drought_Reproduction_P Parameter: Age (day) Value: 40
  misc_feature: MA Experiment 20001911 PARAMETER Experiment Name: At_Drought_Reproduction_P Parameter: Organism Value: A. thaliana
  misc_feature: MA Experiment 20001911 PARAMETER Experiment Name: At_Drought_Reproduction_P Parameter: Plant Line Value: WS
  misc_feature: MA Experiment 20001911 PARAMETER Experiment Name: At_Drought_Reproduction_P Parameter: Timepoint (day) Value: 10
  misc_feature: MA Experiment 20001911 PARAMETER Experiment Name: At_Drought_Reproduction_P Parameter: Tissue Value: Flowers
  misc_feature: MA Experiment 20001911 PARAMETER Experiment Name: At_Drought_Reproduction_P Parameter: Treatment Value: Drought vs. No Drought
gacgacactcgcaacttcttccttatcgacacctacactctcctgctacaatggcgactttcctaacaaatgttgtttcaatcaaacctacaatcttctcattccagtccgaatccttcactcctttgcatacacgggtcaatgtattctcctcgaaaccctttccttctctcgctggaactttctcccggagctctagaacgagattcattccttatgctgtaacggagacggaagaaaaacccgccgctttggaccctagttcagaagctgccaggcgtgtgtatatcggtaacatacccaggacggtgaccaatgagcagctcactaaacttgttgaagaacacggtgctgttgaaaaagttcaggtgatgtatgataagtattcaggaagaagccgtcgatttgggtttgctacaatgaaatcagttgaagatgctaatgctgtggttgagaaattgaatggcaataccgttgaagggcgtgagataaaggttaacattacagagaaacctatagcatcatcacctgatttatcagttcttcagtctgaggattcagcatttgtagatagcccttacaaagtgtatgttgggaatctagcaaagactgttacaaaagagatgcttgagaatttgttttctgagaaagggaaagtagtaagtgctaaggtttcaagagtacctggaacttccaaatccaccgggtttggattcgttacgttttcttctgaagaagatgtggaagcagccattgttgctcttaacaattcgttgctggaaggacagaagattcgggtgaataaggcttagcctattggatcataaagaatgtgaaaagaatcgctttgaagagtttttgtaatgcaaatcattagagcttagtgtatcatcttgtattcattctaagttgaaaatgaaaccatatcttttcaaaagccaaaaaaaaaaaaaaaaaagcttctcgtgccgttttttttttttttttttgatataagatgtgcagcctatataaatagtgaaaacaaattctagttcattcattacaatttcccaaaacgagtataagaactcgcccaaaccaacaaataagtaattgctaaaacaatactctcctcccctctctgggcaggacagcatcaaacacacctaaagccattctatgacaaaaccaaaatggcaaacaaataacccctgtgagtttccataactacacagggatgcaaagaatgaaataaactcggcctctccacaaatacaaaggccggagactgaaccccaaaacaaagaagaggaaagaattgaagaaaaataatatattctgaaaaaatcaaatagttgtttgct

SEQ ID NO: 24385 - protein, 269 aa, Arabidopsis thaliana
  peptide (1)..(269): Ceres Seq. ID no. 12562434
  misc_feature (94)..(165): Pfam Name: RNA recognition motif. (a.k.a. RRM, RBD, or RNP domain) Pfam Description: RNA recognition motif. (a.k.a. RRM, RBD, or RNP
  misc_feature (76)..(269): Homolog of NCBI NO: 1076509 NR Description: RNA-binding protein RNP1 precursor - kidney bean
  misc_feature (76)..(269): Homolog of NCBI NO: 7446342 NR Description: RNA-binding protein precursor, 33K - wood tobacco
  misc_feature (76)..(269): Homolog of NCBI NO: 681912 NR Description: cp33 [Arabidopsis thaliana]
  misc_feature (66)..(269): Homolog of NCBI NO: 34913270 NR Description: putative ribonucleoprotein
  misc_feature (76)..(269): Homolog of NCBI NO: 17064758 NR Description: ubiquitin / ribosomal protein CEP52 [Arabidopsis
  misc_feature (76)..(269): Homolog of NCBI NO: 15231200 NR Description: chloroplast RNA-binding protein cp33
  misc_feature (18)..(269): Homolog of NCBI NO: 18921322 NR Description: putative ribonucleoprotein [Oryza sativa]
  misc_feature (26)..(269): Homolog of NCBI NO: 7578881 NR Description: plastid-specific ribosomal protein 2 precursor
  misc_feature (17)..(266): Homolog of NCBI NO: 11357772 NR Description: hypothetical protein F4F15.260 - Arabidopsis
  misc_feature (17)..(269): Homolog of NCBI NO: 30693595 NR Description: RNA recognition motif (RRM)-containing protein
RHSQLLPYRHLHSPATMATFLTNVVSIKPTIFSFQSESFTPLHTRVNVFSSKPFPSLAGTFSRSSRTRFIPYAVTETEEKPAALDPSSEAARRVYIGNIPRTVTNEQLTKLVEEHGAVEKVQVMYDKYSGRSRRFGFATMKSVEDANAVVEKLNGNTVEGREIKVNITEKPIASSPDLSVLQSEDSAFVDSPYKVYVGNLAKTVTKEMLENLFSEKGKVVSAKVSRVPGTSKSTGFGFVTFSSEEDVEAAIVALNNSLLEGQKIRVNKA

SEQ ID NO: 24386 - protein, 253 aa, Arabidopsis thaliana
  peptide (1)..(253): Ceres Seq. ID no. 12562435
  misc_feature (78)..(149): Pfam Name: RNA recognition motif. (a.k.a. RRM, RBD, or RNP domain) Pfam Description: RNA recognition motif. (a.k.a. RRM, RBD, or RNP
  misc_feature (60)..(253): Homolog of NCBI NO: 1076509 NR Description: RNA-binding protein RNP1 precursor - kidney bean
  misc_feature (60)..(253): Homolog of NCBI NO: 7446342 NR Description: RNA-binding protein precursor, 33K - wood tobacco
  misc_feature (60)..(253): Homolog of NCBI NO: 681912 NR Description: cp33 [Arabidopsis thaliana]
  misc_feature (50)..(253): Homolog of NCBI NO: 34913270 NR Description: putative ribonucleoprotein
  misc_feature (60)..(253): Homolog of NCBI NO: 17064758 NR Description: ubiquitin / ribosomal protein CEP52 [Arabidopsis
  misc_feature (60)..(253): Homolog of NCBI NO: 15231200 NR Description: chloroplast RNA-binding protein cp33
  misc_feature (2)..(253): Homolog of NCBI NO: 18921322 NR Description: putative ribonucleoprotein [Oryza sativa]
  misc_feature (10)..(253): Homolog of NCBI NO: 7578881 NR Description: plastid-specific ribosomal protein 2 precursor
  misc_feature (1)..(250): Homolog of NCBI NO: 11357772 NR Description: hypothetical protein F4F15.260 - Arabidopsis
  misc_feature (1)..(253): Homolog of NCBI NO: 30693595 NR Description: RNA recognition motif (RRM)-containing protein
MATFLTNVVSIKPTIFSFQSESFTPLHTRVNVFSSKPFPSLAGTFSRSSRTRFIPYAVTETEEKPAALDPSSEAARRVYIGNIPRTVTNEQLTKLVEEHGAVEKVQVMYDKYSGRSRRFGFATMKSVEDANAVVEKLNGNTVEGREIKVNITEKPIASSPDLSVLQSEDSAFVDSPYKVYVGNLAKTVTKEMLENLFSEKGKVVSAKVSRVPGTSKSTGFGFVTFSSEEDVEAAIVALNNSLLEGQKIRVNKA

SEQ ID NO: 24387 - protein, 146 aa, Arabidopsis thaliana
  peptide (1)..(146): Ceres Seq. ID no. 12562436
  misc_feature (72)..(143): Pfam Name: RNA recognition motif. (a.k.a. RRM, RBD, or RNP domain) Pfam Description: RNA recognition motif. (a.k.a. RRM, RBD, or RNP
  misc_feature (1)..(146): Homolog of NCBI NO: 1076509 NR Description: RNA-binding protein RNP1 precursor - kidney bean
  misc_feature (1)..(146): Homolog of NCBI NO: 7446342 NR Description: RNA-binding protein precursor, 33K - wood tobacco
  misc_feature (1)..(146): Homolog of NCBI NO: 681912 NR Description: cp33 [Arabidopsis thaliana]
  misc_feature (1)..(146): Homolog of NCBI NO: 34913270 NR Description: putative ribonucleoprotein
  misc_feature (1)..(146): Homolog of NCBI NO: 17064758 NR Description: ubiquitin / ribosomal protein CEP52 [Arabidopsis
  misc_feature (1)..(146): Homolog of NCBI NO: 15231200 NR Description: chloroplast RNA-binding protein cp33
  misc_feature (1)..(146): Homolog of NCBI NO: 18921322 NR Description: putative ribonucleoprotein [Oryza sativa]
  misc_feature (1)..(146): Homolog of NCBI NO: 7578881 NR Description: plastid-specific ribosomal protein 2 precursor
  misc_feature (1)..(143): Homolog of NCBI NO: 11357772 NR Description: hypothetical protein F4F15.260 - Arabidopsis
  misc_feature (1)..(146): Homolog of NCBI NO: 30693595 NR Description: RNA recognition motif (RRM)-containing protein
MYDKYSGRSRRFGFATMKSVEDANAVVEKLNGNTVEGREIKVNITEKPIASSPDLSVLQSEDSAFVDSPYKVYVGNLAKTVTKEMLENLFSEKGKVVSAKVSRVPGTSKSTGFGFVTFSSEEDVEAAIVALNNSLLEGQKIRVNKA

SEQ ID NO: 24388 - DNA, 548 bp, Arabidopsis thaliana
  misc_feature (1)..(548): Ceres Seq. ID no. 12395205
  misc_feature: MA Experiment ID: 108434 Result: Down-regulated in Transcription
  misc_feature: MA Experiment 108434 PARAMETER Experiment Name: At_Root_Tips_cDNA_P Parameter: Tissue Value: Root Tips
  misc_feature: MA Experiment ID: 108435 Result: Down-regulated in Transcription
  misc_feature: MA Experiment 108435 PARAMETER Experiment Name: At_stm_Mutants_cDNA_P Parameter: Plant Line Value: wt Landsburg vs stm
  misc_feature: MA Experiment 108435 PARAMETER Experiment Name: At_stm_Mutants_cDNA_P Parameter: Tissue Value: Shoot Apical Meristem Region
  misc_feature: MA Experiment ID: 108461 Result: Up-regulated in Transcription
  misc_feature: MA Experiment 108461 PARAMETER Experiment Name: At_Germinating_Seeds_cDNA_P Parameter: Age (day) Value: 1 vs. 0
  misc_feature: MA Experiment 108461 PARAMETER Experiment Name: At_Germinating_Seeds_cDNA_P Parameter: Tissue Value: Germinating Seeds
  misc_feature: MA Experiment ID: 108462 Result: Up-regulated in Transcription
  misc_feature: MA Experiment 108462 PARAMETER Experiment Name: At_Germinating_Seeds_cDNA_P Parameter: Age (day) Value: 2 vs. 0
  misc_feature: MA Experiment 108462 PARAMETER Experiment Name: At_Germinating_Seeds_cDNA_P Parameter: Tissue Value: Germinating Seeds
  misc_feature: MA Experiment ID: 108464 Result: Up-regulated in Transcription
  misc_feature: MA Experiment 108464 PARAMETER Experiment Name: At_Germinating_Seeds_cDNA_P Parameter: Age (day) Value: 4 vs. 0
  misc_feature: MA Experiment 108464 PARAMETER Experiment Name: At_Germinating_Seeds_cDNA_P Parameter: Tissue Value: Germinating Seeds
  misc_feature: MA Experiment ID: 108488 Result: Up-regulated in Transcription
  misc_feature: MA Experiment ID: 20000113 Result: Down-regulated in Transcription
  misc_feature: MA Experiment 20000113 PARAMETER Experiment Name: At_42deg_Heat_cDNA_P Parameter: Temperature (deg C) Value: 42 vs. 22
  misc_feature: MA Experiment 20000113 PARAMETER Experiment Name: At_42deg_Heat_cDNA_P Parameter: Timepoint (hr) Value: 8
  misc_feature: MA Experiment 20000113 PARAMETER Experiment Name: At_42deg_Heat_cDNA_P Parameter: Tissue Value: Aerial
  misc_feature: MA Experiment ID: 20000117 Result: Down-regulated in Transcription
  misc_feature: MA Experiment 20000117 PARAMETER Experiment Name: At_100uM_ABA_Mutants_cDNA_P Parameter: Plant Line Value: Columbia
  misc_feature: MA Experiment 20000117 PARAMETER Experiment Name: At_100uM_ABA_Mutants_cDNA_P Parameter: Timepoint (hr) Value: 6
  misc_feature: MA Experiment 20000117 PARAMETER Experiment Name: At_100uM_ABA_Mutants_cDNA_P Parameter: Tissue Value: Aerial
  misc_feature: MA Experiment 20000117 PARAMETER Experiment Name: At_100uM_ABA_Mutants_cDNA_P Parameter: Treatment Value: 100uM ABA vs. No Treatment
  misc_feature: MA Experiment ID: 20000180 Result: Up-regulated in Transcription
  misc_feature: MA Experiment 20000180 PARAMETER Experiment Name: At_Germinating_Seeds_P Parameter: Age (hr) Value: 24 vs. 0
  misc_feature: MA Experiment 20000180 PARAMETER Experiment Name: At_Germinating_Seeds_P Parameter: Tissue Value: Germinating Seeds
  misc_feature: MA Experiment ID: 20000437 Result: Down-regulated in Transcription
  misc_feature: MA Experiment 20000437 PARAMETER Experiment Name: At_Drought_P Parameter: Age (day) Value: 8
  misc_feature: MA Experiment 20000437 PARAMETER Experiment Name: At_Drought_P Parameter: Organism Value: A. thaliana
  misc_feature: MA Experiment 20000437 PARAMETER Experiment Name: At_Drought_P Parameter: Plant Line Value: WS
  misc_feature: MA Experiment 20000437 PARAMETER Experiment Name: At_Drought_P Parameter: Timepoint (hr) Value: 24
  misc_feature: MA Experiment 20000437 PARAMETER Experiment Name: At_Drought_P Parameter: Tissue Value: Whole Plant
  misc_feature: MA Experiment 20000437 PARAMETER Experiment Name: At_Drought_P Parameter: Treatment Value: Drought vs. No Drought
  misc_feature: MA Experiment ID: 20000438 Result: Up-regulated in Transcription
  misc_feature: MA Experiment 20000438 PARAMETER Experiment Name: At_Shoots__P Parameter: Age (day) Value: 14
  misc_feature: MA Experiment 20000438 PARAMETER Experiment Name: At_Shoots__P Parameter: Tissue Value: Shoots vs. Whole Plant
  misc_feature: MA Experiment ID: 20000439 Result: Down-regulated in Transcription
  misc_feature: MA Experiment 20000439 PARAMETER Experiment Name: At_Roots__P Parameter: Age (day) Value: 14 vs. 21
  misc_feature: MA Experiment 20000439 PARAMETER Experiment Name: At_Roots__P Parameter: Organism Value: A. thaliana
  misc_feature: MA Experiment 20000439 PARAMETER Experiment Name: At_Roots__P Parameter: Tissue Value: Roots vs. Whole Plant
  misc_feature: MA Experiment ID: 20000794 Result: Down-regulated in Transcription
  misc_feature: MA Experiment 20000794 PARAMETER Experiment Name: At_Petals_P Parameter: Age (day) Value: 23-25 days
  misc_feature: MA Experiment 20000794 PARAMETER Experiment Name: At_Petals_P Parameter: Plant Line Value: WS
  misc_feature: MA Experiment 20000794 PARAMETER Experiment Name: At_Petals_P Parameter: Tissue Value: Petals vs. Whole plant
  misc_feature: MA Experiment ID: 20001450 Result: Down-regulated in Transcription
  misc_feature: MA Experiment 20001450 PARAMETER Experiment Name: At_Far-red-induction_P Parameter: Age (day) Value: 7
  misc_feature: MA Experiment 20001450 PARAMETER Experiment Name: At_Far-red-induction_P Parameter: Light Value: Far-red vs. White
  misc_feature: MA Experiment 20001450 PARAMETER Experiment Name: At_Far-red-induction_P Parameter: Organism Value: A. thaliana
  misc_feature: MA Experiment 20001450 PARAMETER Experiment Name: At_Far-red-induction_P Parameter: Plant Line Value: Columbia
  misc_feature: MA Experiment 20001450 PARAMETER Experiment Name: At_Far-red-induction_P Parameter: Timepoint (hr) Value: 8
  misc_feature: MA Experiment 20001450 PARAMETER Experiment Name: At_Far-red-induction_P Parameter: Tissue Value: Whole Plant
  misc_feature: MA Experiment ID: 20001555 Result: Down-regulated in Transcription
  misc_feature: MA Experiment 20001555 PARAMETER Experiment Name: At_Drought_Soil_Dry_P Parameter: Age (day) Value: 24
  misc_feature: MA Experiment 20001555 PARAMETER Experiment Name: At_Drought_Soil_Dry_P Parameter: Organism Value: A. thaliana
  misc_feature: MA Experiment 20001555 PARAMETER Experiment Name: At_Drought_Soil_Dry_P Parameter: Plant Line Value: WS
  misc_feature: MA Experiment 20001555 PARAMETER Experiment Name: At_Drought_Soil_Dry_P Parameter: Post Timepoint (hr) Value: None
  misc_feature: MA Experiment 20001555 PARAMETER Experiment Name: At_Drought_Soil_Dry_P Parameter: Post-Treatment Value: None
  misc_feature: MA Experiment 20001555 PARAMETER Experiment Name: At_Drought_Soil_Dry_P Parameter: Timepoint (day) Value: 10
  misc_feature: MA Experiment 20001555 PARAMETER Experiment Name: At_Drought_Soil_Dry_P Parameter: Treatment Value: Drought vs. No Drought
  misc_feature: MA Experiment ID: 20001557 Result: Down-regulated in Transcription
  misc_feature: MA Experiment 20001557 PARAMETER Experiment Name: At_Drought_Soil_Dry_P Parameter: Age (day) Value: 27
  misc_feature: MA Experiment 20001557 PARAMETER Experiment Name: At_Drought_Soil_Dry_P Parameter: Organism Value: A. thaliana
  misc_feature: MA Experiment 20001557 PARAMETER Experiment Name: At_Drought_Soil_Dry_P Parameter: Plant Line Value: WS
  misc_feature: MA Experiment 20001557 PARAMETER Experiment Name: At_Drought_Soil_Dry_P Parameter: Post Timepoint (hr) Value: 3
  misc_feature: MA Experiment 20001557 PARAMETER Experiment Name: At_Drought_Soil_Dry_P Parameter: Post-Treatment Value: Re-Water vs. No Drought
  misc_feature: MA Experiment 20001557 PARAMETER Experiment Name: At_Drought_Soil_Dry_P Parameter: Timepoint (day) Value: 13
  misc_feature: MA Experiment 20001557 PARAMETER Experiment Name: At_Drought_Soil_Dry_P Parameter: Treatment Value: Drought vs. No Drought
  misc_feature: MA Experiment ID: 20001757 Result: Up-regulated in Transcription
  misc_feature: MA Experiment 20001757 PARAMETER Experiment Name: At_50mM_NH4NO3_L-to-H_P Parameter: Timepoint (hr) Value: 6
  misc_feature: MA Experiment 20001757 PARAMETER Experiment Name: At_50mM_NH4NO3_L-to-H_P Parameter: Tissue Value: Leaf
  misc_feature: MA Experiment 20001757 PARAMETER Experiment Name: At_50mM_NH4NO3_L-to-H_P Parameter: Treatment Value: 50mM NH4NO3 vs 100mM Mannitol
  misc_feature: MA Experiment ID: 20001904 Result: Down-regulated in Transcription
  misc_feature: MA Experiment 20001904 PARAMETER Experiment Name: At_Drought_Reproduction_P Parameter: Age (day) Value: 37
  misc_feature: MA Experiment 20001904 PARAMETER Experiment Name: At_Drought_Reproduction_P Parameter: Organism Value: A. thaliana
  misc_feature: MA Experiment 20001904 PARAMETER Experiment Name: At_Drought_Reproduction_P Parameter: Plant Line Value: WS
  misc_feature: MA Experiment 20001904 PARAMETER Experiment Name: At_Drought_Reproduction_P Parameter: Timepoint (day) Value: 7
  misc_feature: MA Experiment 20001904 PARAMETER Experiment Name: At_Drought_Reproduction_P Parameter: Tissue Value: Rosettes
  misc_feature: MA Experiment 20001904 PARAMETER Experiment Name: At_Drought_Reproduction_P Parameter: Treatment Value: Drought vs. No Drought
  misc_feature: MA Experiment ID: 20001905 Result: Down-regulated in Transcription
  misc_feature: MA Experiment 20001905 PARAMETER Experiment Name: At_Drought_Reproduction_P Parameter: Age (day) Value: 40
  misc_feature: MA Experiment 20001905 PARAMETER Experiment Name: At_Drought_Reproduction_P Parameter: Organism Value: A. thaliana
  misc_feature: MA Experiment 20001905 PARAMETER Experiment Name: At_Drought_Reproduction_P Parameter: Plant Line Value: WS
  misc_feature: MA Experiment 20001905 PARAMETER Experiment Name: At_Drought_Reproduction_P Parameter: Timepoint (day) Value: 10
  misc_feature: MA Experiment 20001905 PARAMETER Experiment Name: At_Drought_Reproduction_P Parameter: Tissue Value: Rosettes
  misc_feature: MA Experiment 20001905 PARAMETER Experiment Name: At_Drought_Reproduction_P Parameter: Treatment Value: Drought vs. No Drought
  misc_feature: MA Experiment ID: 20001906 Result: Down-regulated in Transcription
  misc_feature: MA Experiment 20001906 PARAMETER Experiment Name: At_Drought_Reproduction_P Parameter: Age (day) Value: 35
  misc_feature: MA Experiment 20001906 PARAMETER Experiment Name: At_Drought_Reproduction_P Parameter: Organism Value: A. thaliana
  misc_feature: MA Experiment 20001906 PARAMETER Experiment Name: At_Drought_Reproduction_P Parameter: Plant Line Value: WS
  misc_feature: MA Experiment 20001906 PARAMETER Experiment Name: At_Drought_Reproduction_P Parameter: Timepoint (day) Value: 5
  misc_feature: MA Experiment 20001906 PARAMETER Experiment Name: At_Drought_Reproduction_P Parameter: Tissue Value: Siliques
  misc_feature: MA Experiment 20001906 PARAMETER Experiment Name: At_Drought_Reproduction_P Parameter: Treatment Value: Drought vs. No Drought
  misc_feature: MA Experiment ID: 20001908 Result: Down-regulated in Transcription
  misc_feature: MA Experiment 20001908 PARAMETER Experiment Name: At_Drought_Reproduction_P Parameter: Age (day) Value: 40
  misc_feature: MA Experiment 20001908 PARAMETER Experiment Name: At_Drought_Reproduction_P Parameter: Organism Value: A. thaliana
  misc_feature: MA Experiment 20001908 PARAMETER Experiment Name: At_Drought_Reproduction_P Parameter: Plant Line Value: WS
  misc_feature: MA Experiment 20001908 PARAMETER Experiment Name: At_Drought_Reproduction_P Parameter: Timepoint (day) Value: 10
  misc_feature: MA Experiment 20001908 PARAMETER Experiment Name: At_Drought_Reproduction_P Parameter: Tissue Value: Siliques
  misc_feature: MA Experiment 20001908 PARAMETER Experiment Name: At_Drought_Reproduction_P Parameter: Treatment Value: Drought vs. No Drought
atcatttctccacaattccacaaactcaaattacccaacttcttaaacacattcccatcacctcacaaaccattaaccgagagccaactagcgagtagaatcaactatcaagcaatggcatcgatgaccatgaccgctaccttcttcccggccgtcgccaaggttccctcagccaccggcggacgaaggctctccgtagtcagagcctccacgagcgacaacacacccagcttagaagtcaaggaacagagcagcaccacaatgaggagggacctcatgttcacggctgcagctgcagcggtttgttctttggctaaggtagccatggctgaagaagaagagcccaagcgagggacagaggcggccaagaagaaatacgcacaagtttgtgtcacaatgcctacggccaagatctgccgctactgattcaacaacccaccttctgcatgtctatctctctctttcaatttcggtaaattttctcaattaagtttggtctgtaatcgtatatttgatcatcaatttaccaaaagcccttttatctttct

SEQ ID NO: 24389 - protein, 141 aa, Arabidopsis thaliana
  peptide (1)..(141): Ceres Seq. ID no. 12395206
  misc_feature (39)..(140): Homolog of NCBI NO: 400198 NR Description: Photosystem II 5 kDa protein, chloroplast
  misc_feature (39)..(140): Homolog of NCBI NO: 18403499 NR Description: photosystem II 5 KD protein
  misc_feature (39)..(140): Homolog of NCBI NO: 21537121 NR Description: photosystem II [Arabidopsis thaliana]
  misc_feature (39)..(141): Homolog of NCBI NO: 2129671 NR Description: photosystem II protein psbT - Arabidopsis thaliana
  misc_feature (39)..(141): Homolog of NCBI NO: 1465366 NR Description: photosystem II [Arabidopsis thaliana]
  misc_feature (39)..(141): Homolog of NCBI NO: 18402859 NR Description: Expressed protein
  misc_feature (39)..(140): Homolog of NCBI NO: 400198 NR Description: Photosystem II 5 kDa protein, chloroplast
  misc_feature (39)..(140): Homolog of NCBI NO: 18403499 NR Description: photosystem II 5 KD protein
  misc_feature (39)..(140): Homolog of NCBI NO: 21537121 NR Description: photosystem II [Arabidopsis thaliana]
  misc_feature (39)..(141): Homolog of NCBI NO: 2129671 NR Description: photosystem II protein psbT - Arabidopsis thaliana
  misc_feature (39)..(141): Homolog of NCBI NO: 1465366 NR Description: photosystem II [Arabidopsis thaliana]
  misc_feature (39)..(141): Homolog of NCBI NO: 18402859 NR Description: Expressed protein
IISPQFHKLKLPNFLNTFPSPHKPLTESQLASRINYQAMASMTMTATFFPAVAKVPSATGGRRLSVVRASTSDNTPSLEVKEQSSTTMRRDLMFTAAAAAVCSLAKVAMAEEEEPKRGTEAAKKKYAQVCVTMPTAKICRY

SEQ ID NO: 24390 - protein, 103 aa, Arabidopsis thaliana
  peptide (1)..(103): Ceres Seq. ID no. 12395207
  misc_feature (1)..(102): Homolog of NCBI NO: 400198 NR Description: Photosystem II 5 kDa protein, chloroplast
  misc_feature (1)..(102): Homolog of NCBI NO: 18403499 NR Description: photosystem II 5 KD protein
  misc_feature (1)..(102): Homolog of NCBI NO: 21537121 NR Description: photosystem II [Arabidopsis thaliana]
  misc_feature (1)..(103): Homolog of NCBI NO: 2129671 NR Description: photosystem II protein psbT - Arabidopsis thaliana
  misc_feature (1)..(103): Homolog of NCBI NO: 1465366 NR Description: photosystem II [Arabidopsis thaliana]
  misc_feature (1)..(103): Homolog of NCBI NO: 18402859 NR Description: Expressed protein
  misc_feature (1)..(102): Homolog of NCBI NO: 21537121 NR Description: photosystem II [Arabidopsis thaliana]
  misc_feature (1)..(103): Homolog of NCBI NO: 2129671 NR Description: photosystem II protein psbT - Arabidopsis thaliana
  misc_feature (1)..(103): Homolog of NCBI NO: 1465366 NR Description: photosystem II [Arabidopsis thaliana]
  misc_feature (1)..(103): Homolog of NCBI NO: 18402859 NR Description: Expressed protein
  misc_feature (1)..(102): Homolog of NCBI NO: 400198 NR Description: Photosystem II 5 kDa protein, chloroplast
  misc_feature (1)..(102): Homolog of NCBI NO: 18403499 NR Description: photosystem II 5 KD protein
MASMTMTATFFPAVAKVPSATGGRRLSVVRASTSDNTPSLEVKEQSSTTMRRDLMFTAAAAAVCSLAKVAMAEEEEPKRGTEAAKKKYAQVCVTMPTAKICRY

SEQ ID NO: 24391 - protein, 100 aa, Arabidopsis thaliana
  peptide (1)..(100): Ceres Seq. ID no. 12395208
  misc_feature (1)..(99): Homolog of NCBI NO: 400198 NR Description: Photosystem II 5 kDa protein, chloroplast
  misc_feature (1)..(99): Homolog of NCBI NO: 18403499 NR Description: photosystem II 5 KD protein
  misc_feature (1)..(99): Homolog of NCBI NO: 21537121 NR Description: photosystem II [Arabidopsis thaliana]
  misc_feature (1)..(100): Homolog of NCBI NO: 2129671 NR Description: photosystem II protein psbT - Arabidopsis thaliana
  misc_feature (1)..(100): Homolog of NCBI NO: 1465366 NR Description: photosystem II [Arabidopsis thaliana]
  misc_feature (1)..(100): Homolog of NCBI NO: 18402859 NR Description: Expressed protein
  misc_feature (1)..(99): Homolog of NCBI NO: 400198 NR Description: Photosystem II 5 kDa protein, chloroplast
  misc_feature (1)..(99): Homolog of NCBI NO: 18403499 NR Description: photosystem II 5 KD protein
  misc_feature (1)..(99): Homolog of NCBI NO: 21537121 NR Description: photosystem II [Arabidopsis thaliana]
  misc_feature (1)..(100): Homolog of NCBI NO: 2129671 NR Description: photosystem II protein psbT - Arabidopsis thaliana
  misc_feature (1)..(100): Homolog of NCBI NO: 1465366 NR Description: photosystem II [Arabidopsis thaliana]
  misc_feature (1)..(100): Homolog of NCBI NO: 18402859 NR Description: Expressed protein
MTMTATFFPAVAKVPSATGGRRLSVVRASTSDNTPSLEVKEQSSTTMRRDLMFTAAAAAVCSLAKVAMAEEEEPKRGTEAAKKKYAQVCVTMPTAKICRY

SEQ ID NO: 24392 - DNA, 1187 bp, Arabidopsis thaliana
  misc_feature (1)..(1187): Ceres Seq. ID no. 13492612
  misc_feature: MA Experiment ID: 20000113 Result: Down-regulated in Transcription
  misc_feature: MA Experiment 20000113 PARAMETER Experiment Name: At_42deg_Heat_cDNA_P Parameter: Temperature (deg C) Value: 42 vs. 22
  misc_feature: MA Experiment 20000113 PARAMETER Experiment Name: At_42deg_Heat_cDNA_P Parameter: Timepoint (hr) Value: 8
  misc_feature: MA Experiment 20000113 PARAMETER Experiment Name: At_42deg_Heat_cDNA_P Parameter: Tissue Value: Aerial
  misc_feature: MA Experiment ID: 20000315 Result: Up-regulated in Transcription
  misc_feature: MA Experiment 20000315 PARAMETER Experiment Name: At_14day_Shoots-Roots_Sub_P Parameter: Age (day) Value: 14
  misc_feature: MA Experiment 20000315 PARAMETER Experiment Name: At_14day_Shoots-Roots_Sub_P Parameter: Organism Value: A. thaliana
  misc_feature: MA Experiment 20000315 PARAMETER Experiment Name: At_14day_Shoots-Roots_Sub_P Parameter: Plant Line Value: WS
  misc_feature: MA Experiment 20000315 PARAMETER Experiment Name: At_14day_Shoots-Roots_Sub_P Parameter: Tissue Value: Shoots vs. Whole Plant
  misc_feature: MA Experiment ID: 20000327 Result: Up-regulated in Transcription
  misc_feature: MA Experiment 20000327 PARAMETER Experiment Name: At_42deg_Heat_Sub_P Parameter: Age (day) Value: 14
  misc_feature: MA Experiment 20000327 PARAMETER Experiment Name: At_42deg_Heat_Sub_P Parameter: Organism Value: A. thaliana
  misc_feature: MA Experiment 20000327 PARAMETER Experiment Name: At_42deg_Heat_Sub_P Parameter: Plant Line Value: WS
  misc_feature: MA Experiment 20000327 PARAMETER Experiment Name: At_42deg_Heat_Sub_P Parameter: Temperature (deg C) Value: 42 vs. 22
  misc_feature: MA Experiment 20000327 PARAMETER Experiment Name: At_42deg_Heat_Sub_P Parameter: Timepoint (hr) Value: 1
  misc_feature: MA Experiment 20000327 PARAMETER Experiment Name: At_42deg_Heat_Sub_P Parameter: Tissue Value: Aerial
  misc_feature: MA Experiment ID: 20000328 Result: Up-regulated in Transcription
  misc_feature: MA Experiment 20000328 PARAMETER Experiment Name: At_42deg_Heat_Sub_P Parameter: Age (day) Value: 14
  misc_feature: MA Experiment 20000328 PARAMETER Experiment Name: At_42deg_Heat_Sub_P Parameter: Organism Value: A. thaliana
  misc_feature: MA Experiment 20000328 PARAMETER Experiment Name: At_42deg_Heat_Sub_P Parameter: Plant Line Value: WS
  misc_feature: MA Experiment 20000328 PARAMETER Experiment Name: At_42deg_Heat_Sub_P Parameter: Temperature (deg C) Value: 42 vs. 22
  misc_feature: MA Experiment 20000328 PARAMETER Experiment Name: At_42deg_Heat_Sub_P Parameter: Timepoint (hr) Value: 6
  misc_feature: MA Experiment 20000328 PARAMETER Experiment Name: At_42deg_Heat_Sub_P Parameter: Tissue Value: Aerial
  misc_feature: MA Experiment ID: 20000348 Result: Up-regulated in Transcription
  misc_feature: MA Experiment 20000348 PARAMETER Experiment Name: At_100uM_ABA_Sub_P Parameter: Age (day) Value: 14
  misc_feature: MA Experiment 20000348 PARAMETER Experiment Name: At_100uM_ABA_Sub_P Parameter: Organism Value: A. thaliana
  misc_feature: MA Experiment 20000348 PARAMETER Experiment Name: At_100uM_ABA_Sub_P Parameter: Plant Line Value: WS
  misc_feature: MA Experiment 20000348 PARAMETER Experiment Name: At_100uM_ABA_Sub_P Parameter: Timepoint (hr) Value: 1
  misc_feature: MA Experiment 20000348 PARAMETER Experiment Name: At_100uM_ABA_Sub_P Parameter: Tissue Value: Aerial
  misc_feature: MA Experiment 20000348 PARAMETER Experiment Name: At_100uM_ABA_Sub_P Parameter: Treatment Value: 100uM ABA vs. No Treatment
acaaattcagattccaaatttctcaaactctgaaatcgttctttcaaatctctcaatcgggatcaagatgcagatctttgttaagactctcaccggaaagactatcaccctcgaggtggaaagctctgacaccatcgacaacgttaaggccaagatccaggataaggaaggcattcctccggatcagcagaggcttattttcgccggaaaacagctagaggatggccgtacgttggctgattacaatatccagaaggaatccaccctccacttggttctcaggctccgtggtggtatgcagattttcgtcaagaccttaacgggaaagacgattactcttgaggtggagagttctgacaccatcgacaacgtcaaggccaagatccaagacaaggagggtattcctccggaccagcagaggttgatcttcgctggaaagcagttggaggatggcagaactcttgctgactacaacatccagaaggagtccacacttcatcttgttctcaggctccgtggtggtatgcagatctttgtcaagacgttgactggaaagactatcactttggaggtggagagctctgacactatcgacaatgtcaaagccaagatccaggacaaagagggtatcccaccggaccagcagagattgatcttcgccggaaaacaacttgaagatggtagaactttggctgactacaacattcagaaggagtctacacttcacttggtgttgcgtctccgtggaggtatgcagattttcgtgaagactctcactggaaagaccattactcttgaagttgagagctccgacaccattgacaacgtgaaggctaagatccaggacaaggaaggtatccctccggaccagcagcgtctcatcttcgctggaaaacagcttgaggatggtcgtactttggccgactacaacatccagaaggagtctacccttcacttggtgctaaggctccgtggtggtttctaaaaacttatctctgttatgaatcagaagaagttcatgtctcgtttcatttaaaactttggtggtttgtgttttggggccttgtaaagcccctgatgaataattgttcaactatgtttccgttcctgtgttatacctttctttctaatgagtaatgacatcaaacttcttctgtattggaattatgtccttgtgagtctcttta

SEQ ID NO: 24393 - protein, 327 aa, Arabidopsis thaliana
  peptide (1)..(327): Ceres Seq. ID no. 13492613
  misc_feature (23)..(96): Pfam Name: Ubiquitin family Pfam Description: Ubiquitin family
  misc_feature (23)..(327): Homolog of NCBI NO: 100934 NR Description: polyubiquitin - maize
  misc_feature (23)..(327): Homolog of NCBI NO: 70644 NR Description: ubiquitin precursor - common sunflower (fragment)
  misc_feature (23)..(327): Homolog of NCBI NO: 1332579 NR Description: polyubiquitin [Pinus sylvestris]
  misc_feature (23)..(327): Homolog of NCBI NO: 902586 NR Description: ubiquitin
  misc_feature (23)..(327): Homolog of NCBI NO: 170354 NR Description: pentameric polyubiquitin
  misc_feature (23)..(327): Homolog of NCBI NO: 7488781 NR Description: polyubiquitin 4.4 - kidney bean
  misc_feature (23)..(327): Homolog of NCBI NO: 18412077 NR Description: polyubiquitin (UBQ14) [Arabidopsis thaliana]
  misc_feature (23)..(327): Homolog of NCBI NO: 170352 NR Description: hexameric polyubiquitin
  misc_feature (23)..(327): Homolog of NCBI NO: 70645 NR Description: polyubiquitin 5 - garden pea
  misc_feature (23)..(327): Homolog of NCBI NO: 70644 NR Description: ubiquitin precursor - common sunflower (fragment)
QIQIPNFSNSEIVLSNLSIGIKMQIFVKTLTGKTITLEVESSDTIDNVKAKIQDKEGIPPDQQRLIFAGKQLEDGRTLADYNIQKESTLHLVLRLRGGMQIFVKTLTGKTITLEVESSDTIDNVKAKIQDKEGIPPDQQRLIFAGKQLEDGRTLADYNIQKESTLHLVLRLRGGMQIFVKTLTGKTITLEVESSDTIDNVKAKIQDKEGIPPDQQRLIFAGKQLEDGRTLADYNIQKESTLHLVLRLRGGMQIFVKTLTGKTITLEVESSDTIDNVKAKIQDKEGIPPDQQRLIFAGKQLEDGRTLADYNIQKESTLHLVLRLRGGF

SEQ ID NO: 24394 - protein, 305 aa, Arabidopsis thaliana
  peptide (1)..(305): Ceres Seq. ID no. 13492614
  misc_feature (1)..(74): Pfam Name: Ubiquitin family Pfam Description: Ubiquitin family
  misc_feature (1)..(305): Homolog of NCBI NO: 70645 NR Description: polyubiquitin 5 - garden pea
  misc_feature (1)..(305): Homolog of NCBI NO: 70644 NR Description: ubiquitin precursor - common sunflower (fragment)
  misc_feature (1)..(305): Homolog of NCBI NO: 1332579 NR Description: polyubiquitin [Pinus sylvestris]
  misc_feature (1)..(305): Homolog of NCBI NO: 902586 NR Description: ubiquitin
  misc_feature (1)..(305): Homolog of NCBI NO: 70645 NR Description: polyubiquitin 5 - garden pea
  misc_feature (1)..(305): Homolog of NCBI NO: 170354 NR Description: pentameric polyubiquitin
  misc_feature (1)..(305): Homolog of NCBI NO: 7488781 NR Description: polyubiquitin 4.4 - kidney bean
  misc_feature (1)..(305): Homolog of NCBI NO: 18412077 NR Description: polyubiquitin (UBQ14) [Arabidopsis thaliana]
  misc_feature (1)..(305): Homolog of NCBI NO: 170352 NR Description: hexameric polyubiquitin
  misc_feature (1)..(305): Homolog of NCBI NO: 70644 NR Description: ubiquitin precursor - common sunflower (fragment)
MQIFVKTLTGKTITLEVESSDTIDNVKAKIQDKEGIPPDQQRLIFAGKQLEDGRTLADYNIQKESTLHLVLRLRGGMQIFVKTLTGKTITLEVESSDTIDNVKAKIQDKEGIPPDQQRLIFAGKQLEDGRTLADYNIQKESTLHLVLRLRGGMQIFVKTLTGKTITLEVESSDTIDNVKAKIQDKEGIPPDQQRLIFAGKQLEDGRTLADYNIQKESTLHLVLRLRGGMQIFVKTLTGKTITLEVESSDTIDNVKAKIQDKEGIPPDQQRLIFAGKQLEDGRTLADYNIQKESTLHLVLRLRGGF

SEQ ID NO: 24395 - protein, 229 aa, Arabidopsis thaliana
  peptide (1)..(229): Ceres Seq. ID no. 13492615
  misc_feature (1)..(74): Pfam Name: Ubiquitin family Pfam Description: Ubiquitin family
  misc_feature (1)..(229): Homolog of NCBI NO: 70645 NR Description: polyubiquitin 5 - garden pea
  misc_feature (1)..(229): Homolog of NCBI NO: 70644 NR Description: ubiquitin precursor - common sunflower (fragment)
  misc_feature (1)..(229): Homolog of NCBI NO: 1332579 NR Description: polyubiquitin [Pinus sylvestris]
  misc_feature (1)..(229): Homolog of NCBI NO: 902586 NR Description: ubiquitin
  misc_feature (1)..(229): Homolog of NCBI NO: 170352 NR Description: hexameric polyubiquitin
  misc_feature (1)..(229): Homolog of NCBI NO: 170354 NR Description: pentameric polyubiquitin
  misc_feature (1)..(229): Homolog of NCBI NO: 7488781 NR Description: polyubiquitin 4.4 - kidney bean
  misc_feature (1)..(229): Homolog of NCBI NO: 18412077 NR Description: polyubiquitin (UBQ14) [Arabidopsis thaliana]
  misc_feature (1)..(229): Homolog of NCBI NO: 70645 NR Description: polyubiquitin 5 - garden pea
  misc_feature (1)..(229): Homolog of NCBI NO: 70644 NR Description: ubiquitin precursor - common sunflower (fragment)
MQIFVKTLTGKTITLEVESSDTIDNVKAKIQDKEGIPPDQQRLIFAGKQLEDGRTLADYNIQKESTLHLVLRLRGGMQIFVKTLTGKTITLEVESSDTIDNVKAKIQDKEGIPPDQQRLIFAGKQLEDGRTLADYNIQKESTLHLVLRLRGGMQIFVKTLTGKTITLEVESSDTIDNVKAKIQDKEGIPPDQQRLIFAGKQLEDGRTLADYNIQKESTLHLVLRLRGGF

SEQ ID NO: 24396 - DNA, 1194 bp, Arabidopsis thaliana
  misc_feature (1)..(1194): Ceres Seq. ID no. 13487831
  misc_feature: MA Experiment ID: 108434 Result: Up-regulated in Transcription
  misc_feature: MA Experiment 108434 PARAMETER Experiment Name: At_Root_Tips_cDNA_P Parameter: Tissue Value: Root Tips
  misc_feature: MA Experiment ID: 108461 Result: Up-regulated in Transcription
  misc_feature: MA Experiment 108461 PARAMETER Experiment Name: At_Germinating_Seeds_cDNA_P Parameter: Age (day) Value: 1 vs. 0
  misc_feature: MA Experiment 108461 PARAMETER Experiment Name: At_Germinating_Seeds_cDNA_P Parameter: Tissue Value: Germinating Seeds
  misc_feature: MA Experiment ID: 108462 Result: Up-regulated in Transcription
  misc_feature: MA Experiment 108462 PARAMETER Experiment Name: At_Germinating_Seeds_cDNA_P Parameter: Age (day) Value: 2 vs. 0
  misc_feature: MA Experiment 108462 PARAMETER Experiment Name: At_Germinating_Seeds_cDNA_P Parameter: Tissue Value: Germinating Seeds
  misc_feature: MA Experiment ID: 108463 Result: Up-regulated in Transcription
  misc_feature: MA Experiment 108463 PARAMETER Experiment Name: At_Germinating_Seeds_cDNA_P Parameter: Age (day) Value: 3 vs. 0
  misc_feature: MA Experiment 108463 PARAMETER Experiment Name: At_Germinating_Seeds_cDNA_P Parameter: Tissue Value: Germinating Seeds
  misc_feature: MA Experiment ID: 108464 Result: Up-regulated in Transcription
  misc_feature: MA Experiment 108464 PARAMETER Experiment Name: At_Germinating_Seeds_cDNA_P Parameter: Age (day) Value: 4 vs. 0
  misc_feature: MA Experiment 108464 PARAMETER Experiment Name: At_Germinating_Seeds_cDNA_P Parameter: Tissue Value: Germinating Seeds
  misc_feature: MA Experiment ID: 108488 Result: Up-regulated in Transcription
  misc_feature: MA Experiment ID: 108501 Result: Up-regulated in Transcription
  misc_feature: MA Experiment 108501 PARAMETER Experiment Name: At_ap2_floral_buds_cDNA_P Parameter: Plant Line Value: ap2 (Ler.)
  misc_feature: MA Experiment 108501 PARAMETER Experiment Name: At_ap2_floral_buds_cDNA_P Parameter: Tissue Value: Closed Flower
  misc_feature: MA Experiment ID: 108595 Result: Down-regulated in Transcription
  misc_feature: MA Experiment 108595 PARAMETER Experiment Name: At_Ler-pi_Ovule_cDNA_P Parameter: Plant Line Value: null
  misc_feature: MA Experiment ID: 108609 Result: Down-regulated in Transcription
  misc_feature: MA Experiment 108609 PARAMETER Experiment Name: At_100uM_ABA_cDNA_P Parameter: Timepoint (hr) Value: 24
  misc_feature: MA Experiment 108609 PARAMETER Experiment Name: At_100uM_ABA_cDNA_P Parameter: Tissue Value: Aerial
  misc_feature: MA Experiment 108609 PARAMETER Experiment Name: At_100uM_ABA_cDNA_P Parameter: Treatment Value: 100uM ABA vs. No Treatment
  misc_feature: MA Experiment ID: 20000069 Result: Down-regulated in Transcription
  misc_feature: MA Experiment 20000069 PARAMETER Experiment Name: At_100uM_ABA_Mutants_cDNA_P Parameter: Plant Line Value: CS23
  misc_feature: MA Experiment 20000069 PARAMETER Experiment Name: At_100uM_ABA_Mutants_cDNA_P Parameter: Timepoint (hr) Value: 6
  misc_feature: MA Experiment 20000069 PARAMETER Experiment Name: At_100uM_ABA_Mutants_cDNA_P Parameter: Tissue Value: Aerial
  misc_feature: MA Experiment 20000069 PARAMETER Experiment Name: At_100uM_ABA_Mutants_cDNA_P Parameter: Treatment Value: 100uM ABA vs. No Treatment
  misc_feature: MA Experiment ID: 20000071 Result: Down-regulated in Transcription
  misc_feature: MA Experiment 20000071 PARAMETER Experiment Name: At_100uM_ABA_Mutants_cDNA_P Parameter: Plant Line Value: CS8104
  misc_feature: MA Experiment 20000071 PARAMETER Experiment Name: At_100uM_ABA_Mutants_cDNA_P Parameter: Timepoint (hr) Value: 6
  misc_feature: MA Experiment 20000071 PARAMETER Experiment Name: At_100uM_ABA_Mutants_cDNA_P Parameter: Tissue Value: Aerial
  misc_feature: MA Experiment 20000071 PARAMETER Experiment Name: At_100uM_ABA_Mutants_cDNA_P Parameter: Treatment Value: 100uM ABA vs. No Treatment
  misc_feature: MA Experiment ID: 20000072 Result: Down-regulated in Transcription
  misc_feature: MA Experiment 20000072 PARAMETER Experiment Name: At_100uM_ABA_Mutants_cDNA_P Parameter: Plant Line Value: CS8105
  misc_feature: MA Experiment 20000072 PARAMETER Experiment Name: At_100uM_ABA_Mutants_cDNA_P Parameter: Timepoint (hr) Value: 6
  misc_feature: MA Experiment 20000072 PARAMETER Experiment Name: At_100uM_ABA_Mutants_cDNA_P Parameter: Tissue Value: Aerial
  misc_feature: MA Experiment 20000072 PARAMETER Experiment Name: At_100uM_ABA_Mutants_cDNA_P Parameter: Treatment Value: 100uM ABA vs. No Treatment
  misc_feature: MA Experiment ID: 20000086 Result: Down-regulated in Transcription
  misc_feature: MA Experiment 20000086 PARAMETER Experiment Name: At_100uM_ABA_Mutants_cDNA_P Parameter: Plant Line Value: CS22
  misc_feature: MA Experiment 20000086 PARAMETER Experiment Name: At_100uM_ABA_Mutants_cDNA_P Parameter: Timepoint (hr) Value: 6
  misc_feature: MA Experiment 20000086 PARAMETER Experiment Name: At_100uM_ABA_Mutants_cDNA_P Parameter: Tissue Value: Aerial
  misc_feature: MA Experiment 20000086 PARAMETER Experiment Name: At_100uM_ABA_Mutants_cDNA_P Parameter: Treatment Value: 100uM ABA vs. No Treatment
  misc_feature: MA Experiment ID: 20000088 Result: Down-regulated in Transcription
  misc_feature: MA Experiment 20000088 PARAMETER Experiment Name: At_100uM_ABA_Mutants_cDNA_P Parameter: Plant Line Value: Landsberg
  misc_feature: MA Experiment 20000088 PARAMETER Experiment Name: At_100uM_ABA_Mutants_cDNA_P Parameter: Timepoint (hr) Value: 6
  misc_feature: MA Experiment 20000088 PARAMETER Experiment Name: At_100uM_ABA_Mutants_cDNA_P Parameter: Tissue Value: Aerial
  misc_feature: MA Experiment 20000088 PARAMETER Experiment Name: At_100uM_ABA_Mutants_cDNA_P Parameter: Treatment Value: 100uM ABA vs. No Treatment
  misc_feature: MA Experiment ID: 20000117 Result: Down-regulated in Transcription
  misc_feature: MA Experiment 20000117 PARAMETER Experiment Name: At_100uM_ABA_Mutants_cDNA_P Parameter: Plant Line Value: Columbia
  misc_feature: MA Experiment 20000117 PARAMETER Experiment Name: At_100uM_ABA_Mutants_cDNA_P Parameter: Timepoint (hr) Value: 6
  misc_feature: MA Experiment 20000117 PARAMETER Experiment Name: At_100uM_ABA_Mutants_cDNA_P Parameter: Tissue Value: Aerial
  misc_feature: MA Experiment 20000117 PARAMETER Experiment Name: At_100uM_ABA_Mutants_cDNA_P Parameter: Treatment Value: 100uM ABA vs. No Treatment
  misc_feature: MA Experiment ID: 20000180 Result: Up-regulated in Transcription
  misc_feature: MA Experiment 20000180 PARAMETER Experiment Name: At_Germinating_Seeds_P Parameter: Age (hr) Value: 24 vs. 0
  misc_feature: MA Experiment 20000180 PARAMETER Experiment Name: At_Germinating_Seeds_P Parameter: Tissue Value: Germinating Seeds
  misc_feature: MA Experiment ID: 20000224 Result: Down-regulated in Transcription
  misc_feature: MA Experiment ID: 20000439 Result: Down-regulated in Transcription
  misc_feature: MA Experiment 20000439 PARAMETER Experiment Name: At_Roots__P Parameter: Age (day) Value: 14 vs. 21
  misc_feature: MA Experiment 20000439 PARAMETER Experiment Name: At_Roots__P Parameter: Organism Value: A. thaliana
  misc_feature: MA Experiment 20000439 PARAMETER Experiment Name: At_Roots__P Parameter: Tissue Value: Roots vs. Whole Plant
  misc_feature: MA Experiment ID: 20000445 Result: Up-regulated in Transcription
  misc_feature: MA Experiment 20000445 PARAMETER Experiment Name: At_100uM_NAA__P Parameter: Age (day) Value: 14
  misc_feature: MA Experiment 20000445 PARAMETER Experiment Name: At_100uM_NAA__P Parameter: Organism Value: A. thaliana
  misc_feature: MA Experiment 20000445 PARAMETER Experiment Name: At_100uM_NAA__P Parameter: Plant Line Value: WS
  misc_feature: MA Experiment 20000445 PARAMETER Experiment Name: At_100uM_NAA__P Parameter: Timepoint (hr) Value: 6
  misc_feature: MA Experiment 20000445 PARAMETER Experiment Name: At_100uM_NAA__P Parameter: Tissue Value: Aerial
  misc_feature: MA Experiment 20000445 PARAMETER Experiment Name: At_100uM_NAA__P Parameter: Treatment Value: 100uM NAA vs. No Treatment
  misc_feature: MA Experiment ID: 20001248 Result: Up-regulated in Transcription
  misc_feature: MA Experiment 20001248 PARAMETER Experiment Name: At_Far-red-induction_P Parameter: Age (day) Value: 7
  misc_feature: MA Experiment 20001248 PARAMETER Experiment Name: At_Far-red-induction_P Parameter: Light Value: Far-red vs. White
  misc_feature: MA Experiment 20001248 PARAMETER Experiment Name: At_Far-red-induction_P Parameter: Organism Value: A. thaliana
  misc_feature: MA Experiment 20001248 PARAMETER Experiment Name: At_Far-red-induction_P Parameter: Plant Line Value: Columbia
  misc_feature: MA Experiment 20001248 PARAMETER Experiment Name: At_Far-red-induction_P Parameter: Timepoint (hr) Value: 4
  misc_feature: MA Experiment 20001248 PARAMETER Experiment Name: At_Far-red-induction_P Parameter: Tissue Value: Whole Plant
  misc_feature: MA Experiment ID: 20001450 Result: Up-regulated in Transcription
  misc_feature: MA Experiment 20001450 PARAMETER Experiment Name: At_Far-red-induction_P Parameter: Age (day) Value: 7
  misc_feature: MA Experiment 20001450 PARAMETER Experiment Name: At_Far-red-induction_P Parameter: Light Value: Far-red vs. White
  misc_feature: MA Experiment 20001450 PARAMETER Experiment Name: At_Far-red-induction_P Parameter: Organism Value: A. thaliana
  misc_feature: MA Experiment 20001450 PARAMETER Experiment Name: At_Far-red-induction_P Parameter: Plant Line Value: Columbia
  misc_feature: MA Experiment 20001450 PARAMETER Experiment Name: At_Far-red-induction_P Parameter: Timepoint (hr) Value: 8
  misc_feature: MA Experiment 20001450 PARAMETER Experiment Name: At_Far-red-induction_P Parameter: Tissue Value: Whole Plant
  misc_feature: MA Experiment ID: 20001554 Result: Down-regulated in Transcription
  misc_feature: MA Experiment 20001554 PARAMETER Experiment Name: At_Drought_Soil_Dry_P Parameter: Age (day) Value: 21
  misc_feature: MA Experiment 20001554 PARAMETER Experiment Name: At_Drought_Soil_Dry_P Parameter: Organism Value: A. thaliana
  misc_feature: MA Experiment 20001554 PARAMETER Experiment Name: At_Drought_Soil_Dry_P Parameter: Plant Line Value: WS
  misc_feature: MA Experiment 20001554 PARAMETER Experiment Name: At_Drought_Soil_Dry_P Parameter: Post Timepoint (hr) Value: None
  misc_feature: MA Experiment 20001554 PARAMETER Experiment Name: At_Drought_Soil_Dry_P Parameter: Post-Treatment Value: None
  misc_feature: MA Experiment 20001554 PARAMETER Experiment Name: At_Drought_Soil_Dry_P Parameter: Timepoint (day) Value: 7
  misc_feature: MA Experiment 20001554 PARAMETER Experiment Name: At_Drought_Soil_Dry_P Parameter: Treatment Value: Drought vs. No Drought
  misc_feature: MA Experiment ID: 20001556 Result: Down-regulated in Transcription
  misc_feature: MA Experiment 20001556 PARAMETER Experiment Name: At_Drought_Soil_Dry_P Parameter: Age (day) Value: 26
  misc_feature: MA Experiment 20001556 PARAMETER Experiment Name: At_Drought_Soil_Dry_P Parameter: Organism Value: A. thaliana
  misc_feature: MA Experiment 20001556 PARAMETER Experiment Name: At_Drought_Soil_Dry_P Parameter: Plant Line Value: WS
  misc_feature: MA Experiment 20001556 PARAMETER Experiment Name: At_Drought_Soil_Dry_P Parameter: Post Timepoint (hr) Value: None
  misc_feature: MA Experiment 20001556 PARAMETER Experiment Name: At_Drought_Soil_Dry_P Parameter: Post-Treatment Value: None
  misc_feature: MA Experiment 20001556 PARAMETER Experiment Name: At_Drought_Soil_Dry_P Parameter: Timepoint (day) Value: 12
  misc_feature: MA Experiment 20001556 PARAMETER Experiment Name: At_Drought_Soil_Dry_P Parameter: Treatment Value: Drought vs. No Drought
  misc_feature: MA Experiment ID: 20001906 Result: Down-regulated in Transcription
  misc_feature: MA Experiment 20001906 PARAMETER Experiment Name: At_Drought_Reproduction_P Parameter: Age (day) Value: 35
  misc_feature: MA Experiment 20001906 PARAMETER Experiment Name: At_Drought_Reproduction_P Parameter: Organism Value: A. thaliana
  misc_feature: MA Experiment 20001906 PARAMETER Experiment Name: At_Drought_Reproduction_P Parameter: Plant Line Value: WS
  misc_feature: MA Experiment 20001906 PARAMETER Experiment Name: At_Drought_Reproduction_P Parameter: Timepoint (day) Value: 5
  misc_feature: MA Experiment 20001906 PARAMETER Experiment Name: At_Drought_Reproduction_P Parameter: Tissue Value: Siliques
  misc_feature: MA Experiment 20001906 PARAMETER Experiment Name: At_Drought_Reproduction_P Parameter: Treatment Value: Drought vs. No Drought
tgccctcttaccttttcagagagagaaacaatatttctaatctattacaagtaacatgatcggccaacttatgaacctcaaggccacggagctctgtctcggcctccccggcggcgctgaagcagttgagagtcctgccaaatcggcggtgggaagcaagagaggcttctccgaaaccgttgatctcatgctcaatcttcaatctaacaaagaaggctccgttgatctcaaaaacgtttctgctgttcccaaggagaagactacccttaaagatccttctaagcctcctgctaaagcacaagtggtgggatggccacctgtgaggaactacaggaagaacatgatgactcagcagaagaccagtagtggtgcggaggaggccagcagtgagaaggccgggaactttggtggaggagcagccggagccggcttggtgaaggtctccatggacggtgctccatatctgaggaaagttgacctcaagatgtacaaaagctaccaggatctttctgatgcattggccaaaatgttcagctcctttactatgggaaactatggagcacaaggaatgatagatttcatgaacgagagcaagctaatgaatctgctgaatagctctgagtatgtgccaagctacgaggacaaagatggtgactggatgctcgttggcgatgtcccatgggaaatgtttgtcgagtcttgcaaacgtttgcgcattatgaagggatctgaagcagttggacttgctccgagagcaatggagaagtactgcaagaacagatcttgaattaataataaaaaaaaagaagcatcaatgatcaacaatatgacgggttcttgattttatatgtatttttatgattgtatgtggctatcacctatatatgtgtgttgtaattttaaatacttgatgggtatatagggcagtattttaccagtaagatgtggacaaacttgtaatgtgaccaaaagagaggaaacttcaatatctctgtgtttgtgtcatatttattgcccaacatgtgtctgtcggtttgatgatcaatcacaacttgatatgtgcatacatataaatgtgtgtatgtaggtgtgtgtacatgtacatgtgttttgatccctactctgctacttgtcgtttcttgtgtgtgttatctaatagttttttcccaaaatgaataattcgttgttatgttt

SEQ ID NO: 24397 - protein, 243 aa, Arabidopsis thaliana
  peptide (1)..(243): Ceres Seq. ID no. 13487832
  misc_feature (6)..(234): Pfam Name: AUX/IAA family Pfam Description: AUX/IAA family
  misc_feature (11)..(243): Homolog of NCBI NO: 4887020 NR Description: Nt-iaa28 deduced protein [Nicotiana tabacum]
  misc_feature (6)..(243): Homolog of NCBI NO: 21592887 NR Description: putative auxin-induced protein, IAA17/AXR3-1
  misc_feature (1)..(243): Homolog of NCBI NO: 15219694 NR Description: auxin-responsive protein IAA17 (Indoleacetic
  misc_feature (5)..(243): Homolog of NCBI NO: 15229343 NR Description: auxin-responsive protein IAA16 (Indoleacetic
  misc_feature (5)..(243): Homolog of NCBI NO: 20385508 NR Description: auxin-regulated protein [Populus tremula x
  misc_feature (6)..(230): Homolog of NCBI NO: 25296229 NR Description: IAA7 like protein [imported] - Arabidopsis
  misc_feature (6)..(230): Homolog of NCBI NO: 7442224 NR Description: auxin-induced protein - Arabidopsis thaliana
  misc_feature (6)..(243): Homolog of NCBI NO: 22328628 NR Description: auxin-responsive protein, putative [Arabidopsis
  misc_feature (6)..(243): Homolog of NCBI NO: 21593352 NR Description: indoleacetic acid (IAA)-inducible gene (IAA7)
  misc_feature (1)..(243): Homolog of NCBI NO: 15228943 NR Description: auxin-responsive protein IAA7 (Indoleacetic
MIGQLMNLKATELCLGLPGGAEAVESPAKSAVGSKRGFSETVDLMLNLQSNKEGSVDLKNVSAVPKEKTTLKDPSKPPAKAQVVGWPPVRNYRKNMMTQQKTSSGAEEASSEKAGNFGGGAAGAGLVKVSMDGAPYLRKVDLKMYKSYQDLSDALAKMFSSFTMGNYGAQGMIDFMNESKLMNLLNSSEYVPSYEDKDGDWMLVGDVPWEMFVESCKRLRIMKGSEAVGLAPRAMEKYCKNRS

SEQ ID NO: 24398 - protein, 238 aa, Arabidopsis thaliana
  peptide (1)..(238): Ceres Seq. ID no. 13487833
  misc_feature (1)..(229): Pfam Name: AUX/IAA family Pfam Description: AUX/IAA family
  misc_feature (6)..(238): Homolog of NCBI NO: 4887020 NR Description: Nt-iaa28 deduced protein [Nicotiana tabacum]
  misc_feature (1)..(238): Homolog of NCBI NO: 21592887 NR Description: putative auxin-induced protein, IAA17/AXR3-1
  misc_feature (1)..(238): Homolog of NCBI NO: 15219694 NR Description: auxin-responsive protein IAA17 (Indoleacetic
  misc_feature (1)..(238): Homolog of NCBI NO: 15229343 NR Description: auxin-responsive protein IAA16 (Indoleacetic
  misc_feature (1)..(238): Homolog of NCBI NO: 20385508 NR Description: auxin-regulated protein [Populus tremula x
  misc_feature (1)..(225): Homolog of NCBI NO: 25296229 NR Description: IAA7 like protein [imported] - Arabidopsis
  misc_feature (1)..(225): Homolog of NCBI NO: 7442224 NR Description: auxin-induced protein - Arabidopsis thaliana
  misc_feature (1)..(238): Homolog of NCBI NO: 22328628 NR Description: auxin-responsive protein, putative [Arabidopsis
  misc_feature (1)..(238): Homolog of NCBI NO: 21593352 NR Description: indoleacetic acid (IAA)-inducible gene (IAA7)
  misc_feature (1)..(238): Homolog of NCBI NO: 15228943 NR Description: auxin-responsive protein IAA7 (Indoleacetic
MNLKATELCLGLPGGAEAVESPAKSAVGSKRGFSETVDLMLNLQSNKEGSVDLKNVSAVPKEKTTLKDPSKPPAKAQVVGWPPVRNYRKNMMTQQKTSSGAEEASSEKAGNFGGGAAGAGLVKVSMDGAPYLRKVDLKMYKSYQDLSDALAKMFSSFTMGNYGAQGMIDFMNESKLMNLLNSSEYVPSYEDKDGDWMLVGDVPWEMFVESCKRLRIMKGSEAVGLAPRAMEKYCKNRS

SEQ ID NO: 24399 - protein, 199 aa, Arabidopsis thaliana
  peptide (1)..(199): Ceres Seq. ID no. 13487834
  misc_feature (1)..(190): Pfam Name: AUX/IAA family Pfam Description: AUX/IAA family
  misc_feature (1)..(199): Homolog of NCBI NO: 4887020 NR Description: Nt-iaa28 deduced protein [Nicotiana tabacum]
  misc_feature (1)..(199): Homolog of NCBI NO: 21592887 NR Description: putative auxin-induced protein, IAA17/AXR3-1
  misc_feature (1)..(199): Homolog of NCBI NO: 15219694 NR Description: auxin-responsive protein IAA17 (Indoleacetic
  misc_feature (1)..(199): Homolog of NCBI NO: 15229343 NR Description: auxin-responsive protein IAA16 (Indoleacetic
  misc_feature (1)..(199): Homolog of NCBI NO: 20385508 NR Description: auxin-regulated protein [Populus tremula x
  misc_feature (1)..(186): Homolog of NCBI NO: 25296229 NR Description: IAA7 like protein [imported] - Arabidopsis
  misc_feature (1)..(186): Homolog of NCBI NO: 7442224 NR Description: auxin-induced protein - Arabidopsis thaliana
  misc_feature (1)..(199): Homolog of NCBI NO: 22328628 NR Description: auxin-responsive protein, putative [Arabidopsis
  misc_feature (1)..(199): Homolog of NCBI NO: 21593352 NR Description: indoleacetic acid (IAA)-inducible gene (IAA7)
  misc_feature (1)..(199): Homolog of NCBI NO: 15228943 NR Description: auxin-responsive protein IAA7 (Indoleacetic
MLNLQSNKEGSVDLKNVSAVPKEKTTLKDPSKPPAKAQVVGWPPVRNYRKNMMTQQKTSSGAEEASSEKAGNFGGGAAGAGLVKVSMDGAPYLRKVDLKMYKSYQDLSDALAKMFSSFTMGNYGAQGMIDFMNESKLMNLLNSSEYVPSYEDKDGDWMLVGDVPWEMFVESCKRLRIMKGSEAVGLAPRAMEKYCKNRS

SEQ ID NO: 24400 - DNA, 1172 bp, Arabidopsis thaliana
  misc_feature (1)..(1172): Ceres Seq. ID no. 12338524
  misc_feature: MA Experiment ID: 20000184 Result: Up-regulated in Transcription
  misc_feature: MA Experiment 20000184 PARAMETER Experiment Name: At_Shoots__P Parameter: Age (day) Value: 7
  misc_feature: MA Experiment 20000184 PARAMETER Experiment Name: At_Shoots__P Parameter: Tissue Value: Shoots vs. Whole Plant
  misc_feature: MA Experiment ID: 20000495 Result: Down-regulated in Transcription
  misc_feature: MA Experiment 20000495 PARAMETER Experiment Name: At_Guard_Cells_P Parameter: Harvest Date Value: 8/2/2002
  misc_feature: MA Experiment 20000495 PARAMETER Experiment Name: At_Guard_Cells_P Parameter: Organism Value: A. thaliana
  misc_feature: MA Experiment 20000495 PARAMETER Experiment Name: At_Guard_Cells_P Parameter: Tissue Value: Guard Cells vs. Leaves
acaatgccacttctcctccgtcgatttccctctccctccgtcgtctcctccttcttcctccgtcgctcaatggcttcctcaacaatctcctcggatataatcactccatcaaacaccaaaatcggatggatcggaaccggagtcatgggccgatcaatgtgtggacacttaatcaaagccggttacacagtcaccgtcttcaatcgaaccatctccaaagctcaaactctcatcgacatgggtgctaacgtcgccgactcaccaaactcagtcgctgaacaatccgacgtcgttttcaccatcgttggttatccttccgatgtccgtcacgtccttctcgatccaaagtccggagctttatctggtctccgtcaaggaggtgttctcgttgatatgactacttctgagccttctttagcagaggagatagctaaagctgcttcctttaagaattgtttctcaatagacgctcctgtctcaggtggagatttaggagctaagaatgggaagctatctatattcgccggaggtgatgaaaccaccgtgaaacgtttagatccgttgttttcgttaatgggtaaagtcaacttcatgggaacaagtgggaaaggtcaatttgcgaaattggctaatcagataactattgcttcgactatgttaggacttgtggaaggtttgatttatgctcataaagctggacttgatgttaagaagtttcttgaagcgatttctactggtgctgctggttctaagtctatagatttgtatggagataggattctgaagagggattttgatcctggtttttatgtgaatcattttgtgaaagatttagggatttgtttgaatgaatgtcagaggatgggtttggctttgcctggtttagctcttgctcaacagctttacttgtctcttaaggctcatggtgaaggtgatcttggtactcaagctcttctcttggctcttgaacgtctcaacaatgtctctgttcaatcatctgactcttgatttaggttctgttccactttctgataatgcatctgttggagattttatgttgttatgaagtaaagatttgatcttttgtgtacccatttgttggtaaaacatgatttgaagtaaacttttgtgtacgcatatgagattcatacacagtagttttatgtgtaccc

SEQ ID NO: 24401 - protein, 335 aa, Arabidopsis thaliana
  peptide (1)..(335): Ceres Seq. ID no. 12338526
  misc_feature (38)..(200): Pfam Name: NAD binding domain of 6-phosphogluconate dehydrogenase Pfam Description: NAD binding domain of 6-phosphogluconate
  misc_feature (40)..(319): Homolog of NCBI NO: 16803045 NR Description: similar to 3-hydroxyisobutyrate dehydrogenase (B.
  misc_feature (34)..(318): Homolog of NCBI NO: 23113025 NR Description: hypothetical protein [Desulfitobacterium
  misc_feature (33)..(322): Homolog of NCBI NO: 23098036 NR Description: 3-hydroxyisobutyrate dehydrogenase
  misc_feature (38)..(318): Homolog of NCBI NO: 15896585 NR Description: Dehydrogenase related to 3-hydroxyisobutyrate
  misc_feature (33)..(329): Homolog of NCBI NO: 30698779 NR Description: dehydrogenase -related [Arabidopsis thaliana]
  misc_feature (33)..(329): Homolog of NCBI NO: 25283629 NR Description: probable dehydrogenase F23N20.17
  misc_feature (33)..(329): Homolog of NCBI NO: 18409781 NR Description: putative dehydrogenase
  misc_feature (40)..(328): Homolog of NCBI NO: 32472744 NR Description: 3-hydroxyisobutyrate dehydrogenase [Pirellula
  misc_feature (23)..(327): Homolog of NCBI NO: 34909392 NR Description: putative dehydrogenase [Oryza sativa (japonica
  misc_feature (2)..(335): Homolog of NCBI NO: 15233455 NR Description: putative protein
TMPLLLRRFPSPSVVSSFFLRRSMASSTISSDIITPSNTKIGWIGTGVMGRSMCGHLIKAGYTVTVFNRTISKAQTLIDMGANVADSPNSVAEQSDVVFTIVGYPSDVRHVLLDPKSGALSGLRQGGVLVDMTTSEPSLAEEIAKAASFKNCFSIDAPVSGGDLGAKNGKLSIFAGGDETTVKRLDPLFSLMGKVNFMGTSGKGQFAKLANQITIASTMLGLVEGLIYAHKAGLDVKKFLEAISTGAAGSKSIDLYGDRILKRDFDPGFYVNHFVKDLGICLNECQRMGLALPGLALAQQLYLSLKAHGEGDLGTQALLLALERLNNVSVQSSDS

SEQ ID NO: 24402 - protein, 334 aa, Arabidopsis thaliana
  peptide (1)..(334): Ceres Seq. ID no. 12338527
  misc_feature (37)..(199): Pfam Name: NAD binding domain of 6-phosphogluconate dehydrogenase Pfam Description: NAD binding domain of 6-phosphogluconate
  misc_feature (32)..(328): Homolog of NCBI NO: 18409781 NR Description: putative dehydrogenase
  misc_feature (39)..(327): Homolog of NCBI NO: 32472744 NR Description: 3-hydroxyisobutyrate dehydrogenase [Pirellula
  misc_feature (39)..(318): Homolog of NCBI NO: 16803045 NR Description: similar to 3-hydroxyisobutyrate dehydrogenase (B.
  misc_feature (32)..(321): Homolog of NCBI NO: 23098036 NR Description: 3-hydroxyisobutyrate dehydrogenase
  misc_feature (32)..(328): Homolog of NCBI NO: 30698779 NR Description: dehydrogenase -related [Arabidopsis thaliana]
  misc_feature (32)..(328): Homolog of NCBI NO: 25283629 NR Description: probable dehydrogenase F23N20.17
  misc_feature (37)..(317): Homolog of NCBI NO: 15896585 NR Description: Dehydrogenase related to 3-hydroxyisobutyrate
  misc_feature (33)..(317): Homolog of NCBI NO: 23113025 NR Description: hypothetical protein [Desulfitobacterium
  misc_feature (22)..(326): Homolog of NCBI NO: 34909392 NR Description: putative dehydrogenase [Oryza sativa (japonica
  misc_feature (1)..(334): Homolog of NCBI NO: 15233455 NR Description: putative protein
MPLLLRRFPSPSVVSSFFLRRSMASSTISSDIITPSNTKIGWIGTGVMGRSMCGHLIKAGYTVTVFNRTISKAQTLIDMGANVADSPNSVAEQSDVVFTIVGYPSDVRHVLLDPKSGALSGLRQGGVLVDMTTSEPSLAEEIAKAASFKNCFSIDAPVSGGDLGAKNGKLSIFAGGDETTVKRLDPLFSLMGKVNFMGTSGKGQFAKLANQITIASTMLGLVEGLIYAHKAGLDVKKFLEAISTGAAGSKSIDLYGDRILKRDFDPGFYVNHFVKDLGICLNECQRMGLALPGLALAQQLYLSLKAHGEGDLGTQALLLALERLNNVSVQSSDS

SEQ ID NO: 24403 - protein, 312 aa, Arabidopsis thaliana
  peptide (1)..(312): Ceres Seq. ID no. 12338528
  misc_feature (15)..(177): Pfam Name: NAD binding domain of 6-phosphogluconate dehydrogenase Pfam Description: NAD binding domain of 6-phosphogluconate
  misc_feature (17)..(296): Homolog of NCBI NO: 16803045 NR Description: similar to 3-hydroxyisobutyrate dehydrogenase (B.
  misc_feature (11)..(295): Homolog of NCBI NO: 23113025 NR Description: hypothetical protein [Desulfitobacterium
  misc_feature (10)..(299): Homolog of NCBI NO: 23098036 NR Description: 3-hydroxyisobutyrate dehydrogenase
  misc_feature (15)..(295): Homolog of NCBI NO: 15896585 NR Description: Dehydrogenase related to 3-hydroxyisobutyrate
  misc_feature (10)..(306): Homolog of NCBI NO: 30698779 NR Description: dehydrogenase -related [Arabidopsis thaliana]
  misc_feature (10)..(306): Homolog of NCBI NO: 25283629 NR Description: probable dehydrogenase F23N20.17
  misc_feature (10)..(306): Homolog of NCBI NO: 18409781 NR Description: putative dehydrogenase
  misc_feature (17)..(305): Homolog of NCBI NO: 32472744 NR Description: 3-hydroxyisobutyrate dehydrogenase [Pirellula
  misc_feature (1)..(304): Homolog of NCBI NO: 34909392 NR Description: putative dehydrogenase [Oryza sativa (japonica
  misc_feature (1)..(312): Homolog of NCBI NO: 15233455 NR Description: putative protein
MASSTISSDIITPSNTKIGWIGTGVMGRSMCGHLIKAGYTVTVFNRTISKAQTLIDMGANVADSPNSVAEQSDVVFTIVGYPSDVRHVLLDPKSGALSGLRQGGVLVDMTTSEPSLAEEIAKAASFKNCFSIDAPVSGGDLGAKNGKLSIFAGGDETTVKRLDPLFSLMGKVNFMGTSGKGQFAKLANQITIASTMLGLVEGLIYAHKAGLDVKKFLEAISTGAAGSKSIDLYGDRILKRDFDPGFYVNHFVKDLGICLNECQRMGLALPGLALAQQLYLSLKAHGEGDLGTQALLLALERLNNVSVQSSDS

SEQ ID NO: 24404 - DNA, 662 bp, Arabidopsis thaliana
  misc_feature (1)..(662): Ceres Seq. ID no. 12331139
  misc_feature: MA Experiment ID: 108569 Result: Down-regulated in Transcription
  misc_feature: MA Experiment 108569 PARAMETER Experiment Name: At_0.001%_MeJA__cDNA_P Parameter: Timepoint (hr) Value: 6
  misc_feature: MA Experiment 108569 PARAMETER Experiment Name: At_0.001%_MeJA__cDNA_P Parameter: Tissue Value: Aerial
  misc_feature: MA Experiment 108569 PARAMETER Experiment Name: At_0.001%_MeJA__cDNA_P Parameter: Treatment Value: 0.001% MeJA vs. No Treatment
  misc_feature: MA Experiment ID: 20000173 Result: Down-regulated in Transcription
  misc_feature: MA Experiment 20000173 PARAMETER Experiment Name: At_42deg_Heat_P Parameter: Age (day) Value: 14
  misc_feature: MA Experiment 20000173 PARAMETER Experiment Name: At_42deg_Heat_P Parameter: Organism Value: A. thaliana
  misc_feature: MA Experiment 20000173 PARAMETER Experiment Name: At_42deg_Heat_P Parameter: Plant Line Value: WS
  misc_feature: MA Experiment 20000173 PARAMETER Experiment Name: At_42deg_Heat_P Parameter: Temperature (deg C) Value: 42 vs. 22
  misc_feature: MA Experiment 20000173 PARAMETER Experiment Name: At_42deg_Heat_P Parameter: Timepoint (hr) Value: 6
  misc_feature: MA Experiment 20000173 PARAMETER Experiment Name: At_42deg_Heat_P Parameter: Tissue Value: Aerial
  misc_feature: MA Experiment ID: 20001560 Result: Up-regulated in Transcription
  misc_feature: MA Experiment 20001560 PARAMETER Experiment Name: At_Drought_Soil_Dry_P Parameter: Age (day) Value: 28
  misc_feature: MA Experiment 20001560 PARAMETER Experiment Name: At_Drought_Soil_Dry_P Parameter: Organism Value: A. thaliana
  misc_feature: MA Experiment 20001560 PARAMETER Experiment Name: At_Drought_Soil_Dry_P Parameter: Plant Line Value: WS
  misc_feature: MA Experiment 20001560 PARAMETER Experiment Name: At_Drought_Soil_Dry_P Parameter: Post Timepoint (hr) Value: None
  misc_feature: MA Experiment 20001560 PARAMETER Experiment Name: At_Drought_Soil_Dry_P Parameter: Post-Treatment Value: None
  misc_feature: MA Experiment 20001560 PARAMETER Experiment Name: At_Drought_Soil_Dry_P Parameter: Timepoint (day) Value: 14
  misc_feature: MA Experiment 20001560 PARAMETER Experiment Name: At_Drought_Soil_Dry_P Parameter: Treatment Value: Drought vs. No Drought
  misc_feature: MA Experiment ID: 20001911 Result: Down-regulated in Transcription
  misc_feature: MA Experiment 20001911 PARAMETER Experiment Name: At_Drought_Reproduction_P Parameter: Age (day) Value: 40
  misc_feature: MA Experiment 20001911 PARAMETER Experiment Name: At_Drought_Reproduction_P Parameter: Organism Value: A. thaliana
  misc_feature: MA Experiment 20001911 PARAMETER Experiment Name: At_Drought_Reproduction_P Parameter: Plant Line Value: WS
  misc_feature: MA Experiment 20001911 PARAMETER Experiment Name: At_Drought_Reproduction_P Parameter: Timepoint (day) Value: 10
  misc_feature: MA Experiment 20001911 PARAMETER Experiment Name: At_Drought_Reproduction_P Parameter: Tissue Value: Flowers
  misc_feature: MA Experiment 20001911 PARAMETER Experiment Name: At_Drought_Reproduction_P Parameter: Treatment Value: Drought vs. No Drought
atcgaaaaagatcgaaaaaaaatcgagaagcgaatagcggaagaacagaaaaagggaaattctgagaatcaaatcggaaaggtagaagaatcgagtcggaaaaatggaaacgacgaaaagtaacagcagcgagtccgatgtcaacgccaaatgggacgcttgtctcgatctcactgctcgtcgctttgtctactcttccctcggcggcgctttcgccggtcttctcttcttcaggagtccggttacgagatgggcgtcgattgcttttggtgctggaattggtattggttctgcatacacagattgttctcgtgtttttgatgcgtcttcttcaacttcagctactttattagcagctcccaagagtacagagacttctgtatctcaggcagcagaagagtgaagacaacgaggaagcttggaggtaaaaaaccaaacattgatagggttacattacgaaatggtaattgatcttgcaggacaaggcttttgagataacgccattgttaaaaaaaaacttttgcttctcagtgtggttttgtacactgatgtcaaaattgttaatgacccactcatttttttttgttttgaaaaatcttatgttcttttacttgagaaataattcctccgttgatttgtttgcctctactgttccttcattc

SEQ ID NO: 24405 - protein, 99 aa, Arabidopsis thaliana
  peptide (1)..(99): Ceres Seq. ID no. 12331140
  misc_feature (1)..(73): Pfam Name: Domain of unknown function (DUF543) Pfam Description: Domain of unknown function (DUF543)
  misc_feature (2)..(95): Homolog of NCBI NO: 25406151 NR Description: unknown protein T9N14.2 [imported] - Arabidopsis
  misc_feature (2)..(99): Homolog of NCBI NO: 21553491 NR Description: unknown [Arabidopsis thaliana]
  misc_feature (2)..(99): Homolog of NCBI NO: 18410008 NR Description: unknown protein
  misc_feature (1)..(99): Homolog of NCBI NO: 18395129 NR Description: expressed protein
METTKSNSSESDVNAKWDACLDLTARRFVYSSLGGAFAGLLFFRSPVTRWASIAFGAGIGIGSAYTDCSRVFDASSSTSATLLAAPKSTETSVSQAAEE

SEQ ID NO: 24406 - protein, 71 aa, Arabidopsis thaliana
  peptide (1)..(71): Ceres Seq. ID no. 12331141
MSTPNGTLVSISLLVALSTLPSAALSPVFSSSGVRLRDGRRLLLVLELVLVLHTQIVLVFLMRLLQLQLLY

SEQ ID NO: 24407 - protein, 56 aa, Arabidopsis thaliana
  peptide (1)..(56): Ceres Seq. ID no. 12331142
MGRLSRSHCSSLCLLFPRRRFRRSSLLQESGYEMGVDCFWCWNWYWFCIHRLFSCF

SEQ ID NO: 24408 - DNA, 1262 bp, Arabidopsis thaliana
  misc_feature (1)..(1262): Ceres Seq. ID no. 12322010
  misc_feature: MA Experiment ID: 108462 Result: Up-regulated in Transcription
  misc_feature: MA Experiment 108462 PARAMETER Experiment Name: At_Germinating_Seeds_cDNA_P Parameter: Age (day) Value: 2 vs. 0
  misc_feature: MA Experiment 108462 PARAMETER Experiment Name: At_Germinating_Seeds_cDNA_P Parameter: Tissue Value: Germinating Seeds
  misc_feature: MA Experiment ID: 108463 Result: Up-regulated in Transcription
  misc_feature: MA Experiment 108463 PARAMETER Experiment Name: At_Germinating_Seeds_cDNA_P Parameter: Age (day) Value: 3 vs. 0
  misc_feature: MA Experiment 108463 PARAMETER Experiment Name: At_Germinating_Seeds_cDNA_P Parameter: Tissue Value: Germinating Seeds
  misc_feature: MA Experiment ID: 108464 Result: Up-regulated in Transcription
  misc_feature: MA Experiment 108464 PARAMETER Experiment Name: At_Germinating_Seeds_cDNA_P Parameter: Age (day) Value: 4 vs. 0
  misc_feature: MA Experiment 108464 PARAMETER Experiment Name: At_Germinating_Seeds_cDNA_P Parameter: Tissue Value: Germinating Seeds
  misc_feature: MA Experiment ID: 108572 Result: Down-regulated in Transcription
  misc_feature: MA Experiment 108572 PARAMETER Experiment Name: At_Drought_cDNA_P Parameter: Timepoint (hr) Value: 1
  misc_feature: MA Experiment 108572 PARAMETER Experiment Name: At_Drought_cDNA_P Parameter: Tissue Value: Aerial
  misc_feature: MA Experiment 108572 PARAMETER Experiment Name: At_Drought_cDNA_P Parameter: Treatment Value: Drought vs. No Drought
  misc_feature: MA Experiment ID: 108594 Result: Up-regulated in Transcription
  misc_feature: MA Experiment 108594 PARAMETER Experiment Name: At_Ler-rhl_Root_cDNA_P Parameter: Plant Line Value: null
  misc_feature: MA Experiment ID: 20000069 Result: Up-regulated in Transcription
  misc_feature: MA Experiment 20000069 PARAMETER Experiment Name: At_100uM_ABA_Mutants_cDNA_P Parameter: Plant Line Value: CS23
  misc_feature: MA Experiment 20000069 PARAMETER Experiment Name: At_100uM_ABA_Mutants_cDNA_P Parameter: Timepoint (hr) Value: 6
  misc_feature: MA Experiment 20000069 PARAMETER Experiment Name: At_100uM_ABA_Mutants_cDNA_P Parameter: Tissue Value: Aerial
  misc_feature: MA Experiment 20000069 PARAMETER Experiment Name: At_100uM_ABA_Mutants_cDNA_P Parameter: Treatment Value: 100uM ABA vs. No Treatment
  misc_feature: MA Experiment ID: 20000070 Result: Up-regulated in Transcription
  misc_feature: MA Experiment 20000070 PARAMETER Experiment Name: At_100uM_ABA_Mutants_cDNA_P Parameter: Plant Line Value: CS24
  misc_feature: MA Experiment 20000070 PARAMETER Experiment Name: At_100uM_ABA_Mutants_cDNA_P Parameter: Timepoint (hr) Value: 6
  misc_feature: MA Experiment 20000070 PARAMETER Experiment Name: At_100uM_ABA_Mutants_cDNA_P Parameter: Tissue Value: Aerial
  misc_feature: MA Experiment 20000070 PARAMETER Experiment Name: At_100uM_ABA_Mutants_cDNA_P Parameter: Treatment Value: 100uM ABA vs. No Treatment
  misc_feature: MA Experiment ID: 20000071 Result: Up-regulated in Transcription
  misc_feature: MA Experiment 20000071 PARAMETER Experiment Name: At_100uM_ABA_Mutants_cDNA_P Parameter: Plant Line Value: CS8104
  misc_feature: MA Experiment 20000071 PARAMETER Experiment Name: At_100uM_ABA_Mutants_cDNA_P Parameter: Timepoint (hr) Value: 6
  misc_feature: MA Experiment 20000071 PARAMETER Experiment Name: At_100uM_ABA_Mutants_cDNA_P Parameter: Tissue Value: Aerial
  misc_feature: MA Experiment 20000071 PARAMETER Experiment Name: At_100uM_ABA_Mutants_cDNA_P Parameter: Treatment Value: 100uM ABA vs. No Treatment
  misc_feature: MA Experiment ID: 20000072 Result: Up-regulated in Transcription
  misc_feature: MA Experiment 20000072 PARAMETER Experiment Name: At_100uM_ABA_Mutants_cDNA_P Parameter: Plant Line Value: CS8105
  misc_feature: MA Experiment 20000072 PARAMETER Experiment Name: At_100uM_ABA_Mutants_cDNA_P Parameter: Timepoint (hr) Value: 6
  misc_feature: MA Experiment 20000072 PARAMETER Experiment Name: At_100uM_ABA_Mutants_cDNA_P Parameter: Tissue Value: Aerial
  misc_feature: MA Experiment 20000072 PARAMETER Experiment Name: At_100uM_ABA_Mutants_cDNA_P Parameter: Treatment Value: 100uM ABA vs. No Treatment
  misc_feature: MA Experiment ID: 20000086 Result: Up-regulated in Transcription
  misc_feature: MA Experiment 20000086 PARAMETER Experiment Name: At_100uM_ABA_Mutants_cDNA_P Parameter: Plant Line Value: CS22
  misc_feature: MA Experiment 20000086 PARAMETER Experiment Name: At_100uM_ABA_Mutants_cDNA_P Parameter: Timepoint (hr) Value: 6
  misc_feature: MA Experiment 20000086 PARAMETER Experiment Name: At_100uM_ABA_Mutants_cDNA_P Parameter: Tissue Value: Aerial
  misc_feature: MA Experiment 20000086 PARAMETER Experiment Name: At_100uM_ABA_Mutants_cDNA_P Parameter: Treatment Value: 100uM ABA vs. No Treatment
  misc_feature: MA Experiment ID: 20000087 Result: Up-regulated in Transcription
  misc_feature: MA Experiment 20000087 PARAMETER Experiment Name: At_100uM_ABA_Mutants_cDNA_P Parameter: Plant Line Value: WS
  misc_feature: MA Experiment 20000087 PARAMETER Experiment Name: At_100uM_ABA_Mutants_cDNA_P Parameter: Timepoint (hr) Value: 6
  misc_feature: MA Experiment 20000087 PARAMETER Experiment Name: At_100uM_ABA_Mutants_cDNA_P Parameter: Tissue Value: Aerial
  misc_feature: MA Experiment 20000087 PARAMETER Experiment Name: At_100uM_ABA_Mutants_cDNA_P Parameter: Treatment Value: 100uM ABA vs. No Treatment
  misc_feature: MA Experiment ID: 20000111 Result: Down-regulated in Transcription
  misc_feature: MA Experiment 20000111 PARAMETER Experiment Name: At_42deg_Heat_cDNA_P Parameter: Temperature (deg C) Value: 42 vs. 22
  misc_feature: MA Experiment 20000111 PARAMETER Experiment Name: At_42deg_Heat_cDNA_P Parameter: Timepoint (hr) Value: 6
  misc_feature: MA Experiment 20000111 PARAMETER Experiment Name: At_42deg_Heat_cDNA_P Parameter: Tissue Value: Aerial
  misc_feature: MA Experiment ID: 20000113 Result: Down-regulated in Transcription
  misc_feature: MA Experiment 20000113 PARAMETER Experiment Name: At_42deg_Heat_cDNA_P Parameter: Temperature (deg C) Value: 42 vs. 22
  misc_feature: MA Experiment 20000113 PARAMETER Experiment Name: At_42deg_Heat_cDNA_P Parameter: Timepoint (hr) Value: 8
  misc_feature: MA Experiment 20000113 PARAMETER Experiment Name: At_42deg_Heat_cDNA_P Parameter: Tissue Value: Aerial
  misc_feature: MA Experiment ID: 20000117 Result: Up-regulated in Transcription
  misc_feature: MA Experiment 20000117 PARAMETER Experiment Name: At_100uM_ABA_Mutants_cDNA_P Parameter: Plant Line Value: Columbia
  misc_feature: MA Experiment 20000117 PARAMETER Experiment Name: At_100uM_ABA_Mutants_cDNA_P Parameter: Timepoint (hr) Value: 6
  misc_feature: MA Experiment 20000117 PARAMETER Experiment Name: At_100uM_ABA_Mutants_cDNA_P Parameter: Tissue Value: Aerial
  misc_feature: MA Experiment 20000117 PARAMETER Experiment Name: At_100uM_ABA_Mutants_cDNA_P Parameter: Treatment Value: 100uM ABA vs. No Treatment
  misc_feature: MA Experiment ID: 20000144 Result: Down-regulated in Transcription
  misc_feature: MA Experiment 20000144 PARAMETER Experiment Name: At_42deg_Heat_cDNA_P Parameter: Temperature (deg C) Value: 42 vs. 22
  misc_feature: MA Experiment 20000144 PARAMETER Experiment Name: At_42deg_Heat_cDNA_P Parameter: Timepoint (hr) Value: 1
  misc_feature: MA Experiment 20000144 PARAMETER Experiment Name: At_42deg_Heat_cDNA_P Parameter: Tissue Value: Aerial
  misc_feature: MA Experiment ID: 20000171 Result: Down-regulated in Transcription
  misc_feature: MA Experiment 20000171 PARAMETER Experiment Name: At_42deg_Heat_P Parameter: Age (day) Value: 14
  misc_feature: MA Experiment 20000171 PARAMETER Experiment Name: At_42deg_Heat_P Parameter: Organism Value: A. thaliana
  misc_feature: MA Experiment 20000171 PARAMETER Experiment Name: At_42deg_Heat_P Parameter: Plant Line Value: WS
  misc_feature: MA Experiment 20000171 PARAMETER Experiment Name: At_42deg_Heat_P Parameter: Temperature (deg C) Value: 42 vs. 22
  misc_feature: MA Experiment 20000171 PARAMETER Experiment Name: At_42deg_Heat_P Parameter: Timepoint (hr) Value: 1
  misc_feature: MA Experiment 20000171 PARAMETER Experiment Name: At_42deg_Heat_P Parameter: Tissue Value: Aerial
  misc_feature: MA Experiment ID: 20000173 Result: Down-regulated in Transcription
  misc_feature: MA Experiment 20000173 PARAMETER Experiment Name: At_42deg_Heat_P Parameter: Age (day) Value: 14
  misc_feature: MA Experiment 20000173 PARAMETER Experiment Name: At_42deg_Heat_P Parameter: Organism Value: A. thaliana
  misc_feature: MA Experiment 20000173 PARAMETER Experiment Name: At_42deg_Heat_P Parameter: Plant Line Value: WS
  misc_feature: MA Experiment 20000173 PARAMETER Experiment Name: At_42deg_Heat_P Parameter: Temperature (deg C) Value: 42 vs. 22
  misc_feature: MA Experiment 20000173 PARAMETER Experiment Name: At_42deg_Heat_P Parameter: Timepoint (hr) Value: 6
  misc_feature: MA Experiment 20000173 PARAMETER Experiment Name: At_42deg_Heat_P Parameter: Tissue Value: Aerial
  misc_feature: MA Experiment ID: 20000224 Result: Down-regulated in Transcription
  misc_feature: MA Experiment ID: 20000264 Result: Down-regulated in Transcription
  misc_feature: MA Experiment 20000264 PARAMETER Experiment Name: At_Open_Flower_P Parameter: Age (day) Value: 21
  misc_feature: MA Experiment 20000264 PARAMETER Experiment Name: At_Open_Flower_P Parameter: Plant Line Value: WS
  misc_feature: MA Experiment 20000264 PARAMETER Experiment Name: At_Open_Flower_P Parameter: Tissue Value: Open Flower vs. Whole Plant
  misc_feature: MA Experiment ID: 20000265 Result: Down-regulated in Transcription
  misc_feature: MA Experiment 20000265 PARAMETER Experiment Name: At_Open_Flower_P Parameter: Age (day) Value: 21
  misc_feature: MA Experiment 20000265 PARAMETER Experiment Name: At_Open_Flower_P Parameter: Plant Line Value: WS
  misc_feature: MA Experiment 20000265 PARAMETER Experiment Name: At_Open_Flower_P Parameter: Tissue Value: Closed Flower vs. Whole Plant
  misc_feature: MA Experiment ID: 20000268 Result: Down-regulated in Transcription
  misc_feature: MA Experiment 20000268 PARAMETER Experiment Name: At_100mM_NaCl__P Parameter: Age (day) Value: 14
  misc_feature: MA Experiment 20000268 PARAMETER Experiment Name: At_100mM_NaCl__P Parameter: Organism Value: A. thaliana
  misc_feature: MA Experiment 20000268 PARAMETER Experiment Name: At_100mM_NaCl__P Parameter: Plant Line Value: WS
  misc_feature: MA Experiment 20000268 PARAMETER Experiment Name: At_100mM_NaCl__P Parameter: Timepoint (hr) Value: 6
  misc_feature: MA Experiment 20000268 PARAMETER Experiment Name: At_100mM_NaCl__P Parameter: Tissue Value: Whole Plant
  misc_feature: MA Experiment 20000268 PARAMETER Experiment Name: At_100mM_NaCl__P Parameter: Treatment Value: 100mM NaCl vs. No Treatment
  misc_feature: MA Experiment ID: 20000286 Result: Down-regulated in Transcription
  misc_feature: MA Experiment 20000286 PARAMETER Experiment Name: At_Open_Flower_P Parameter: Age (day) Value: 21
  misc_feature: MA Experiment 20000286 PARAMETER Experiment Name: At_Open_Flower_P Parameter: Plant Line Value: WS
  misc_feature: MA Experiment 20000286 PARAMETER Experiment Name: At_Open_Flower_P Parameter: Tissue Value: Half Open vs. Whole Plant
  misc_feature: MA Experiment ID: 20000308 Result: Down-regulated in Transcription
  misc_feature: MA Experiment 20000308 PARAMETER Experiment Name: At_100mM_NaCl__P Parameter: Age (day) Value: 17
  misc_feature: MA Experiment 20000308 PARAMETER Experiment Name: At_100mM_NaCl__P Parameter: Organism Value: A. thaliana
  misc_feature: MA Experiment 20000308 PARAMETER Experiment Name: At_100mM_NaCl__P Parameter: Plant Line Value: WS
  misc_feature: MA Experiment 20000308 PARAMETER Experiment Name: At_100mM_NaCl__P Parameter: Timepoint (hr) Value: 72
  misc_feature: MA Experiment 20000308 PARAMETER Experiment Name: At_100mM_NaCl__P Parameter: Tissue Value: Whole Plant
  misc_feature: MA Experiment 20000308 PARAMETER Experiment Name: At_100mM_NaCl__P Parameter: Treatment Value: 100mM NaCl vs. No Treatment
  misc_feature: MA Experiment ID: 20000438 Result: Up-regulated in Transcription
  misc_feature: MA Experiment 20000438 PARAMETER Experiment Name: At_Shoots__P Parameter: Age (day) Value: 14
  misc_feature: MA Experiment 20000438 PARAMETER Experiment Name: At_Shoots__P Parameter: Tissue Value: Shoots vs. Whole Plant
  misc_feature: MA Experiment ID: 20000441 Result: Up-regulated in Transcription
  misc_feature: MA Experiment 20000441 PARAMETER Experiment Name: At_1uM_BR-BRZ__P Parameter: Tissue Value: Shoot Apices
  misc_feature: MA Experiment 20000441 PARAMETER Experiment Name: At_1uM_BR-BRZ__P Parameter: Treatment Value: 1uM BR vs. No Treatment
  misc_feature: MA Experiment ID: 20000443 Result: Up-regulated in Transcription
  misc_feature: MA Experiment 20000443 PARAMETER Experiment Name: At_1uM_BR-BRZ__P Parameter: Tissue Value: Shoot Apices
  misc_feature: MA Experiment 20000443 PARAMETER Experiment Name: At_1uM_BR-BRZ__P Parameter: Treatment Value: 1uM BRZ vs. No Treatment
  misc_feature: MA Experiment ID: 20000573 Result: Down-regulated in Transcription
  misc_feature: MA Experiment 20000573 PARAMETER Experiment Name: At_100uM_ABA_Mutants__P Parameter: Organism Value: A. thaliana
  misc_feature: MA Experiment 20000573 PARAMETER Experiment Name: At_100uM_ABA_Mutants__P Parameter: Plant Line Value: CS22 vs. Ler wt
  misc_feature: MA Experiment 20000573 PARAMETER Experiment Name: At_100uM_ABA_Mutants__P Parameter: Timepoint (hr) Value: N/A
  misc_feature: MA Experiment 20000573 PARAMETER Experiment Name: At_100uM_ABA_Mutants__P Parameter: Tissue Value: Whole Plant
  misc_feature: MA Experiment 20000573 PARAMETER Experiment Name: At_100uM_ABA_Mutants__P Parameter: Treatment Value: None
  misc_feature: MA Experiment ID: 20000574 Result: Down-regulated in Transcription
  misc_feature: MA Experiment 20000574 PARAMETER Experiment Name: At_100uM_ABA_Mutants__P Parameter: Organism Value: A. thaliana
  misc_feature: MA Experiment 20000574 PARAMETER Experiment Name: At_100uM_ABA_Mutants__P Parameter: Plant Line Value: CS23 vs. Ler wt
  misc_feature: MA Experiment 20000574 PARAMETER Experiment Name: At_100uM_ABA_Mutants__P Parameter: Timepoint (hr) Value: N/A
  misc_feature: MA Experiment 20000574 PARAMETER Experiment Name: At_100uM_ABA_Mutants__P Parameter: Tissue Value: Whole Plant
  misc_feature: MA Experiment 20000574 PARAMETER Experiment Name: At_100uM_ABA_Mutants__P Parameter: Treatment Value: None
  misc_feature: MA Experiment ID: 20000794 Result: Down-regulated in Transcription
  misc_feature: MA Experiment 20000794 PARAMETER Experiment Name: At_Petals_P Parameter: Age (day) Value: 23-25 days
  misc_feature: MA Experiment 20000794 PARAMETER Experiment Name: At_Petals_P Parameter: Plant Line Value: WS
  misc_feature: MA Experiment 20000794 PARAMETER Experiment Name: At_Petals_P Parameter: Tissue Value: Petals vs. Whole plant
  misc_feature: MA Experiment ID: 20001248 Result: Up-regulated in Transcription
  misc_feature: MA Experiment 20001248 PARAMETER Experiment Name: At_Far-red-induction_P Parameter: Age (day) Value: 7
  misc_feature: MA Experiment 20001248 PARAMETER Experiment Name: At_Far-red-induction_P Parameter: Light Value: Far-red vs. White
  misc_feature: MA Experiment 20001248 PARAMETER Experiment Name: At_Far-red-induction_P Parameter: Organism Value: A. thaliana
  misc_feature: MA Experiment 20001248 PARAMETER Experiment Name: At_Far-red-induction_P Parameter: Plant Line Value: Columbia
  misc_feature: MA Experiment 20001248 PARAMETER Experiment Name: At_Far-red-induction_P Parameter: Timepoint (hr) Value: 4
  misc_feature: MA Experiment 20001248 PARAMETER Experiment Name: At_Far-red-induction_P Parameter: Tissue Value: Whole Plant
  misc_feature: MA Experiment ID: 20001450 Result: Up-regulated in Transcription
  misc_feature: MA Experiment 20001450 PARAMETER Experiment Name: At_Far-red-induction_P Parameter: Age (day) Value: 7
  misc_feature: MA Experiment 20001450 PARAMETER Experiment Name: At_Far-red-induction_P Parameter: Light Value: Far-red vs. White
  misc_feature: MA Experiment 20001450 PARAMETER Experiment Name: At_Far-red-induction_P Parameter: Organism Value: A. thaliana
  misc_feature: MA Experiment 20001450 PARAMETER Experiment Name: At_Far-red-induction_P Parameter: Plant Line Value: Columbia
  misc_feature: MA Experiment 20001450 PARAMETER Experiment Name: At_Far-red-induction_P Parameter: Timepoint (hr) Value: 8
  misc_feature: MA Experiment 20001450 PARAMETER Experiment Name: At_Far-red-induction_P Parameter: Tissue Value: Whole Plant
  misc_feature: MA Experiment ID: 20001451 Result: Up-regulated in Transcription
  misc_feature: MA Experiment 20001451 PARAMETER Experiment Name: At_Far-red-induction_P Parameter: Age (day) Value: 7
  misc_feature: MA Experiment 20001451 PARAMETER Experiment Name: At_Far-red-induction_P Parameter: Light Value: Far-red vs. White
  misc_feature: MA Experiment 20001451 PARAMETER Experiment Name: At_Far-red-induction_P Parameter: Organism Value: A. thaliana
  misc_feature: MA Experiment 20001451 PARAMETER Experiment Name: At_Far-red-induction_P Parameter: Plant Line Value: Columbia
  misc_feature: MA Experiment 20001451 PARAMETER Experiment Name: At_Far-red-induction_P Parameter: Timepoint (hr) Value: 24
  misc_feature: MA Experiment 20001451 PARAMETER Experiment Name: At_Far-red-induction_P Parameter: Tissue Value: Whole Plant
  misc_feature: MA Experiment ID: 20001554 Result: Down-regulated in Transcription
  misc_feature: MA Experiment 20001554 PARAMETER Experiment Name: At_Drought_Soil_Dry_P Parameter: Age (day) Value: 21
  misc_feature: MA Experiment 20001554 PARAMETER Experiment Name: At_Drought_Soil_Dry_P Parameter: Organism Value: A. thaliana
  misc_feature: MA Experiment 20001554 PARAMETER Experiment Name: At_Drought_Soil_Dry_P Parameter: Plant Line Value: WS
  misc_feature: MA Experiment 20001554 PARAMETER Experiment Name: At_Drought_Soil_Dry_P Parameter: Post Timepoint (hr) Value: None
  misc_feature: MA Experiment 20001554 PARAMETER Experiment Name: At_Drought_Soil_Dry_P Parameter: Post-Treatment Value: None
  misc_feature: MA Experiment 20001554 PARAMETER Experiment Name: At_Drought_Soil_Dry_P Parameter: Timepoint (day) Value: 7
  misc_feature: MA Experiment 20001554 PARAMETER Experiment Name: At_Drought_Soil_Dry_P Parameter: Treatment Value: Drought vs. No Drought
  misc_feature: MA Experiment ID: 20001556 Result: Down-regulated in Transcription
  misc_feature: MA Experiment 20001556 PARAMETER Experiment Name: At_Drought_Soil_Dry_P Parameter: Age (day) Value: 26
  misc_feature: MA Experiment 20001556 PARAMETER Experiment Name: At_Drought_Soil_Dry_P Parameter: Organism Value: A. thaliana
  misc_feature: MA Experiment 20001556 PARAMETER Experiment Name: At_Drought_Soil_Dry_P Parameter: Plant Line Value: WS
  misc_feature: MA Experiment 20001556 PARAMETER Experiment Name: At_Drought_Soil_Dry_P Parameter: Post Timepoint (hr) Value: None
  misc_feature: MA Experiment 20001556 PARAMETER Experiment Name: At_Drought_Soil_Dry_P Parameter: Post-Treatment Value: None
  misc_feature: MA Experiment 20001556 PARAMETER Experiment Name: At_Drought_Soil_Dry_P Parameter: Timepoint (day) Value: 12
  misc_feature: MA Experiment 20001556 PARAMETER Experiment Name: At_Drought_Soil_Dry_P Parameter: Treatment Value: Drought vs. No Drought
  misc_feature: MA Experiment ID: 20001774 Result: Down-regulated in Transcription
  misc_feature: MA Experiment 20001774 PARAMETER Experiment Name: At_Far-red-enriched-adult_P Parameter: Age (day) Value: 31
  misc_feature: MA Experiment 20001774 PARAMETER Experiment Name: At_Far-red-enriched-adult_P Parameter: Light Value: Far-red enriched vs. White
  misc_feature: MA Experiment 20001774 PARAMETER Experiment Name: At_Far-red-enriched-adult_P Parameter: Organism Value: A. thaliana
  misc_feature: MA Experiment 20001774 PARAMETER Experiment Name: At_Far-red-enriched-adult_P Parameter: Plant Line Value: Columbia
  misc_feature: MA Experiment 20001774 PARAMETER Experiment Name: At_Far-red-enriched-adult_P Parameter: Timepoint (hr) Value: 72
  misc_feature: MA Experiment 20001774 PARAMETER Experiment Name: At_Far-red-enriched-adult_P Parameter: Tissue Value: Aerial
  misc_feature: MA Experiment ID: 20001904 Result: Down-regulated in Transcription
  misc_feature: MA Experiment 20001904 PARAMETER Experiment Name: At_Drought_Reproduction_P Parameter: Age (day) Value: 37
  misc_feature: MA Experiment 20001904 PARAMETER Experiment Name: At_Drought_Reproduction_P Parameter: Organism Value: A. thaliana
  misc_feature: MA Experiment 20001904 PARAMETER Experiment Name: At_Drought_Reproduction_P Parameter: Plant Line Value: WS
  misc_feature: MA Experiment 20001904 PARAMETER Experiment Name: At_Drought_Reproduction_P Parameter: Timepoint (day) Value: 7
  misc_feature: MA Experiment 20001904 PARAMETER Experiment Name: At_Drought_Reproduction_P Parameter: Tissue Value: Rosettes
  misc_feature: MA Experiment 20001904 PARAMETER Experiment Name: At_Drought_Reproduction_P Parameter: Treatment Value: Drought vs. No Drought
  misc_feature: MA Experiment ID: 20001906 Result: Down-regulated in Transcription
  misc_feature: MA Experiment 20001906 PARAMETER Experiment Name: At_Drought_Reproduction_P Parameter: Age (day) Value: 35
  misc_feature: MA Experiment 20001906 PARAMETER Experiment Name: At_Drought_Reproduction_P Parameter: Organism Value: A. thaliana
  misc_feature: MA Experiment 20001906 PARAMETER Experiment Name: At_Drought_Reproduction_P Parameter: Plant Line Value: WS
  misc_feature: MA Experiment 20001906 PARAMETER Experiment Name: At_Drought_Reproduction_P Parameter: Timepoint (day) Value: 5
  misc_feature: MA Experiment 20001906 PARAMETER Experiment Name: At_Drought_Reproduction_P Parameter: Tissue Value: Siliques
  misc_feature: MA Experiment 20001906 PARAMETER Experiment Name: At_Drought_Reproduction_P Parameter: Treatment Value: Drought vs. No Drought
aaagcaacaaaaacttaacccatttcttcttctttttttgtttctctctcacaaacacaacaaatatggaatacagctgtgtagacgacagtagtactacgtcagaatctctctccatctctactactccaaagccgacaacgacaacggagaagaaactctcttctccaccggcgacttcgatgcgtctctacagaatgggaagcggcggaagcagcgttgttttggattcagagaacggcgtcgagaccgagtcacgaaagcttccgtcgtcgaaatacaaaggcgttgtgcctcagcctaacggaagatggggagctcagatttacgagaagcatcagcgagtttggctcggtactttcaacgaggaagaagaagctgcgtcttcttacgacatcgccgtgaggaggttccgaggccgcgacgccgtcactaacttcaaatctcaagttgatggaaacgacgccgaatcggcttttcttgacgctcattctaaagctgagatcgtggatatgttgaggaaacacacttacgccgatgagtttgagcagagtagacggaagtttgttaacggcgacggaaaacgctctgggttggagacggcgacgtacggaaacgacgctgttttgagagcgcgtgaggttttgttcgagaagactgttacgccgagcgacgtcgggaagctgaaccgtttagtgataccgaaacaacacgcggagaagcattttccgttatcggcgatgacgacggcgatggggatgaatccgtctccgacgaaaggcgttttgattaacttggaagatagaacagggaaagtgtggcggttccgttacagttactggaacagcagtcaaagttacgtgttgaccaagggctggagccggttcgttaaagagaagaatcttcgagccggtgatgtggtttgtttcgagagatcaaccggaccagaccggcaattgtatatccactggaaagtccggtctagtccggttcagactgtggttaggctattcggagtcaacattttcaatgtgagtaacgagaaaccaaacgacgtcgcagtagagtgtgttggcaagaagagatctcgggaagatgatttgttttcgttagggtgttccaagaagcaggcgattatcaacatcttgtgacaaattctttttttttggttttttttcttcaatttgtttctcctttttcaatattttgtattgaaatgacaagttgtaaattaggacaatacaagaaaaaatgacaactag

SEQ ID NO: 24409 - protein, 382 aa, Arabidopsis thaliana
  peptide (1)..(382): Ceres Seq. ID no. 12322011
  misc_feature (215)..(329): Pfam Name: B3 DNA binding domain Pfam Description: B3 DNA binding domain
  misc_feature (89)..(341): Homolog of NCBI NO: 34895676 NR Description: putative DNA binding protein RAV2
  misc_feature (30)..(332): Homolog of NCBI NO: 34895690 NR Description: putative DNA binding protein RAV2
  misc_feature (67)..(328): Homolog of NCBI NO: 34911404 NR Description: DNA-binding protein RAV2-like
  misc_feature (25)..(341): Homolog of NCBI NO: 21593532 NR Description: AP2 domain transcription factor [Arabidopsis
  misc_feature (25)..(379): Homolog of NCBI NO: 15230871 NR Description: AP2 domain transcription factor RAV, putative
  misc_feature (22)..(380): Homolog of NCBI NO: 15222217 NR Description: DNA-binding protein (RAV1)
  misc_feature (48)..(382): Homolog of NCBI NO: 2281641 NR Description: AP2 domain containing protein RAP2.8 [Arabidopsis
  misc_feature (22)..(382): Homolog of NCBI NO: 21554039 NR Description: putative RAV2-like DNA-binding protein
  misc_feature (22)..(382): Homolog of NCBI NO: 18409138 NR Description: AP2 domain protein RAP2.8 (RAV2)
  misc_feature (22)..(382): Homolog of NCBI NO: 15222622 NR Description: DNA-binding protein RAV2, putative
SNKNLTHFFFFFCFSLTNTTNMEYSCVDDSSTTSESLSISTTPKPTTTTEKKLSSPPATSMRLYRMGSGGSSVVLDSENGVETESRKLPSSKYKGVVPQPNGRWGAQIYEKHQRVWLGTFNEEEEAASSYDIAVRRFRGRDAVTNFKSQVDGNDAESAFLDAHSKAEIVDMLRKHTYADEFEQSRRKFVNGDGKRSGLETATYGNDAVLRAREVLFEKTVTPSDVGKLNRLVIPKQHAEKHFPLSAMTTAMGMNPSPTKGVLINLEDRTGKVWRFRYSYWNSSQSYVLTKGWSRFVKEKNLRAGDVVCFERSTGPDRQLYIHWKVRSSPVQTVVRLFGVNIFNVSNEKPNDVAVECVGKKRSREDDLFSLGCSKKQAIINIL

SEQ ID NO: 24410 - protein, 361 aa, Arabidopsis thaliana
  peptide (1)..(361): Ceres Seq. ID no. 12322012
  misc_feature (194)..(308): Pfam Name: B3 DNA binding domain Pfam Description: B3 DNA binding domain
  misc_feature (68)..(320): Homolog of NCBI NO: 34895676 NR Description: putative DNA binding protein RAV2
  misc_feature (9)..(311): Homolog of NCBI NO: 34895690 NR Description: putative DNA binding protein RAV2
  misc_feature (46)..(307): Homolog of NCBI NO: 34911404 NR Description: DNA-binding protein RAV2-like
  misc_feature (4)..(320): Homolog of NCBI NO: 21593532 NR Description: AP2 domain transcription factor [Arabidopsis
  misc_feature (4)..(358): Homolog of NCBI NO: 15230871 NR Description: AP2 domain transcription factor RAV, putative
  misc_feature (1)..(359): Homolog of NCBI NO: 15222217 NR Description: DNA-binding protein (RAV1)
  misc_feature (27)..(361): Homolog of NCBI NO: 2281641 NR Description: AP2 domain containing protein RAP2.8 [Arabidopsis
  misc_feature (1)..(361): Homolog of NCBI NO: 21554039 NR Description: putative RAV2-like DNA-binding protein
  misc_feature (1)..(361): Homolog of NCBI NO: 18409138 NR Description: AP2 domain protein RAP2.8 (RAV2)
  misc_feature (1)..(361): Homolog of NCBI NO: 15222622 NR Description: DNA-binding protein RAV2, putative
MEYSCVDDSSTTSESLSISTTPKPTTTTEKKLSSPPATSMRLYRMGSGGSSVVLDSENGVETESRKLPSSKYKGVVPQPNGRWGAQIYEKHQRVWLGTFNEEEEAASSYDIAVRRFRGRDAVTNFKSQVDGNDAESAFLDAHSKAEIVDMLRKHTYADEFEQSRRKFVNGDGKRSGLETATYGNDAVLRAREVLFEKTVTPSDVGKLNRLVIPKQHAEKHFPLSAMTTAMGMNPSPTKGVLINLEDRTGKVWRFRYSYWNSSQSYVLTKGWSRFVKEKNLRAGDVVCFERSTGPDRQLYIHWKVRSSPVQTVVRLFGVNIFNVSNEKPNDVAVECVGKKRSREDDLFSLGCSKKQAIINIL

SEQ ID NO: 24411 - protein, 322 aa, Arabidopsis thaliana
  peptide (1)..(322): Ceres Seq. ID no. 12322013
  misc_feature (155)..(269): Pfam Name: B3 DNA binding domain Pfam Description: B3 DNA binding domain
  misc_feature (29)..(281): Homolog of NCBI NO: 34895676 NR Description: putative DNA binding protein RAV2
  misc_feature (1)..(272): Homolog of NCBI NO: 34895690 NR Description: putative DNA binding protein RAV2
  misc_feature (7)..(268): Homolog of NCBI NO: 34911404 NR Description: DNA-binding protein RAV2-like
  misc_feature (1)..(281): Homolog of NCBI NO: 21593532 NR Description: AP2 domain transcription factor [Arabidopsis
  misc_feature (1)..(319): Homolog of NCBI NO: 15230871 NR Description: AP2 domain transcription factor RAV, putative
  misc_feature (1)..(320): Homolog of NCBI NO: 15222217 NR Description: DNA-binding protein (RAV1)
  misc_feature (1)..(322): Homolog of NCBI NO: 2281641 NR Description: AP2 domain containing protein RAP2.8 [Arabidopsis
  misc_feature (1)..(322): Homolog of NCBI NO: 21554039 NR Description: putative RAV2-like DNA-binding protein
  misc_feature (1)..(322): Homolog of NCBI NO: 18409138 NR Description: AP2 domain protein RAP2.8 (RAV2)
  misc_feature (1)..(322): Homolog of NCBI NO: 15222622 NR Description: DNA-binding protein RAV2, putative
MRLYRMGSGGSSVVLDSENGVETESRKLPSSKYKGVVPQPNGRWGAQIYEKHQRVWLGTFNEEEEAASSYDIAVRRFRGRDAVTNFKSQVDGNDAESAFLDAHSKAEIVDMLRKHTYADEFEQSRRKFVNGDGKRSGLETATYGNDAVLRAREVLFEKTVTPSDVGKLNRLVIPKQHAEKHFPLSAMTTAMGMNPSPTKGVLINLEDRTGKVWRFRYSYWNSSQSYVLTKGWSRFVKEKNLRAGDVVCFERSTGPDRQLYIHWKVRSSPVQTVVRLFGVNIFNVSNEKPNDVAVECVGKKRSREDDLFSLGCSKKQAIINIL

SEQ ID NO: 24412 - DNA, 1200 bp, Arabidopsis thaliana
  misc_feature (1)..(1200): Ceres Seq. ID no. 12324635
  misc_feature: MA Experiment ID: 108595 Result: Up-regulated in Transcription
  misc_feature: MA Experiment 108595 PARAMETER Experiment Name: At_Ler-pi_Ovule_cDNA_P Parameter: Plant Line Value: null
  misc_feature: MA Experiment ID: 20000171 Result: Up-regulated in Transcription
  misc_feature: MA Experiment 20000171 PARAMETER Experiment Name: At_42deg_Heat_P Parameter: Age (day) Value: 14
  misc_feature: MA Experiment 20000171 PARAMETER Experiment Name: At_42deg_Heat_P Parameter: Organism Value: A. thaliana
  misc_feature: MA Experiment 20000171 PARAMETER Experiment Name: At_42deg_Heat_P Parameter: Plant Line Value: WS
  misc_feature: MA Experiment 20000171 PARAMETER Experiment Name: At_42deg_Heat_P Parameter: Temperature (deg C) Value: 42 vs. 22
  misc_feature: MA Experiment 20000171 PARAMETER Experiment Name: At_42deg_Heat_P Parameter: Timepoint (hr) Value: 1
  misc_feature: MA Experiment 20000171 PARAMETER Experiment Name: At_42deg_Heat_P Parameter: Tissue Value: Aerial
  misc_feature: MA Experiment ID: 20000179 Result: Down-regulated in Transcription
  misc_feature: MA Experiment 20000179 PARAMETER Experiment Name: At_Germinating_Seeds_P Parameter: Age (hr) Value: 6 vs. 0
  misc_feature: MA Experiment 20000179 PARAMETER Experiment Name: At_Germinating_Seeds_P Parameter: Tissue Value: Germinating Seeds
ataagaaaaaaaagatgtcgaccgatatttcaccaccctactctcaaactcacgtggagcccgttaatggttatccttctgacaacaagagatgcgacgattcctctgttcctgccaaatatgatgatcttgtccgtaactctgctctcttctgggaaaagctccgagctttcctcggattaaccagcaagactttgaaggttcctactgtgggaggaaacactcttgatctgcatcggcttttcatcgaggttacgtctcgaggtggtatcgaaagggtggtgaaggatcggaaatggaaagaagtgattggtgcattcagttttccgacaacgataacaagtgcatcgtttgtcttgaggaagtattatctcaagtttctttttcagctggaacatgtgtattaccttgaaaaaccggtgtcttcactccaatcaacagatgaagcattgaagagccttgccaatgaatctccaaaccctgaggaaggtattgatgaaccacaagttgggtatgaggttcaaggattcattgatgggaagtttgatagcggctatctggtgacgatgaaattgggttctcaagagctgaaaggtgtcctttaccacattcctcaaacgccaagtcagtctcaacaaaccatggaaacaccttcagccattgtacaatcatcacaacgccggcataggaagaaatcaaagttggctgtagtcgatactcaaaaacccaaatgccacaggagtggctacaacttcttttttgctgagcagtacgcgaggcttaaacctgagtaccatggacaagaacgatccatcactaagaaaataggacacatgtggagcaatctcactgaatctgagaaacaggtttatcaagacaaaggagttaaggatgtggagagatacagaattgagatgttggaatataagtcttcacatgaatcaggagctactgcttctacagtggctcagtagcttttctcccttttgttgtcttacgtgtctgttgtaacatttttccttttctctatagaacttgttttctttttctttctaaatgtaatgttttctatcagttggaggatttgtcagctttattatggctttagagctagtgaggaggttactaactgtgaactagtgtctctcttgttgtttcttttagtaagtgccatttttgtagtgaattacaggcatatcc

SEQ ID NO: 24413 - protein, 323 aa, Arabidopsis thaliana
  peptide (1)..(323): Ceres Seq. ID no. 12324636
  misc_feature (41)..(150): Pfam Name: ARID/BRIGHT DNA binding domain Pfam Description: ARID/BRIGHT DNA binding domain
  misc_feature (175)..(311): Homolog of NCBI NO: 15222957 NR Description: unknown protein
  misc_feature (5)..(233): Homolog of NCBI NO: 15222957 NR Description: unknown protein
  misc_feature (2)..(70): Homolog of NCBI NO: 25405992 NR Description: protein F20N2.8 [imported] - Arabidopsis thaliana
  misc_feature (221)..(322): Homolog of NCBI NO: 25405992 NR Description: protein F20N2.8 [imported] - Arabidopsis thaliana
  misc_feature (95)..(206): Homolog of NCBI NO: 25405992 NR Description: protein F20N2.8 [imported] - Arabidopsis thaliana
  misc_feature (38)..(145): Homolog of NCBI NO: 15220344 NR Description: unknown protein; protein id: At1g04880.1
  misc_feature (148)..(319): Homolog of NCBI NO: 15220344 NR Description: unknown protein; protein id: At1g04880.1
  misc_feature (221)..(322): Homolog of NCBI NO: 15222755 NR Description: unknown protein; protein id: At1g55650.1
  misc_feature (5)..(206): Homolog of NCBI NO: 15222755 NR Description: unknown protein; protein id: At1g55650.1
  misc_feature (5)..(323): Homolog of NCBI NO: 18399977 NR Description: expressed protein
KKKKMSTDISPPYSQTHVEPVNGYPSDNKRCDDSSVPAKYDDLVRNSALFWEKLRAFLGLTSKTLKVPTVGGNTLDLHRLFIEVTSRGGIERVVKDRKWKEVIGAFSFPTTITSASFVLRKYYLKFLFQLEHVYYLEKPVSSLQSTDEALKSLANESPNPEEGIDEPQVGYEVQGFIDGKFDSGYLVTMKLGSQELKGVLYHIPQTPSQSQQTMETPSAIVQSSQRRHRKKSKLAVVDTQKPKCHRSGYNFFFAEQYARLKPEYHGQERSITKKIGHMWSNLTESEKQVYQDKGVKDVERYRIEMLEYKSSHESGATASTVAQ

SEQ ID NO: 24414 - protein, 319 aa, Arabidopsis thaliana
  peptide (1)..(319): Ceres Seq. ID no. 12324637
  misc_feature (37)..(146): Pfam Name: ARID/BRIGHT DNA binding domain Pfam Description: ARID/BRIGHT DNA binding domain
  misc_feature (1)..(229): Homolog of NCBI NO: 15222957 NR Description: unknown protein
  misc_feature (1)..(66): Homolog of NCBI NO: 25405992 NR Description: protein F20N2.8 [imported] - Arabidopsis thaliana
  misc_feature (217)..(318): Homolog of NCBI NO: 25405992 NR Description: protein F20N2.8 [imported] - Arabidopsis thaliana
  misc_feature (91)..(202): Homolog of NCBI NO: 25405992 NR Description: protein F20N2.8 [imported] - Arabidopsis thaliana
  misc_feature (34)..(141): Homolog of NCBI NO: 15220344 NR Description: unknown protein; protein id: At1g04880.1
  misc_feature (171)..(307): Homolog of NCBI NO: 15222957 NR Description: unknown protein
  misc_feature (144)..(315): Homolog of NCBI NO: 15220344 NR Description: unknown protein; protein id: At1g04880.1
  misc_feature (217)..(318): Homolog of NCBI NO: 15222755 NR Description: unknown protein; protein id: At1g55650.1
  misc_feature (1)..(202): Homolog of NCBI NO: 15222755 NR Description: unknown protein; protein id: At1g55650.1
  misc_feature (1)..(319): Homolog of NCBI NO: 18399977 NR Description: expressed protein
MSTDISPPYSQTHVEPVNGYPSDNKRCDDSSVPAKYDDLVRNSALFWEKLRAFLGLTSKTLKVPTVGGNTLDLHRLFIEVTSRGGIERVVKDRKWKEVIGAFSFPTTITSASFVLRKYYLKFLFQLEHVYYLEKPVSSLQSTDEALKSLANESPNPEEGIDEPQVGYEVQGFIDGKFDSGYLVTMKLGSQELKGVLYHIPQTPSQSQQTMETPSAIVQSSQRRHRKKSKLAVVDTQKPKCHRSGYNFFFAEQYARLKPEYHGQERSITKKIGHMWSNLTESEKQVYQDKGVKDVERYRIEMLEYKSSHESGATASTVAQ

SEQ ID NO: 24415 - DNA, 1155 bp, Arabidopsis thaliana
  misc_feature (1)..(1155): Ceres Seq. ID no. 12335621
  misc_feature: MA Experiment ID: 20000314 Result: Down-regulated in Transcription
  misc_feature: MA Experiment 20000314 PARAMETER Experiment Name: At_14day_Shoots-Roots_Sub_P Parameter: Age (day) Value: 14
  misc_feature: MA Experiment 20000314 PARAMETER Experiment Name: At_14day_Shoots-Roots_Sub_P Parameter: Organism Value: A. thaliana
  misc_feature: MA Experiment 20000314 PARAMETER Experiment Name: At_14day_Shoots-Roots_Sub_P Parameter: Plant Line Value: WS
  misc_feature: MA Experiment 20000314 PARAMETER Experiment Name: At_14day_Shoots-Roots_Sub_P Parameter: Tissue Value: Roots vs. Whole Plant
  misc_feature: MA Experiment ID: 20000315 Result: Down-regulated in Transcription
  misc_feature: MA Experiment 20000315 PARAMETER Experiment Name: At_14day_Shoots-Roots_Sub_P Parameter: Age (day) Value: 14
  misc_feature: MA Experiment 20000315 PARAMETER Experiment Name: At_14day_Shoots-Roots_Sub_P Parameter: Organism Value: A. thaliana
  misc_feature: MA Experiment 20000315 PARAMETER Experiment Name: At_14day_Shoots-Roots_Sub_P Parameter: Plant Line Value: WS
  misc_feature: MA Experiment 20000315 PARAMETER Experiment Name: At_14day_Shoots-Roots_Sub_P Parameter: Tissue Value: Shoots vs. Whole Plant
atcaactcgtttcttcgctgtcttagaaatccacaatatctttcttcacactttctttcactttcccgggaaaacagccgagaaaataaaagaaacgaagaaaagtttgttcctttgtggggatcaaagaagaatgtactcggcgattcggtcttcgcttcctctagatggcagcttgggagactactctgacggaaccaatcttcccatcgacgcttgtctggtcctaaccactgaccccaagcctcgccttcgttggacctctgagctccatgaaagattcgttgacgccgtcactcaactcggcggacccgacaaagcaacgcctaaaactataatgagaacaatgggagtgaagggtctcactctttaccacctcaaatctcatcttcagaaattccgcttggggaggcaatcttgtaaagaatcaattgacaactctaaggatgtttcttgtgttgcggagagtcaggacactggttcatcttcaacatcatcgttaagattggctgctcaagaacagaacgagagttaccaggtcactgaagctttgcgtgcccagatggaagtccaaagaagactacacgagcaactagaggtgcaaaggcgactccagttaaggatcgaggcacaagggaagtacctgcaatcaattctagagaaagcttgcaaggctatagaggagcaagctgttgcatttgctgggttagaggcagctagagaagagctttcagagctagccataaaggcctccatcaccaatgggtgccaaggaacaacaagcaccttcgacacaaccaaaatgatgattccatccttatccgagcttgcagtagcaatagagcacaagaacaactgttcagcagagagctctctgacttccagcactgtaggaagtccggtatcagctgcgttgatgaagaagagacaacgaggagtgtttggaaatggagatagtgtggttgttggtcatgatgctggatgggttatgcctagtagtagcattggatgaagttagcaagagagagagagagagcgagaccagattttagcttatttaattttgctatgttgtatttaactctaaactctgtcatcaaacttgtcttagcgtctatgtatatatttgttgaatctgtagcctctcttttagtc

SEQ ID NO: 24416 - protein, 336 aa, Arabidopsis thaliana
  peptide (1)..(336): Ceres Seq. ID no. 12335622
  misc_feature (83)..(134): Pfam Name: Myb-like DNA-binding domain Pfam Description: Myb-like DNA-binding domain
  misc_feature (41)..(309): Homolog of NCBI NO: 14596181 NR Description: transfactor-like protein [Arabidopsis thaliana]
  misc_feature (71)..(239): Homolog of NCBI NO: 30699418 NR Description: transfactor -related [Arabidopsis thaliana]
  misc_feature (55)..(234): Homolog of NCBI NO: 29647444 NR Description: P0410E11.32 [Oryza sativa (japonica
  misc_feature (67)..(313): Homolog of NCBI NO: 6223653 NR Description: transfactor-like [Arabidopsis thaliana]
  misc_feature (71)..(239): Homolog of NCBI NO: 25406584 NR Description: hypothetical protein T8K14.15 [imported] -
  misc_feature (188)..(336): Homolog of NCBI NO: 19698927 NR Description: putative protein [Arabidopsis thaliana]
  misc_feature (45)..(336): Homolog of NCBI NO: 11994231 NR Description: contains similarity to transfactor~gene_id:MUJ8.2
  misc_feature (45)..(336): Homolog of NCBI NO: 18404044 NR Description: transfactor, putative
  misc_feature (45)..(336): Homolog of NCBI NO: 7485694 NR Description: hypothetical protein F18A5.30 - Arabidopsis
  misc_feature (45)..(336): Homolog of NCBI NO: 18414049 NR Description: putative protein
STRFFAVLEIHNIFLHTFFHFPGKTAEKIKETKKSLFLCGDQRRMYSAIRSSLPLDGSLGDYSDGTNLPIDACLVLTTDPKPRLRWTSELHERFVDAVTQLGGPDKATPKTIMRTMGVKGLTLYHLKSHLQKFRLGRQSCKESIDNSKDVSCVAESQDTGSSSTSSLRLAAQEQNESYQVTEALRAQMEVQRRLHEQLEVQRRLQLRIEAQGKYLQSILEKACKAIEEQAVAFAGLEAAREELSELAIKASITNGCQGTTSTFDTTKMMIPSLSELAVAIEHKNNCSAESSLTSSTVGSPVSAALMKKRQRGVFGNGDSVVVGHDAGWVMPSSSIG

SEQ ID NO: 24417 - protein, 292 aa, Arabidopsis thaliana
  peptide (1)..(292): Ceres Seq. ID no. 12335623
  misc_feature (39)..(90): Pfam Name: Myb-like DNA-binding domain Pfam Description: Myb-like DNA-binding domain
  misc_feature (1)..(265): Homolog of NCBI NO: 14596181 NR Description: transfactor-like protein [Arabidopsis thaliana]
  misc_feature (27)..(195): Homolog of NCBI NO: 30699418 NR Description: transfactor -related [Arabidopsis thaliana]
  misc_feature (11)..(190): Homolog of NCBI NO: 29647444 NR Description: P0410E11.32 [Oryza sativa (japonica
  misc_feature (23)..(269): Homolog of NCBI NO: 6223653 NR Description: transfactor-like [Arabidopsis thaliana]
  misc_feature (27)..(195): Homolog of NCBI NO: 25406584 NR Description: hypothetical protein T8K14.15 [imported] -
  misc_feature (144)..(292): Homolog of NCBI NO: 19698927 NR Description: putative protein [Arabidopsis thaliana]
  misc_feature (1)..(292): Homolog of NCBI NO: 11994231 NR Description: contains similarity to transfactor~gene_id:MUJ8.2
  misc_feature (1)..(292): Homolog of NCBI NO: 18404044 NR Description: transfactor, putative
  misc_feature (1)..(292): Homolog of NCBI NO: 7485694 NR Description: hypothetical protein F18A5.30 - Arabidopsis
  misc_feature (1)..(292): Homolog of NCBI NO: 18414049 NR Description: putative protein
MYSAIRSSLPLDGSLGDYSDGTNLPIDACLVLTTDPKPRLRWTSELHERFVDAVTQLGGPDKATPKTIMRTMGVKGLTLYHLKSHLQKFRLGRQSCKESIDNSKDVSCVAESQDTGSSSTSSLRLAAQEQNESYQVTEALRAQMEVQRRLHEQLEVQRRLQLRIEAQGKYLQSILEKACKAIEEQAVAFAGLEAAREELSELAIKASITNGCQGTTSTFDTTKMMIPSLSELAVAIEHKNNCSAESSLTSSTVGSPVSAALMKKRQRGVFGNGDSVVVGHDAGWVMPSSSIG

SEQ ID NO: 24418 - protein, 224 aa, Arabidopsis thaliana
  peptide (1)..(224): Ceres Seq. ID no. 12335624
  misc_feature (1)..(197): Homolog of NCBI NO: 14596181 NR Description: transfactor-like protein [Arabidopsis thaliana]
  misc_feature (1)..(127): Homolog of NCBI NO: 30699418 NR Description: transfactor -related [Arabidopsis thaliana]
  misc_feature (1)..(122): Homolog of NCBI NO: 29647444 NR Description: P0410E11.32 [Oryza sativa (japonica
  misc_feature (1)..(201): Homolog of NCBI NO: 6223653 NR Description: transfactor-like [Arabidopsis thaliana]
  misc_feature (1)..(127): Homolog of NCBI NO: 25406584 NR Description: hypothetical protein T8K14.15 [imported] -
  misc_feature (76)..(224): Homolog of NCBI NO: 19698927 NR Description: putative protein [Arabidopsis thaliana]
  misc_feature (1)..(224): Homolog of NCBI NO: 11994231 NR Description: contains similarity to transfactor~gene_id:MUJ8.2
  misc_feature (1)..(224): Homolog of NCBI NO: 18404044 NR Description: transfactor, putative
  misc_feature (1)..(224): Homolog of NCBI NO: 7485694 NR Description: hypothetical protein F18A5.30 - Arabidopsis
  misc_feature (1)..(224): Homolog of NCBI NO: 18414049 NR Description: putative protein
MRTMGVKGLTLYHLKSHLQKFRLGRQSCKESIDNSKDVSCVAESQDTGSSSTSSLRLAAQEQNESYQVTEALRAQMEVQRRLHEQLEVQRRLQLRIEAQGKYLQSILEKACKAIEEQAVAFAGLEAAREELSELAIKASITNGCQGTTSTFDTTKMMIPSLSELAVAIEHKNNCSAESSLTSSTVGSPVSAALMKKRQRGVFGNGDSVVVGHDAGWVMPSSSIG

SEQ ID NO: 24419 - DNA, 2078 bp, Arabidopsis thaliana
  misc_feature (1)..(2078): Ceres Seq. ID no. 12325297
  misc_feature: MA Experiment ID: 108434 Result: Up-regulated in Transcription
  misc_feature: MA Experiment 108434 PARAMETER Experiment Name: At_Root_Tips_cDNA_P Parameter: Tissue Value: Root Tips
  misc_feature: MA Experiment ID: 108462 Result: Down-regulated in Transcription
  misc_feature: MA Experiment 108462 PARAMETER Experiment Name: At_Germinating_Seeds_cDNA_P Parameter: Age (day) Value: 2 vs. 0
  misc_feature: MA Experiment 108462 PARAMETER Experiment Name: At_Germinating_Seeds_cDNA_P Parameter: Tissue Value: Germinating Seeds
  misc_feature: MA Experiment ID: 20000113 Result: Down-regulated in Transcription
  misc_feature: MA Experiment 20000113 PARAMETER Experiment Name: At_42deg_Heat_cDNA_P Parameter: Temperature (deg C) Value: 42 vs. 22
  misc_feature: MA Experiment 20000113 PARAMETER Experiment Name: At_42deg_Heat_cDNA_P Parameter: Timepoint (hr) Value: 8
  misc_feature: MA Experiment 20000113 PARAMETER Experiment Name: At_42deg_Heat_cDNA_P Parameter: Tissue Value: Aerial
  misc_feature: MA Experiment ID: 20000171 Result: Down-regulated in Transcription
  misc_feature: MA Experiment 20000171 PARAMETER Experiment Name: At_42deg_Heat_P Parameter: Age (day) Value: 14
  misc_feature: MA Experiment 20000171 PARAMETER Experiment Name: At_42deg_Heat_P Parameter: Organism Value: A. thaliana
  misc_feature: MA Experiment 20000171 PARAMETER Experiment Name: At_42deg_Heat_P Parameter: Plant Line Value: WS
  misc_feature: MA Experiment 20000171 PARAMETER Experiment Name: At_42deg_Heat_P Parameter: Temperature (deg C) Value: 42 vs. 22
  misc_feature: MA Experiment 20000171 PARAMETER Experiment Name: At_42deg_Heat_P Parameter: Timepoint (hr) Value: 1
  misc_feature: MA Experiment 20000171 PARAMETER Experiment Name: At_42deg_Heat_P Parameter: Tissue Value: Aerial
  misc_feature: MA Experiment ID: 20000179 Result: Down-regulated in Transcription
  misc_feature: MA Experiment 20000179 PARAMETER Experiment Name: At_Germinating_Seeds_P Parameter: Age (hr) Value: 6 vs. 0
  misc_feature: MA Experiment 20000179 PARAMETER Experiment Name: At_Germinating_Seeds_P Parameter: Tissue Value: Germinating Seeds
  misc_feature: MA Experiment ID: 20000180 Result: Down-regulated in Transcription
  misc_feature: MA Experiment 20000180 PARAMETER Experiment Name: At_Germinating_Seeds_P Parameter: Age (hr) Value: 24 vs. 0
  misc_feature: MA Experiment 20000180 PARAMETER Experiment Name: At_Germinating_Seeds_P Parameter: Tissue Value: Germinating Seeds
  misc_feature: MA Experiment ID: 20000794 Result: Up-regulated in Transcription
  misc_feature: MA Experiment 20000794 PARAMETER Experiment Name: At_Petals_P Parameter: Age (day) Value: 23-25 days
  misc_feature: MA Experiment 20000794 PARAMETER Experiment Name: At_Petals_P Parameter: Plant Line Value: WS
  misc_feature: MA Experiment 20000794 PARAMETER Experiment Name: At_Petals_P Parameter: Tissue Value: Petals vs. Whole plant
gaattgatcgactgggaaacagagaaccaccgtttctacagttggatatggctggtgggcaaatagagaagctagtcaaatacaagagcactgtcaaggatccaggaactcctggatttctcagaattagagaagggatgttgctcttcgtccctaatgatcccaaatcagattctaagctcaaagtacttactcagaacatcaaaagtcaaaaatataccaaagaaggatcaaataaacctccttggctcaatctcaccaacaagcaggcaaagagtcatatctttgagtttgaaaattatcccgacatgcatgcttgccgtgatttcatcactaaggcccttgctaaatgtgaagaggagcctaataaatccgttgtctcgacatcttccgagcaactcagtattaaggaattggagctgcgcttcaagcttctgagagaaaatagtgagctgcagagattgcataagcaatttgtggaaagtaaagtactgactgaagatgaattctgggctacaagaaagaaattacttggtaaagattccatcagaaagtcaaaacagcagctcgggcttaagagcatgatggtttctggcatcaaaccatctactgatgggcggactaatagggtgacgtttaacttgacacctgagataatttttcagatttttgctgagaagccagctgttcggcaggcattcatcaattatgttccgagtaagatgacagaaaaagacttctggacaaaatattttagagcagaatatctttacagcaccaaaaatacagcagtagctgcagcagaagctgctgaggacgaggaactcgctgtctttctgaagcctgatgagatattggctcgggaaactcgtcacaagattagacgggttgatccaactcttgacatggaggctgaccagggagacgactacactcatcttatggaccacgggatccagcgtgatggcaccatggatgttgttgaaccacaaaatgatcagtttaaacgatcacttttgcaagatcttaatcgtcatgctgctgttgtattggaaggcagaagcattgatgttgagtcagaagatacaaggattgttgcagaggctctcacacgggttaaacaagtaagcaaagctgatggtgaaaccaccaaggacgctaatcaggagagattggaaagaatgtcccgggtagcaggaatggaggatcttcaagcaccacaaaatttcccattggcgccgctttctatcaaggatcctcgtgattactttgaatctcaacaaggaaacgtcctcaatgtacccagaggagcaaagggcttgaagagaaatgtccatgaagcttatggattactaaaggaatccattttagagattagagctacaggattaagtgatccgttgattaagcctgaagtttctttcgaggttttcagttcgttaacccgaaccattgcaactgctaaaaatattaatgggaagaacccacgagagagctttctggacagattaccaaagtccactaaggatgaagttctacaccattggacatcaatacaagaattactgaaacatttttggtcatcttatccgataacaaccacatatcttcataccaaggttggtaaactgaaggatgcaatgtccaatacatattcaaaacttgaggcaatgaaagagtcggtgcaatctgatctccggcatcaggtttctctactggttcgtccaatgcaacaggctcttgacgctgcgttccatcactacgaagtggatctgcagagaagaacagctaagagcggcgaaagaccaaacggctacgtataaaggacaaaaaaactaaaactaaaaagctttgcaagatctttgaattgtttcatcagccttggttggtgtttttgaaaatcttcatttgtccctttttgtccgaccattgagatacaaaaatgcgtttatattgtagtaatattttcttttcttttttttgttaattaggcgttatattgttaactgcgagagacaacaaagagattttctcgatctgaacatttttgagtttgcaatgtattagtaaattctctc

SEQ ID NO: 24420 - protein, 606 aa, Arabidopsis thaliana
  peptide (1)..(606): Ceres Seq. ID no. 12325298
  misc_feature (208)..(254): Pfam Name: BSD domain Pfam Description: BSD domain
  misc_feature (16)..(362): Homolog of NCBI NO: 4885365 NR Description: general transcription factor IIH, polypeptide 1
  misc_feature (470)..(597): Homolog of NCBI NO: 10440006 NR Description: unnamed protein product [Homo sapiens]
  misc_feature (16)..(362): Homolog of NCBI NO: 10440006 NR Description: unnamed protein product [Homo sapiens]
  misc_feature (26)..(605): Homolog of NCBI NO: 38636938 NR Description: unknown protein [Oryza sativa (japonica
  misc_feature (375)..(417): Homolog of NCBI NO: 8778495 NR Description: F20N2.15 [Arabidopsis thaliana]
  misc_feature (417)..(606): Homolog of NCBI NO: 8778495 NR Description: F20N2.15 [Arabidopsis thaliana]
  misc_feature (1)..(374): Homolog of NCBI NO: 8778495 NR Description: F20N2.15 [Arabidopsis thaliana]
  misc_feature (46)..(597): Homolog of NCBI NO: 15233107 NR Description: putative protein; protein id: At3g61420.1
  misc_feature (536)..(606): Homolog of NCBI NO: 30696007 NR Description: expressed protein [Arabidopsis thaliana]
  misc_feature (16)..(513): Homolog of NCBI NO: 30696007 NR Description: expressed protein [Arabidopsis thaliana]
IDRLGNREPPFLQLDMAGGQIEKLVKYKSTVKDPGTPGFLRIREGMLLFVPNDPKSDSKLKVLTQNIKSQKYTKEGSNKPPWLNLTNKQAKSHIFEFENYPDMHACRDFITKALAKCEEEPNKSVVSTSSEQLSIKELELRFKLLRENSELQRLHKQFVESKVLTEDEFWATRKKLLGKDSIRKSKQQLGLKSMMVSGIKPSTDGRTNRVTFNLTPEIIFQIFAEKPAVRQAFINYVPSKMTEKDFWTKYFRAEYLYSTKNTAVAAAEAAEDEELAVFLKPDEILARETRHKIRRVDPTLDMEADQGDDYTHLMDHGIQRDGTMDVVEPQNDQFKRSLLQDLNRHAAVVLEGRSIDVESEDTRIVAEALTRVKQVSKADGETTKDANQERLERMSRVAGMEDLQAPQNFPLAPLSIKDPRDYFESQQGNVLNVPRGAKGLKRNVHEAYGLLKESILEIRATGLSDPLIKPEVSFEVFSSLTRTIATAKNINGKNPRESFLDRLPKSTKDEVLHHWTSIQELLKHFWSSYPITTTYLHTKVGKLKDAMSNTYSKLEAMKESVQSDLRHQVSLLVRPMQQALDAAFHHYEVDLQRRTAKSGERPNGYV

SEQ ID NO: 24421 - protein, 591 aa, Arabidopsis thaliana
  peptide (1)..(591): Ceres Seq. ID no. 12325299
  misc_feature (193)..(239): Pfam Name: BSD domain Pfam Description: BSD domain
  misc_feature (1)..(347): Homolog of NCBI NO: 4885365 NR Description: general transcription factor IIH, polypeptide 1
  misc_feature (455)..(582): Homolog of NCBI NO: 10440006 NR Description: unnamed protein product [Homo sapiens]
  misc_feature (1)..(347): Homolog of NCBI NO: 10440006 NR Description: unnamed protein product [Homo sapiens]
  misc_feature (11)..(590): Homolog of NCBI NO: 38636938 NR Description: unknown protein [Oryza sativa (japonica
  misc_feature (360)..(402): Homolog of NCBI NO: 8778495 NR Description: F20N2.15 [Arabidopsis thaliana]
  misc_feature (402)..(591): Homolog of NCBI NO: 8778495 NR Description: F20N2.15 [Arabidopsis thaliana]
  misc_feature (1)..(359): Homolog of NCBI NO: 8778495 NR Description: F20N2.15 [Arabidopsis thaliana]
  misc_feature (31)..(582): Homolog of NCBI NO: 15233107 NR Description: putative protein; protein id: At3g61420.1
  misc_feature (521)..(591): Homolog of NCBI NO: 30696007 NR Description: expressed protein [Arabidopsis thaliana]
  misc_feature (1)..(498): Homolog of NCBI NO: 30696007 NR Description: expressed protein [Arabidopsis thaliana]
MAGGQIEKLVKYKSTVKDPGTPGFLRIREGMLLFVPNDPKSDSKLKVLTQNIKSQKYTKEGSNKPPWLNLTNKQAKSHIFEFENYPDMHACRDFITKALAKCEEEPNKSVVSTSSEQLSIKELELRFKLLRENSELQRLHKQFVESKVLTEDEFWATRKKLLGKDSIRKSKQQLGLKSMMVSGIKPSTDGRTNRVTFNLTPEIIFQIFAEKPAVRQAFINYVPSKMTEKDFWTKYFRAEYLYSTKNTAVAAAEAAEDEELAVFLKPDEILARETRHKIRRVDPTLDMEADQGDDYTHLMDHGIQRDGTMDVVEPQNDQFKRSLLQDLNRHAAVVLEGRSIDVESEDTRIVAEALTRVKQVSKADGETTKDANQERLERMSRVAGMEDLQAPQNFPLAPLSIKDPRDYFESQQGNVLNVPRGAKGLKRNVHEAYGLLKESILEIRATGLSDPLIKPEVSFEVFSSLTRTIATAKNINGKNPRESFLDRLPKSTKDEVLHHWTSIQELLKHFWSSYPITTTYLHTKVGKLKDAMSNTYSKLEAMKESVQSDLRHQVSLLVRPMQQALDAAFHHYEVDLQRRTAKSGERPNGYV

SEQ ID NO: 24422 - protein, 561 aa, Arabidopsis thaliana
  peptide (1)..(561): Ceres Seq. ID no. 12325300
  misc_feature (163)..(209): Pfam Name: BSD domain Pfam Description: BSD domain
  misc_feature (1)..(317): Homolog of NCBI NO: 4885365 NR Description: general transcription factor IIH, polypeptide 1
  misc_feature (425)..(552): Homolog of NCBI NO: 10440006 NR Description: unnamed protein product [Homo sapiens]
  misc_feature (1)..(317): Homolog of NCBI NO: 10440006 NR Description: unnamed protein product [Homo sapiens]
  misc_feature (1)..(560): Homolog of NCBI NO: 38636938 NR Description: unknown protein [Oryza sativa (japonica
  misc_feature (330)..(372): Homolog of NCBI NO: 8778495 NR Description: F20N2.15 [Arabidopsis thaliana]
  misc_feature (372)..(561): Homolog of NCBI NO: 8778495 NR Description: F20N2.15 [Arabidopsis thaliana]
  misc_feature (1)..(329): Homolog of NCBI NO: 8778495 NR Description: F20N2.15 [Arabidopsis thaliana]
  misc_feature (1)..(552): Homolog of NCBI NO: 15233107 NR Description: putative protein; protein id: At3g61420.1
  misc_feature (491)..(561): Homolog of NCBI NO: 30696007 NR Description: expressed protein [Arabidopsis thaliana]
  misc_feature (1)..(468): Homolog of NCBI NO: 30696007 NR Description: expressed protein [Arabidopsis thaliana]
MLLFVPNDPKSDSKLKVLTQNIKSQKYTKEGSNKPPWLNLTNKQAKSHIFEFENYPDMHACRDFITKALAKCEEEPNKSVVSTSSEQLSIKELELRFKLLRENSELQRLHKQFVESKVLTEDEFWATRKKLLGKDSIRKSKQQLGLKSMMVSGIKPSTDGRTNRVTFNLTPEIIFQIFAEKPAVRQAFINYVPSKMTEKDFWTKYFRAEYLYSTKNTAVAAAEAAEDEELAVFLKPDEILARETRHKIRRVDPTLDMEADQGDDYTHLMDHGIQRDGTMDVVEPQNDQFKRSLLQDLNRHAAVVLEGRSIDVESEDTRIVAEALTRVKQVSKADGETTKDANQERLERMSRVAGMEDLQAPQNFPLAPLSIKDPRDYFESQQGNVLNVPRGAKGLKRNVHEAYGLLKESILEIRATGLSDPLIKPEVSFEVFSSLTRTIATAKNINGKNPRESFLDRLPKSTKDEVLHHWTSIQELLKHFWSSYPITTTYLHTKVGKLKDAMSNTYSKLEAMKESVQSDLRHQVSLLVRPMQQALDAAFHHYEVDLQRRTAKSGERPNGYV

SEQ ID NO: 24423 - DNA, 3435 bp, Arabidopsis thaliana
  misc_feature (1)..(3435): Ceres Seq. ID no. 13491817
  misc_feature: MA Experiment ID: 108434 Result: Down-regulated in Transcription
  misc_feature: MA Experiment 108434 PARAMETER Experiment Name: At_Root_Tips_cDNA_P Parameter: Tissue Value: Root Tips
  misc_feature: MA Experiment ID: 108464 Result: Up-regulated in Transcription
  misc_feature: MA Experiment 108464 PARAMETER Experiment Name: At_Germinating_Seeds_cDNA_P Parameter: Age (day) Value: 4 vs. 0
  misc_feature: MA Experiment 108464 PARAMETER Experiment Name: At_Germinating_Seeds_cDNA_P Parameter: Tissue Value: Germinating Seeds
  misc_feature: MA Experiment ID: 108585 Result: Up-regulated in Transcription
  misc_feature: MA Experiment 108585 PARAMETER Experiment Name: At_5mM_NaNP_cDNA_P Parameter: Timepoint (hr) Value: 6
  misc_feature: MA Experiment 108585 PARAMETER Experiment Name: At_5mM_NaNP_cDNA_P Parameter: Tissue Value: Aerial
  misc_feature: MA Experiment 108585 PARAMETER Experiment Name: At_5mM_NaNP_cDNA_P Parameter: Treatment Value: null
  misc_feature: MA Experiment ID: 20000173 Result: Down-regulated in Transcription
  misc_feature: MA Experiment 20000173 PARAMETER Experiment Name: At_42deg_Heat_P Parameter: Age (day) Value: 14
  misc_feature: MA Experiment 20000173 PARAMETER Experiment Name: At_42deg_Heat_P Parameter: Organism Value: A. thaliana
  misc_feature: MA Experiment 20000173 PARAMETER Experiment Name: At_42deg_Heat_P Parameter: Plant Line Value: WS
  misc_feature: MA Experiment 20000173 PARAMETER Experiment Name: At_42deg_Heat_P Parameter: Temperature (deg C) Value: 42 vs. 22
  misc_feature: MA Experiment 20000173 PARAMETER Experiment Name: At_42deg_Heat_P Parameter: Timepoint (hr) Value: 6
  misc_feature: MA Experiment 20000173 PARAMETER Experiment Name: At_42deg_Heat_P Parameter: Tissue Value: Aerial
  misc_feature: MA Experiment ID: 20000179 Result: Down-regulated in Transcription
  misc_feature: MA Experiment 20000179 PARAMETER Experiment Name: At_Germinating_Seeds_P Parameter: Age (hr) Value: 6 vs. 0
  misc_feature: MA Experiment 20000179 PARAMETER Experiment Name: At_Germinating_Seeds_P Parameter: Tissue Value: Germinating Seeds
  misc_feature: MA Experiment ID: 20000184 Result: Down-regulated in Transcription
  misc_feature: MA Experiment 20000184 PARAMETER Experiment Name: At_Shoots__P Parameter: Age (day) Value: 7
  misc_feature: MA Experiment 20000184 PARAMETER Experiment Name: At_Shoots__P Parameter: Tissue Value: Shoots vs. Whole Plant
  misc_feature: MA Experiment ID: 20000224 Result: Up-regulated in Transcription
  misc_feature: MA Experiment ID: 20000234 Result: Down-regulated in Transcription
  misc_feature: MA Experiment 20000234 PARAMETER Experiment Name: At_Siliques_P Parameter: Age (day) Value: 21
  misc_feature: MA Experiment 20000234 PARAMETER Experiment Name: At_Siliques_P Parameter: Organism Value: A. thaliana
  misc_feature: MA Experiment 20000234 PARAMETER Experiment Name: At_Siliques_P Parameter: Plant Line Value: WS
  misc_feature: MA Experiment 20000234 PARAMETER Experiment Name: At_Siliques_P Parameter: Tissue Value: Less Than 5mm Siliques vs. Whole Plant
  misc_feature: MA Experiment ID: 20000265 Result: Down-regulated in Transcription
  misc_feature: MA Experiment 20000265 PARAMETER Experiment Name: At_Open_Flower_P Parameter: Age (day) Value: 21
  misc_feature: MA Experiment 20000265 PARAMETER Experiment Name: At_Open_Flower_P Parameter: Plant Line Value: WS
  misc_feature: MA Experiment 20000265 PARAMETER Experiment Name: At_Open_Flower_P Parameter: Tissue Value: Closed Flower vs. Whole Plant
  misc_feature: MA Experiment ID: 20000438 Result: Down-regulated in Transcription
  misc_feature: MA Experiment 20000438 PARAMETER Experiment Name: At_Shoots__P Parameter: Age (day) Value: 14
  misc_feature: MA Experiment 20000438 PARAMETER Experiment Name: At_Shoots__P Parameter: Tissue Value: Shoots vs. Whole Plant
  misc_feature: MA Experiment ID: 20001560 Result: Down-regulated in Transcription
  misc_feature: MA Experiment 20001560 PARAMETER Experiment Name: At_Drought_Soil_Dry_P Parameter: Age (day) Value: 28
  misc_feature: MA Experiment 20001560 PARAMETER Experiment Name: At_Drought_Soil_Dry_P Parameter: Organism Value: A. thaliana
  misc_feature: MA Experiment 20001560 PARAMETER Experiment Name: At_Drought_Soil_Dry_P Parameter: Plant Line Value: WS
  misc_feature: MA Experiment 20001560 PARAMETER Experiment Name: At_Drought_Soil_Dry_P Parameter: Post Timepoint (hr) Value: None
  misc_feature: MA Experiment 20001560 PARAMETER Experiment Name: At_Drought_Soil_Dry_P Parameter: Post-Treatment Value: None
  misc_feature: MA Experiment 20001560 PARAMETER Experiment Name: At_Drought_Soil_Dry_P Parameter: Timepoint (day) Value: 14
  misc_feature: MA Experiment 20001560 PARAMETER Experiment Name: At_Drought_Soil_Dry_P Parameter: Treatment Value: Drought vs. No Drought
agatgcttccttcttcactttaatcacccttttcgattttcgttttccagctttttgattcctctgtttcaccaagtagacgaagtagaagaagaagaagaagaagaaagttttcacctttactctaaaagtttcactttttatgtctgctttgaagctctgagatcggagaaagcaatatctatggcggaagcaagacgattcagcccagttcatgaattagatgttggacaaatactctcagaagcacgacatcgatggcttcgtcctcctgaaatctgtgaaattttacagaattaccaaagatttcaaatttctactgagccacctactacaccatcaagtgggtctgtttttatgtttgatcgaaaggtgctcagatacttcaggaaagacggtcacaattggaggaagaaaaaagatggaaagactgtgaaggaagctcatgagaggttgaaggcgggaagcgttgatgttctacattgttactatgcgcatggacaggacaatgaaaactttcaaagacgcagttactggttgcttcaggaagaactttcccacatagtttttgttcactacctcgaagttaagggtagtagagtttctacttcttttaaccggatgcaaaggactgaagacgcggctcggtctcctcaagaaactggggacgccttgaccagtgaacatgatggttatgcttcttgcagcttcaatcaaaatgatcatagcaatcattcacaaactactgactcagcaagtgtcaatggttttcactctccagaacttgaagatgctgaatcagcatacaatcagcatggaagttccacagcttactctcatcaagaacttcagcagcctgcaacaggaggaaaccttactggttttgatccttactatcaaatctctttgacgcccagggatagttatcaaaaagagcttcgcacaatccccgtaactgattcttcaattatggtagacaaaagcaaaactatcaacagtcctggagtaacaaatgggttaaaaaacagaaaatccattgattcccaaacctgggaagagattctgggaaattgtggttctggagttgaagccttacctttgcagcctaacagtgagcatgaagtgctggaccaaatactcgaaagctcttttacaatgcaagattttgctagtctacaagagtccatggtcaaaagccagaatcaggagttaaattcaggacttacatctgatcgtaccgtgtggttccaaggacaagatatggagctaaatgctataagcaatctagcttcgaatgaaaaagctccatatctatctacgatgaaacaacatctgttacacggtgcattgggcgaagaaggtctgaaaaagatggacagtttcaatcgctggatgagcaaagaacttggagatgttggtgttatagctgatgcaaacgagtcctttactcaatcaagttcaagaacctactgggaagaagttgagagtgaggatgggtccaatggtcacaactctaggagggacatggatggatatgttatgagtccttccctctcaaaggaacagctctttagcatcaatgacttctctccaagctgggcttatgtgggttgtgaagtggtggtttttgtcactggaaaattcttaaagactcgggaggagactgaaattggcgagtggtcttgcatgtttgggcaaacagaagttccagcagatgttatatctaatggtattctccaatgtgttgctcctatgcatgaggctggaagagttcccttttatgtaacatgttccaacagattggcatgcagtgaagtgcgtgaattcgagtataaggttgccgagtctcaagtttttgatagagaagcagatgatgagtctactattgacattcttgaggcaagatttgttaaactgttgtgctcgaaatctgaaaatacaagccctgtttctgggaatgacagtgatttgtcacaattgagcgagaagattagtttactacttttcgagaacgatgaccagttggatcagatgctcatgaatgaaatctcccaagaaaatatgaaaaacaaccttttgcaggaatttctgaaagaaagcttacactcatggcttttacaaaagatagcagaaggtggaaaaggtccaagtgttttggatgaaggtggccaaggtgtattacattttgcagcttctcttggttacaactgggccttagaaccaacaataatcgctggtgtaagcgttgattttcgcgatgtaaatggttggaccgcacttcattgggcagctttctttggcagggagaggataattggttcactcatagctcttggtgctgctcctggaactttaactgacccaaatccagatttcccatcaggaagcacaccttctgatctagcctatgctaatggtcacaaaggaattgctggttatctctcagaatatgccttaagagctcatgtttctttgctcagtctaaatgataaaaatgccgaaactgttgagatggctcctagcccatccagctcatcattgacagactcgttgacagctgtacgtaacgctactcaggcagcagctcggattcatcaggttttcagggctcagtctttccagaagaagcaactaaaagaatttggagataaaaagcttggaatgtcggaggagcgtgctctttcgatgcttgctcctaaaacacacaaatcaggaagggcacatagtgatgattccgtgcaagccgctgctattcggattcagaacaagttccgaggttacaagggaagaaaagactatttgattaccagacaaagaatcatcaaaatacaggctcatgtgagaggttatcagtttaggaaaaactacagaaagataatttggtcagtgggggtattagagaaggtgatattacgttggagacggaaaggagctggtttgcgcgggtttaagtcagaagcacttgttgagaagatgcaagacggaacagagaaagaagaagatgatgattttttcaaacaaggaagaaagcaaacagaggataggctacaaaaagctcttgcaagagtgaaatccatggttcaatatcctgaagctagagatcaataccgtagattgctaaatgttgtcaacgacatccaagaaagcaaggttgaaaaagctcttgaaaattcagaagcaacttgttttgatgatgatgatgatctgatagatattgaagcattgttggaagatgatgacacattgatgttgcctatgtcctcatctttgtggaccagttaaatcactctcaagctttgttgtgatattgtgtcacagtattattgactcattaaacttgtaaattcttgtgtaatcactcttctcatatactgtaactgcattcatgactctaatttaaatgatatatatttgaaacataaatcaaacttatgt

SEQ ID NO: 24424 - protein, 1093 aa, Arabidopsis thaliana
  peptide (1)..(1093): Ceres Seq. ID no. 13491818
  misc_feature (525)..(612): Pfam Name: IPT/TIG domain Pfam Description: IPT/TIG domain
  misc_feature (842)..(1089): Homolog of NCBI NO: 20127124 NR Description: calmodulin-binding transcription activator
  misc_feature (431)..(831): Homolog of NCBI NO: 20127124 NR Description: calmodulin-binding transcription activator
  misc_feature (62)..(230): Homolog of NCBI NO: 15242417 NR Description: calmodulin-binding protein [Arabidopsis thaliana]
  misc_feature (827)..(1087): Homolog of NCBI NO: 15242417 NR Description: calmodulin-binding protein [Arabidopsis thaliana]
  misc_feature (431)..(831): Homolog of NCBI NO: 15242417 NR Description: calmodulin-binding protein [Arabidopsis thaliana]
  misc_feature (62)..(1091): Homolog of NCBI NO: 37991923 NR Description: putative calmodulin-binding transcription factor
  misc_feature (824)..(1083): Homolog of NCBI NO: 30697970 NR Description: calmodulin-binding protein [Arabidopsis thaliana]
  misc_feature (62)..(858): Homolog of NCBI NO: 30697970 NR Description: calmodulin-binding protein [Arabidopsis thaliana]
  misc_feature (63)..(1082): Homolog of NCBI NO: 37533660 NR Description: putative calmodulin binding protein similar to
  misc_feature (637)..(1093): Homolog of NCBI NO: 11545505 NR Description: calmodulin-binding protein [Arabidopsis thaliana]
RCFLLHFNHPFRFSFSSFLIPLFHQVDEVEEEEEEESFHLYSKSFTFYVCFEALRSEKAISMAEARRFSPVHELDVGQILSEARHRWLRPPEICEILQNYQRFQISTEPPTTPSSGSVFMFDRKVLRYFRKDGHNWRKKKDGKTVKEAHERLKAGSVDVLHCYYAHGQDNENFQRRSYWLLQEELSHIVFVHYLEVKGSRVSTSFNRMQRTEDAARSPQETGDALTSEHDGYASCSFNQNDHSNHSQTTDSASVNGFHSPELEDAESAYNQHGSSTAYSHQELQQPATGGNLTGFDPYYQISLTPRDSYQKELRTIPVTDSSIMVDKSKTINSPGVTNGLKNRKSIDSQTWEEILGNCGSGVEALPLQPNSEHEVLDQILESSFTMQDFASLQESMVKSQNQELNSGLTSDRTVWFQGQDMELNAISNLASNEKAPYLSTMKQHLLHGALGEEGLKKMDSFNRWMSKELGDVGVIADANESFTQSSSRTYWEEVESEDGSNGHNSRRDMDGYVMSPSLSKEQLFSINDFSPSWAYVGCEVVVFVTGKFLKTREETEIGEWSCMFGQTEVPADVISNGILQCVAPMHEAGRVPFYVTCSNRLACSEVREFEYKVAESQVFDREADDESTIDILEARFVKLLCSKSENTSPVSGNDSDLSQLSEKISLLLFENDDQLDQMLMNEISQENMKNNLLQEFLKESLHSWLLQKIAEGGKGPSVLDEGGQGVLHFAASLGYNWALEPTIIAGVSVDFRDVNGWTALHWAAFFGRERIIGSLIALGAAPGTLTDPNPDFPSGSTPSDLAYANGHKGIAGYLSEYALRAHVSLLSLNDKNAETVEMAPSPSSSSLTDSLTAVRNATQAAARIHQVFRAQSFQKKQLKEFGDKKLGMSEERALSMLAPKTHKSGRAHSDDSVQAAAIRIQNKFRGYKGRKDYLITRQRIIKIQAHVRGYQFRKNYRKIIWSVGVLEKVILRWRRKGAGLRGFKSEALVEKMQDGTEKEEDDDFFKQGRKQTEDRLQKALARVKSMVQYPEARDQYRRLLNVVNDIQESKVEKALENSEATCFDDDDDLIDIEALLEDDDTLMLPMSSSLWTS

SEQ ID NO: 24425 - protein, 1032 aa, Arabidopsis thaliana
  peptide (1)..(1032): Ceres Seq. ID no. 13491819
  misc_feature (464)..(551): Pfam Name: IPT/TIG domain Pfam Description: IPT/TIG domain
  misc_feature (781)..(1028): Homolog of NCBI NO: 20127124 NR Description: calmodulin-binding transcription activator
  misc_feature (370)..(770): Homolog of NCBI NO: 20127124 NR Description: calmodulin-binding transcription activator
  misc_feature (1)..(169): Homolog of NCBI NO: 15242417 NR Description: calmodulin-binding protein [Arabidopsis thaliana]
  misc_feature (766)..(1026): Homolog of NCBI NO: 15242417 NR Description: calmodulin-binding protein [Arabidopsis thaliana]
  misc_feature (370)..(770): Homolog of NCBI NO: 15242417 NR Description: calmodulin-binding protein [Arabidopsis thaliana]
  misc_feature (1)..(1030): Homolog of NCBI NO: 37991923 NR Description: putative calmodulin-binding transcription factor
  misc_feature (763)..(1022): Homolog of NCBI NO: 30697970 NR Description: calmodulin-binding protein [Arabidopsis thaliana]
  misc_feature (1)..(797): Homolog of NCBI NO: 30697970 NR Description: calmodulin-binding protein [Arabidopsis thaliana]
  misc_feature (2)..(1021): Homolog of NCBI NO: 37533660 NR Description: putative calmodulin binding protein similar to
  misc_feature (576)..(1032): Homolog of NCBI NO: 11545505 NR Description: calmodulin-binding protein [Arabidopsis thaliana]
MAEARRFSPVHELDVGQILSEARHRWLRPPEICEILQNYQRFQISTEPPTTPSSGSVFMFDRKVLRYFRKDGHNWRKKKDGKTVKEAHERLKAGSVDVLHCYYAHGQDNENFQRRSYWLLQEELSHIVFVHYLEVKGSRVSTSFNRMQRTEDAARSPQETGDALTSEHDGYASCSFNQNDHSNHSQTTDSASVNGFHSPELEDAESAYNQHGSSTAYSHQELQQPATGGNLTGFDPYYQISLTPRDSYQKELRTIPVTDSSIMVDKSKTINSPGVTNGLKNRKSIDSQTWEEILGNCGSGVEALPLQPNSEHEVLDQILESSFTMQDFASLQESMVKSQNQELNSGLTSDRTVWFQGQDMELNAISNLASNEKAPYLSTMKQHLLHGALGEEGLKKMDSFNRWMSKELGDVGVIADANESFTQSSSRTYWEEVESEDGSNGHNSRRDMDGYVMSPSLSKEQLFSINDFSPSWAYVGCEVVVFVTGKFLKTREETEIGEWSCMFGQTEVPADVISNGILQCVAPMHEAGRVPFYVTCSNRLACSEVREFEYKVAESQVFDREADDESTIDILEARFVKLLCSKSENTSPVSGNDSDLSQLSEKISLLLFENDDQLDQMLMNEISQENMKNNLLQEFLKESLHSWLLQKIAEGGKGPSVLDEGGQGVLHFAASLGYNWALEPTIIAGVSVDFRDVNGWTALHWAAFFGRERIIGSLIALGAAPGTLTDPNPDFPSGSTPSDLAYANGHKGIAGYLSEYALRAHVSLLSLNDKNAETVEMAPSPSSSSLTDSLTAVRNATQAAARIHQVFRAQSFQKKQLKEFGDKKLGMSEERALSMLAPKTHKSGRAHSDDSVQAAAIRIQNKFRGYKGRKDYLITRQRIIKIQAHVRGYQFRKNYRKIIWSVGVLEKVILRWRRKGAGLRGFKSEALVEKMQDGTEKEEDDDFFKQGRKQTEDRLQKALARVKSMVQYPEARDQYRRLLNVVNDIQESKVEKALENSEATCFDDDDDLIDIEALLEDDDTLMLPMSSSLWTS

SEQ ID NO: 24426 - protein, 974 aa, Arabidopsis thaliana
  peptide (1)..(974): Ceres Seq. ID no. 13491820
  misc_feature (406)..(493): Pfam Name: IPT/TIG domain Pfam Description: IPT/TIG domain
  misc_feature (723)..(970): Homolog of NCBI NO: 20127124 NR Description: calmodulin-binding transcription activator
  misc_feature (312)..(712): Homolog of NCBI NO: 20127124 NR Description: calmodulin-binding transcription activator
  misc_feature (1)..(111): Homolog of NCBI NO: 15242417 NR Description: calmodulin-binding protein [Arabidopsis thaliana]
  misc_feature (708)..(968): Homolog of NCBI NO: 15242417 NR Description: calmodulin-binding protein [Arabidopsis thaliana]
  misc_feature (312)..(712): Homolog of NCBI NO: 15242417 NR Description: calmodulin-binding protein [Arabidopsis thaliana]
  misc_feature (1)..(972): Homolog of NCBI NO: 37991923 NR Description: putative calmodulin-binding transcription factor
  misc_feature (705)..(964): Homolog of NCBI NO: 30697970 NR Description: calmodulin-binding protein [Arabidopsis thaliana]
  misc_feature (1)..(739): Homolog of NCBI NO: 30697970 NR Description: calmodulin-binding protein [Arabidopsis thaliana]
  misc_feature (1)..(963): Homolog of NCBI NO: 37533660 NR Description: putative calmodulin binding protein similar to
  misc_feature (518)..(974): Homolog of NCBI NO: 11545505 NR Description: calmodulin-binding protein [Arabidopsis thaliana]
MFDRKVLRYFRKDGHNWRKKKDGKTVKEAHERLKAGSVDVLHCYYAHGQDNENFQRRSYWLLQEELSHIVFVHYLEVKGSRVSTSFNRMQRTEDAARSPQETGDALTSEHDGYASCSFNQNDHSNHSQTTDSASVNGFHSPELEDAESAYNQHGSSTAYSHQELQQPATGGNLTGFDPYYQISLTPRDSYQKELRTIPVTDSSIMVDKSKTINSPGVTNGLKNRKSIDSQTWEEILGNCGSGVEALPLQPNSEHEVLDQILESSFTMQDFASLQESMVKSQNQELNSGLTSDRTVWFQGQDMELNAISNLASNEKAPYLSTMKQHLLHGALGEEGLKKMDSFNRWMSKELGDVGVIADANESFTQSSSRTYWEEVESEDGSNGHNSRRDMDGYVMSPSLSKEQLFSINDFSPSWAYVGCEVVVFVTGKFLKTREETEIGEWSCMFGQTEVPADVISNGILQCVAPMHEAGRVPFYVTCSNRLACSEVREFEYKVAESQVFDREADDESTIDILEARFVKLLCSKSENTSPVSGNDSDLSQLSEKISLLLFENDDQLDQMLMNEISQENMKNNLLQEFLKESLHSWLLQKIAEGGKGPSVLDEGGQGVLHFAASLGYNWALEPTIIAGVSVDFRDVNGWTALHWAAFFGRERIIGSLIALGAAPGTLTDPNPDFPSGSTPSDLAYANGHKGIAGYLSEYALRAHVSLLSLNDKNAETVEMAPSPSSSSLTDSLTAVRNATQAAARIHQVFRAQSFQKKQLKEFGDKKLGMSEERALSMLAPKTHKSGRAHSDDSVQAAAIRIQNKFRGYKGRKDYLITRQRIIKIQAHVRGYQFRKNYRKIIWSVGVLEKVILRWRRKGAGLRGFKSEALVEKMQDGTEKEEDDDFFKQGRKQTEDRLQKALARVKSMVQYPEARDQYRRLLNVVNDIQESKVEKALENSEATCFDDDDDLIDIEALLEDDDTLMLPMSSSLWTS

SEQ ID NO: 24427 - DNA, 1691 bp, Arabidopsis thaliana
  misc_feature (1)..(1691): Ceres Seq. ID no. 13486727
  misc_feature: MA Experiment ID: 108434 Result: Down-regulated in Transcription
  misc_feature: MA Experiment 108434 PARAMETER Experiment Name: At_Root_Tips_cDNA_P Parameter: Tissue Value: Root Tips
  misc_feature: MA Experiment ID: 108435 Result: Down-regulated in Transcription
  misc_feature: MA Experiment 108435 PARAMETER Experiment Name: At_stm_Mutants_cDNA_P Parameter: Plant Line Value: wt Landsburg vs stm
  misc_feature: MA Experiment 108435 PARAMETER Experiment Name: At_stm_Mutants_cDNA_P Parameter: Tissue Value: Shoot Apical Meristem Region
  misc_feature: MA Experiment ID: 108461 Result: Up-regulated in Transcription
  misc_feature: MA Experiment 108461 PARAMETER Experiment Name: At_Germinating_Seeds_cDNA_P Parameter: Age (day) Value: 1 vs. 0
  misc_feature: MA Experiment 108461 PARAMETER Experiment Name: At_Germinating_Seeds_cDNA_P Parameter: Tissue Value: Germinating Seeds
  misc_feature: MA Experiment ID: 108462 Result: Up-regulated in Transcription
  misc_feature: MA Experiment 108462 PARAMETER Experiment Name: At_Germinating_Seeds_cDNA_P Parameter: Age (day) Value: 2 vs. 0
  misc_feature: MA Experiment 108462 PARAMETER Experiment Name: At_Germinating_Seeds_cDNA_P Parameter: Tissue Value: Germinating Seeds
  misc_feature: MA Experiment ID: 108463 Result: Up-regulated in Transcription
  misc_feature: MA Experiment 108463 PARAMETER Experiment Name: At_Germinating_Seeds_cDNA_P Parameter: Age (day) Value: 3 vs. 0
  misc_feature: MA Experiment 108463 PARAMETER Experiment Name: At_Germinating_Seeds_cDNA_P Parameter: Tissue Value: Germinating Seeds
  misc_feature: MA Experiment ID: 108464 Result: Up-regulated in Transcription
  misc_feature: MA Experiment 108464 PARAMETER Experiment Name: At_Germinating_Seeds_cDNA_P Parameter: Age (day) Value: 4 vs. 0
  misc_feature: MA Experiment 108464 PARAMETER Experiment Name: At_Germinating_Seeds_cDNA_P Parameter: Tissue Value: Germinating Seeds
  misc_feature: MA Experiment ID: 108469 Result: Up-regulated in Transcription
  misc_feature: MA Experiment ID: 108473 Result: Up-regulated in Transcription
  misc_feature: MA Experiment 108473 PARAMETER Experiment Name: At_Drought_Flowers_cDNA_P Parameter: Timepoint (hr) Value: 7 d
  misc_feature: MA Experiment 108473 PARAMETER Experiment Name: At_Drought_Flowers_cDNA_P Parameter: Tissue Value: Flower
  misc_feature: MA Experiment 108473 PARAMETER Experiment Name: At_Drought_Flowers_cDNA_P Parameter: Treatment Value: Drought vs. No Drought
  misc_feature: MA Experiment ID: 108488 Result: Down-regulated in Transcription
  misc_feature: MA Experiment ID: 108501 Result: Down-regulated in Transcription
  misc_feature: MA Experiment 108501 PARAMETER Experiment Name: At_ap2_floral_buds_cDNA_P Parameter: Plant Line Value: ap2 (Ler.)
  misc_feature: MA Experiment 108501 PARAMETER Experiment Name: At_ap2_floral_buds_cDNA_P Parameter: Tissue Value: Closed Flower
  misc_feature: MA Experiment ID: 108561 Result: Up-regulated in Transcription
  misc_feature: MA Experiment 108561 PARAMETER Experiment Name: At_100uM_ABA_cDNA_P Parameter: Timepoint (hr) Value: 6
  misc_feature: MA Experiment 108561 PARAMETER Experiment Name: At_100uM_ABA_cDNA_P Parameter: Tissue Value: Aerial
  misc_feature: MA Experiment 108561 PARAMETER Experiment Name: At_100uM_ABA_cDNA_P Parameter: Treatment Value: 100uM ABA vs. No Treatment
  misc_feature: MA Experiment ID: 108572 Result: Up-regulated in Transcription
  misc_feature: MA Experiment 108572 PARAMETER Experiment Name: At_Drought_cDNA_P Parameter: Timepoint (hr) Value: 1
  misc_feature: MA Experiment 108572 PARAMETER Experiment Name: At_Drought_cDNA_P Parameter: Tissue Value: Aerial
  misc_feature: MA Experiment 108572 PARAMETER Experiment Name: At_Drought_cDNA_P Parameter: Treatment Value: Drought vs. No Drought
  misc_feature: MA Experiment ID: 108573 Result: Up-regulated in Transcription
  misc_feature: MA Experiment 108573 PARAMETER Experiment Name: At_Drought_cDNA_P Parameter: Timepoint (hr) Value: 6
  misc_feature: MA Experiment 108573 PARAMETER Experiment Name: At_Drought_cDNA_P Parameter: Tissue Value: Aerial
  misc_feature: MA Experiment 108573 PARAMETER Experiment Name: At_Drought_cDNA_P Parameter: Treatment Value: Drought vs. No Drought
  misc_feature: MA Experiment ID: 108574 Result: Up-regulated in Transcription
  misc_feature: MA Experiment 108574 PARAMETER Experiment Name: At_Wounding__cDNA_P Parameter: Timepoint (hr) Value: 1
  misc_feature: MA Experiment 108574 PARAMETER Experiment Name: At_Wounding__cDNA_P Parameter: Tissue Value: Aerial
  misc_feature: MA Experiment 108574 PARAMETER Experiment Name: At_Wounding__cDNA_P Parameter: Treatment Value: Wounding vs. No Wounding
  misc_feature: MA Experiment ID: 108585 Result: Up-regulated in Transcription
  misc_feature: MA Experiment 108585 PARAMETER Experiment Name: At_5mM_NaNP_cDNA_P Parameter: Timepoint (hr) Value: 6
  misc_feature: MA Experiment 108585 PARAMETER Experiment Name: At_5mM_NaNP_cDNA_P Parameter: Tissue Value: Aerial
  misc_feature: MA Experiment 108585 PARAMETER Experiment Name: At_5mM_NaNP_cDNA_P Parameter: Treatment Value: null
  misc_feature: MA Experiment ID: 108595 Result: Up-regulated in Transcription
  misc_feature: MA Experiment 108595 PARAMETER Experiment Name: At_Ler-pi_Ovule_cDNA_P Parameter: Plant Line Value: null
  misc_feature: MA Experiment ID: 108605 Result: Up-regulated in Transcription
  misc_feature: MA Experiment 108605 PARAMETER Experiment Name: At_100uM_ABA_cDNA_P Parameter: Timepoint (hr) Value: 6
  misc_feature: MA Experiment 108605 PARAMETER Experiment Name: At_100uM_ABA_cDNA_P Parameter: Tissue Value: Aerial
  misc_feature: MA Experiment 108605 PARAMETER Experiment Name: At_100uM_ABA_cDNA_P Parameter: Treatment Value: 100uM ABA vs. No Treatment
  misc_feature: MA Experiment ID: 108607 Result: Up-regulated in Transcription
  misc_feature: MA Experiment 108607 PARAMETER Experiment Name: At_100uM_ABA_cDNA_P Parameter: Timepoint (hr) Value: 4
  misc_feature: MA Experiment 108607 PARAMETER Experiment Name: At_100uM_ABA_cDNA_P Parameter: Tissue Value: Aerial
  misc_feature: MA Experiment 108607 PARAMETER Experiment Name: At_100uM_ABA_cDNA_P Parameter: Treatment Value: 100uM ABA vs. No Treatment
  misc_feature: MA Experiment ID: 108608 Result: Up-regulated in Transcription
  misc_feature: MA Experiment 108608 PARAMETER Experiment Name: At_100uM_ABA_cDNA_P Parameter: Timepoint (hr) Value: 1
  misc_feature: MA Experiment 108608 PARAMETER Experiment Name: At_100uM_ABA_cDNA_P Parameter: Tissue Value: Aerial
  misc_feature: MA Experiment 108608 PARAMETER Experiment Name: At_100uM_ABA_cDNA_P Parameter: Treatment Value: 100uM ABA vs. No Treatment
  misc_feature: MA Experiment ID: 108609 Result: Up-regulated in Transcription
  misc_feature: MA Experiment 108609 PARAMETER Experiment Name: At_100uM_ABA_cDNA_P Parameter: Timepoint (hr) Value: 24
  misc_feature: MA Experiment 108609 PARAMETER Experiment Name: At_100uM_ABA_cDNA_P Parameter: Tissue Value: Aerial
  misc_feature: MA Experiment 108609 PARAMETER Experiment Name: At_100uM_ABA_cDNA_P Parameter: Treatment Value: 100uM ABA vs. No Treatment
  misc_feature: MA Experiment ID: 108668 Result: Up-regulated in Transcription
  misc_feature: MA Experiment 108668 PARAMETER Experiment Name: At_2mM_SA_cDNA_P Parameter: Plant Line Value: WS
  misc_feature: MA Experiment 108668 PARAMETER Experiment Name: At_2mM_SA_cDNA_P Parameter: Timepoint (hr) Value: 6
  misc_feature: MA Experiment 108668 PARAMETER Experiment Name: At_2mM_SA_cDNA_P Parameter: Treatment Value: 2mM SA vs. No Treatment
  misc_feature: MA Experiment ID: 20000068 Result: Down-regulated in Transcription
  misc_feature: MA Experiment ID: 20000069 Result: Up-regulated in Transcription
  misc_feature: MA Experiment 20000069 PARAMETER Experiment Name: At_100uM_ABA_Mutants_cDNA_P Parameter: Plant Line Value: CS23
  misc_feature: MA Experiment 20000069 PARAMETER Experiment Name: At_100uM_ABA_Mutants_cDNA_P Parameter: Timepoint (hr) Value: 6
  misc_feature: MA Experiment 20000069 PARAMETER Experiment Name: At_100uM_ABA_Mutants_cDNA_P Parameter: Tissue Value: Aerial
  misc_feature: MA Experiment 20000069 PARAMETER Experiment Name: At_100uM_ABA_Mutants_cDNA_P Parameter: Treatment Value: 100uM ABA vs. No Treatment
  misc_feature: MA Experiment ID: 20000070 Result: Up-regulated in Transcription
  misc_feature: MA Experiment 20000070 PARAMETER Experiment Name: At_100uM_ABA_Mutants_cDNA_P Parameter: Plant Line Value: CS24
  misc_feature: MA Experiment 20000070 PARAMETER Experiment Name: At_100uM_ABA_Mutants_cDNA_P Parameter: Timepoint (hr) Value: 6
  misc_feature: MA Experiment 20000070 PARAMETER Experiment Name: At_100uM_ABA_Mutants_cDNA_P Parameter: Tissue Value: Aerial
  misc_feature: MA Experiment 20000070 PARAMETER Experiment Name: At_100uM_ABA_Mutants_cDNA_P Parameter: Treatment Value: 100uM ABA vs. No Treatment
  misc_feature: MA Experiment ID: 20000071 Result: Up-regulated in Transcription
  misc_feature: MA Experiment 20000071 PARAMETER Experiment Name: At_100uM_ABA_Mutants_cDNA_P Parameter: Plant Line Value: CS8104
  misc_feature: MA Experiment 20000071 PARAMETER Experiment Name: At_100uM_ABA_Mutants_cDNA_P Parameter: Timepoint (hr) Value: 6
  misc_feature: MA Experiment 20000071 PARAMETER Experiment Name: At_100uM_ABA_Mutants_cDNA_P Parameter: Tissue Value: Aerial
  misc_feature: MA Experiment 20000071 PARAMETER Experiment Name: At_100uM_ABA_Mutants_cDNA_P Parameter: Treatment Value: 100uM ABA vs. No Treatment
  misc_feature: MA Experiment ID: 20000072 Result: Up-regulated in Transcription
  misc_feature: MA Experiment 20000072 PARAMETER Experiment Name: At_100uM_ABA_Mutants_cDNA_P Parameter: Plant Line Value: CS8105
  misc_feature: MA Experiment 20000072 PARAMETER Experiment Name: At_100uM_ABA_Mutants_cDNA_P Parameter: Timepoint (hr) Value: 6
  misc_feature: MA Experiment 20000072 PARAMETER Experiment Name: At_100uM_ABA_Mutants_cDNA_P Parameter: Tissue Value: Aerial
  misc_feature: MA Experiment 20000072 PARAMETER Experiment Name: At_100uM_ABA_Mutants_cDNA_P Parameter: Treatment Value: 100uM ABA vs. No Treatment
  misc_feature: MA Experiment ID: 20000086 Result: Up-regulated in Transcription
  misc_feature: MA Experiment 20000086 PARAMETER Experiment Name: At_100uM_ABA_Mutants_cDNA_P Parameter: Plant Line Value: CS22
  misc_feature: MA Experiment 20000086 PARAMETER Experiment Name: At_100uM_ABA_Mutants_cDNA_P Parameter: Timepoint (hr) Value: 6
  misc_feature: MA Experiment 20000086 PARAMETER Experiment Name: At_100uM_ABA_Mutants_cDNA_P Parameter: Tissue Value: Aerial
  misc_feature: MA Experiment 20000086 PARAMETER Experiment Name: At_100uM_ABA_Mutants_cDNA_P Parameter: Treatment Value: 100uM ABA vs. No Treatment
  misc_feature: MA Experiment ID: 20000087 Result: Up-regulated in Transcription
  misc_feature: MA Experiment 20000087 PARAMETER Experiment Name: At_100uM_ABA_Mutants_cDNA_P Parameter: Plant Line Value: WS
  misc_feature: MA Experiment 20000087 PARAMETER Experiment Name: At_100uM_ABA_Mutants_cDNA_P Parameter: Timepoint (hr) Value: 6
  misc_feature: MA Experiment 20000087 PARAMETER Experiment Name: At_100uM_ABA_Mutants_cDNA_P Parameter: Tissue Value: Aerial
  misc_feature: MA Experiment 20000087 PARAMETER Experiment Name: At_100uM_ABA_Mutants_cDNA_P Parameter: Treatment Value: 100uM ABA vs. No Treatment
  misc_feature: MA Experiment ID: 20000088 Result: Up-regulated in Transcription
  misc_feature: MA Experiment 20000088 PARAMETER Experiment Name: At_100uM_ABA_Mutants_cDNA_P Parameter: Plant Line Value: Landsberg
  misc_feature: MA Experiment 20000088 PARAMETER Experiment Name: At_100uM_ABA_Mutants_cDNA_P Parameter: Timepoint (hr) Value: 6
  misc_feature: MA Experiment 20000088 PARAMETER Experiment Name: At_100uM_ABA_Mutants_cDNA_P Parameter: Tissue Value: Aerial
  misc_feature: MA Experiment 20000088 PARAMETER Experiment Name: At_100uM_ABA_Mutants_cDNA_P Parameter: Treatment Value: 100uM ABA vs. No Treatment
  misc_feature: MA Experiment ID: 20000089 Result: Up-regulated in Transcription
  misc_feature: MA Experiment ID: 20000113 Result: Up-regulated in Transcription
  misc_feature: MA Experiment 20000113 PARAMETER Experiment Name: At_42deg_Heat_cDNA_P Parameter: Temperature (deg C) Value: 42 vs. 22
  misc_feature: MA Experiment 20000113 PARAMETER Experiment Name: At_42deg_Heat_cDNA_P Parameter: Timepoint (hr) Value: 8
  misc_feature: MA Experiment 20000113 PARAMETER Experiment Name: At_42deg_Heat_cDNA_P Parameter: Tissue Value: Aerial
  misc_feature: MA Experiment ID: 20000117 Result: Up-regulated in Transcription
  misc_feature: MA Experiment 20000117 PARAMETER Experiment Name: At_100uM_ABA_Mutants_cDNA_P Parameter: Plant Line Value: Columbia
  misc_feature: MA Experiment 20000117 PARAMETER Experiment Name: At_100uM_ABA_Mutants_cDNA_P Parameter: Timepoint (hr) Value: 6
  misc_feature: MA Experiment 20000117 PARAMETER Experiment Name: At_100uM_ABA_Mutants_cDNA_P Parameter: Tissue Value: Aerial
  misc_feature: MA Experiment 20000117 PARAMETER Experiment Name: At_100uM_ABA_Mutants_cDNA_P Parameter: Treatment Value: 100uM ABA vs. No Treatment
  misc_feature: MA Experiment ID: 20000166 Result: Up-regulated in Transcription
  misc_feature: MA Experiment 20000166 PARAMETER Experiment Name: At_100uM_ABA_P Parameter: Age (day) Value: 14
  misc_feature: MA Experiment 20000166 PARAMETER Experiment Name: At_100uM_ABA_P Parameter: Organism Value: A. thaliana
  misc_feature: MA Experiment 20000166 PARAMETER Experiment Name: At_100uM_ABA_P Parameter: Plant Line Value: WS
  misc_feature: MA Experiment 20000166 PARAMETER Experiment Name: At_100uM_ABA_P Parameter: Timepoint (hr) Value: 1
  misc_feature: MA Experiment 20000166 PARAMETER Experiment Name: At_100uM_ABA_P Parameter: Tissue Value: Aerial
  misc_feature: MA Experiment 20000166 PARAMETER Experiment Name: At_100uM_ABA_P Parameter: Treatment Value: 100uM ABA vs. No Treatment
  misc_feature: MA Experiment ID: 20000169 Result: Up-regulated in Transcription
  misc_feature: MA Experiment 20000169 PARAMETER Experiment Name: At_100uM_ABA_P Parameter: Age (day) Value: 14
  misc_feature: MA Experiment 20000169 PARAMETER Experiment Name: At_100uM_ABA_P Parameter: Organism Value: A. thaliana
  misc_feature: MA Experiment 20000169 PARAMETER Experiment Name: At_100uM_ABA_P Parameter: Plant Line Value: WS
  misc_feature: MA Experiment 20000169 PARAMETER Experiment Name: At_100uM_ABA_P Parameter: Timepoint (hr) Value: 6
  misc_feature: MA Experiment 20000169 PARAMETER Experiment Name: At_100uM_ABA_P Parameter: Tissue Value: Aerial
  misc_feature: MA Experiment 20000169 PARAMETER Experiment Name: At_100uM_ABA_P Parameter: Treatment Value: 100uM ABA vs. No Treatment
  misc_feature: MA Experiment ID: 20000179 Result: Up-regulated in Transcription
  misc_feature: MA Experiment 20000179 PARAMETER Experiment Name: At_Germinating_Seeds_P Parameter: Age (hr) Value: 6 vs. 0
  misc_feature: MA Experiment 20000179 PARAMETER Experiment Name: At_Germinating_Seeds_P Parameter: Tissue Value: Germinating Seeds
  misc_feature: MA Experiment ID: 20000180 Result: Up-regulated in Transcription
  misc_feature: MA Experiment 20000180 PARAMETER Experiment Name: At_Germinating_Seeds_P Parameter: Age (hr) Value: 24 vs. 0
  misc_feature: MA Experiment 20000180 PARAMETER Experiment Name: At_Germinating_Seeds_P Parameter: Tissue Value: Germinating Seeds
  misc_feature: MA Experiment ID: 20000182 Result: Up-regulated in Transcription
  misc_feature: MA Experiment 20000182 PARAMETER Experiment Name: At_2mM_SA_P Parameter: Age (day) Value: 14
  misc_feature: MA Experiment 20000182 PARAMETER Experiment Name: At_2mM_SA_P Parameter: Organism Value: A. thaliana
  misc_feature: MA Experiment 20000182 PARAMETER Experiment Name: At_2mM_SA_P Parameter: Plant Line Value: WS
  misc_feature: MA Experiment 20000182 PARAMETER Experiment Name: At_2mM_SA_P Parameter: Timepoint (hr) Value: 6
  misc_feature: MA Experiment 20000182 PARAMETER Experiment Name: At_2mM_SA_P Parameter: Tissue Value: Aerial
  misc_feature: MA Experiment 20000182 PARAMETER Experiment Name: At_2mM_SA_P Parameter: Treatment Value: 2mM SA vs. No Treatment
  misc_feature: MA Experiment ID: 20000213 Result: Down-regulated in Transcription
  misc_feature: MA Experiment 20000213 PARAMETER Experiment Name: At_4deg_Cold_P Parameter: Timepoint (hr) Value: 2
  misc_feature: MA Experiment ID: 20000234 Result: Down-regulated in Transcription
  misc_feature: MA Experiment 20000234 PARAMETER Experiment Name: At_Siliques_P Parameter: Age (day) Value: 21
  misc_feature: MA Experiment 20000234 PARAMETER Experiment Name: At_Siliques_P Parameter: Organism Value: A. thaliana
  misc_feature: MA Experiment 20000234 PARAMETER Experiment Name: At_Siliques_P Parameter: Plant Line Value: WS
  misc_feature: MA Experiment 20000234 PARAMETER Experiment Name: At_Siliques_P Parameter: Tissue Value: Less Than 5mm Siliques vs. Whole Plant
  misc_feature: MA Experiment ID: 20000235 Result: Down-regulated in Transcription
  misc_feature: MA Experiment 20000235 PARAMETER Experiment Name: At_Siliques_P Parameter: Age (day) Value: 21
  misc_feature: MA Experiment 20000235 PARAMETER Experiment Name: At_Siliques_P Parameter: Organism Value: A. thaliana
  misc_feature: MA Experiment 20000235 PARAMETER Experiment Name: At_Siliques_P Parameter: Plant Line Value: WS
  misc_feature: MA Experiment 20000235 PARAMETER Experiment Name: At_Siliques_P Parameter: Tissue Value: 5-10mm Siliques vs. Whole Plant
  misc_feature: MA Experiment ID: 20000264 Result: Down-regulated in Transcription
  misc_feature: MA Experiment 20000264 PARAMETER Experiment Name: At_Open_Flower_P Parameter: Age (day) Value: 21
  misc_feature: MA Experiment 20000264 PARAMETER Experiment Name: At_Open_Flower_P Parameter: Plant Line Value: WS
  misc_feature: MA Experiment 20000264 PARAMETER Experiment Name: At_Open_Flower_P Parameter: Tissue Value: Open Flower vs. Whole Plant
  misc_feature: MA Experiment ID: 20000265 Result: Down-regulated in Transcription
  misc_feature: MA Experiment 20000265 PARAMETER Experiment Name: At_Open_Flower_P Parameter: Age (day) Value: 21
  misc_feature: MA Experiment 20000265 PARAMETER Experiment Name: At_Open_Flower_P Parameter: Plant Line Value: WS
  misc_feature: MA Experiment 20000265 PARAMETER Experiment Name: At_Open_Flower_P Parameter: Tissue Value: Closed Flower vs. Whole Plant
  misc_feature: MA Experiment ID: 20000267 Result: Up-regulated in Transcription
  misc_feature: MA Experiment 20000267 PARAMETER Experiment Name: At_Drought_P Parameter: Age (day) Value: 7
  misc_feature: MA Experiment 20000267 PARAMETER Experiment Name: At_Drought_P Parameter: Organism Value: A. thaliana
  misc_feature: MA Experiment 20000267 PARAMETER Experiment Name: At_Drought_P Parameter: Plant Line Value: WS
  misc_feature: MA Experiment 20000267 PARAMETER Experiment Name: At_Drought_P Parameter: Timepoint (hr) Value: 6
  misc_feature: MA Experiment 20000267 PARAMETER Experiment Name: At_Drought_P Parameter: Tissue Value: Whole Plant
  misc_feature: MA Experiment 20000267 PARAMETER Experiment Name: At_Drought_P Parameter: Treatment Value: Drought vs. No Drought
  misc_feature: MA Experiment ID: 20000268 Result: Up-regulated in Transcription
  misc_feature: MA Experiment 20000268 PARAMETER Experiment Name: At_100mM_NaCl__P Parameter: Age (day) Value: 14
  misc_feature: MA Experiment 20000268 PARAMETER Experiment Name: At_100mM_NaCl__P Parameter: Organism Value: A. thaliana
  misc_feature: MA Experiment 20000268 PARAMETER Experiment Name: At_100mM_NaCl__P Parameter: Plant Line Value: WS
  misc_feature: MA Experiment 20000268 PARAMETER Experiment Name: At_100mM_NaCl__P Parameter: Timepoint (hr) Value: 6
  misc_feature: MA Experiment 20000268 PARAMETER Experiment Name: At_100mM_NaCl__P Parameter: Tissue Value: Whole Plant
  misc_feature: MA Experiment 20000268 PARAMETER Experiment Name: At_100mM_NaCl__P Parameter: Treatment Value: 100mM NaCl vs. No Treatment
  misc_feature: MA Experiment ID: 20000269 Result: Down-regulated in Transcription
  misc_feature: MA Experiment 20000269 PARAMETER Experiment Name: At_1mM_KNO3_L-vs-H_Roots_P Parameter: Age (day) Value: 7,10,12
  misc_feature: MA Experiment 20000269 PARAMETER Experiment Name: At_1mM_KNO3_L-vs-H_Roots_P Parameter: Organism Value: A. thaliana
  misc_feature: MA Experiment 20000269 PARAMETER Experiment Name: At_1mM_KNO3_L-vs-H_Roots_P Parameter: Plant Line Value: WS
  misc_feature: MA Experiment 20000269 PARAMETER Experiment Name: At_1mM_KNO3_L-vs-H_Roots_P Parameter: Timepoint (day) Value: 7,10,12
  misc_feature: MA Experiment 20000269 PARAMETER Experiment Name: At_1mM_KNO3_L-vs-H_Roots_P Parameter: Tissue Value: Roots
  misc_feature: MA Experiment 20000269 PARAMETER Experiment Name: At_1mM_KNO3_L-vs-H_Roots_P Parameter: Treatment Value: 1mM KNO3 vs. 50mM KNO3
  misc_feature: MA Experiment ID: 20000286 Result: Down-regulated in Transcription
  misc_feature: MA Experiment 20000286 PARAMETER Experiment Name: At_Open_Flower_P Parameter: Age (day) Value: 21
  misc_feature: MA Experiment 20000286 PARAMETER Experiment Name: At_Open_Flower_P Parameter: Plant Line Value: WS
  misc_feature: MA Experiment 20000286 PARAMETER Experiment Name: At_Open_Flower_P Parameter: Tissue Value: Half Open vs. Whole Plant
  misc_feature: MA Experiment ID: 20000436 Result: Up-regulated in Transcription
  misc_feature: MA Experiment 20000436 PARAMETER Experiment Name: At_Drought_P Parameter: Age (day) Value: 7
  misc_feature: MA Experiment 20000436 PARAMETER Experiment Name: At_Drought_P Parameter: Organism Value: A. thaliana
  misc_feature: MA Experiment 20000436 PARAMETER Experiment Name: At_Drought_P Parameter: Plant Line Value: WS
  misc_feature: MA Experiment 20000436 PARAMETER Experiment Name: At_Drought_P Parameter: Timepoint (hr) Value: 12
  misc_feature: MA Experiment 20000436 PARAMETER Experiment Name: At_Drought_P Parameter: Tissue Value: Whole Plant
  misc_feature: MA Experiment 20000436 PARAMETER Experiment Name: At_Drought_P Parameter: Treatment Value: Drought vs. No Drought
  misc_feature: MA Experiment ID: 20000437 Result: Up-regulated in Transcription
  misc_feature: MA Experiment 20000437 PARAMETER Experiment Name: At_Drought_P Parameter: Age (day) Value: 8
  misc_feature: MA Experiment 20000437 PARAMETER Experiment Name: At_Drought_P Parameter: Organism Value: A. thaliana
  misc_feature: MA Experiment 20000437 PARAMETER Experiment Name: At_Drought_P Parameter: Plant Line Value: WS
  misc_feature: MA Experiment 20000437 PARAMETER Experiment Name: At_Drought_P Parameter: Timepoint (hr) Value: 24
  misc_feature: MA Experiment 20000437 PARAMETER Experiment Name: At_Drought_P Parameter: Tissue Value: Whole Plant
  misc_feature: MA Experiment 20000437 PARAMETER Experiment Name: At_Drought_P Parameter: Treatment Value: Drought vs. No Drought
  misc_feature: MA Experiment ID: 20000453 Result: Up-regulated in Transcription
  misc_feature: MA Experiment 20000453 PARAMETER Experiment Name: At_100uM_ABA_P Parameter: Age (day) Value: 15
  misc_feature: MA Experiment 20000453 PARAMETER Experiment Name: At_100uM_ABA_P Parameter: Organism Value: A. thaliana
  misc_feature: MA Experiment 20000453 PARAMETER Experiment Name: At_100uM_ABA_P Parameter: Plant Line Value: WS
  misc_feature: MA Experiment 20000453 PARAMETER Experiment Name: At_100uM_ABA_P Parameter: Timepoint (hr) Value: 24
  misc_feature: MA Experiment 20000453 PARAMETER Experiment Name: At_100uM_ABA_P Parameter: Tissue Value: Aerial
  misc_feature: MA Experiment 20000453 PARAMETER Experiment Name: At_100uM_ABA_P Parameter: Treatment Value: 100uM ABA vs. No Treatment
  misc_feature: MA Experiment ID: 20000460 Result: Up-regulated in Transcription
  misc_feature: MA Experiment 20000460 PARAMETER Experiment Name: At_10percent_PEG_P Parameter: Age (day) Value: 12
  misc_feature: MA Experiment 20000460 PARAMETER Experiment Name: At_10percent_PEG_P Parameter: Organism Value: A. thaliana
  misc_feature: MA Experiment 20000460 PARAMETER Experiment Name: At_10percent_PEG_P Parameter: Plant Line Value: WS
  misc_feature: MA Experiment 20000460 PARAMETER Experiment Name: At_10percent_PEG_P Parameter: Timepoint (day) Value: 12
  misc_feature: MA Experiment 20000460 PARAMETER Experiment Name: At_10percent_PEG_P Parameter: Tissue Value: Whole Plant
  misc_feature: MA Experiment 20000460 PARAMETER Experiment Name: At_10percent_PEG_P Parameter: Treatment Value: 10percent PEG vs. No Treatment
  misc_feature: MA Experiment ID: 20001247 Result: Up-regulated in Transcription
  misc_feature: MA Experiment 20001247 PARAMETER Experiment Name: At_Far-red-induction_P Parameter: Age (day) Value: 7
  misc_feature: MA Experiment 20001247 PARAMETER Experiment Name: At_Far-red-induction_P Parameter: Light Value: Far-red vs. White
  misc_feature: MA Experiment 20001247 PARAMETER Experiment Name: At_Far-red-induction_P Parameter: Organism Value: A. thaliana
  misc_feature: MA Experiment 20001247 PARAMETER Experiment Name: At_Far-red-induction_P Parameter: Plant Line Value: Columbia
  misc_feature: MA Experiment 20001247 PARAMETER Experiment Name: At_Far-red-induction_P Parameter: Timepoint (hr) Value: 1
  misc_feature: MA Experiment 20001247 PARAMETER Experiment Name: At_Far-red-induction_P Parameter: Tissue Value: Whole Plant
  misc_feature: MA Experiment ID: 20001248 Result: Up-regulated in Transcription
  misc_feature: MA Experiment 20001248 PARAMETER Experiment Name: At_Far-red-induction_P Parameter: Age (day) Value: 7
  misc_feature: MA Experiment 20001248 PARAMETER Experiment Name: At_Far-red-induction_P Parameter: Light Value: Far-red vs. White
  misc_feature: MA Experiment 20001248 PARAMETER Experiment Name: At_Far-red-induction_P Parameter: Organism Value: A. thaliana
  misc_feature: MA Experiment 20001248 PARAMETER Experiment Name: At_Far-red-induction_P Parameter: Plant Line Value: Columbia
  misc_feature: MA Experiment 20001248 PARAMETER Experiment Name: At_Far-red-induction_P Parameter: Timepoint (hr) Value: 4
  misc_feature: MA Experiment 20001248 PARAMETER Experiment Name: At_Far-red-induction_P Parameter: Tissue Value: Whole Plant
  misc_feature: MA Experiment ID: 20001450 Result: Up-regulated in Transcription
  misc_feature: MA Experiment 20001450 PARAMETER Experiment Name: At_Far-red-induction_P Parameter: Age (day) Value: 7
  misc_feature: MA Experiment 20001450 PARAMETER Experiment Name: At_Far-red-induction_P Parameter: Light Value: Far-red vs. White
  misc_feature: MA Experiment 20001450 PARAMETER Experiment Name: At_Far-red-induction_P Parameter: Organism Value: A. thaliana
  misc_feature: MA Experiment 20001450 PARAMETER Experiment Name: At_Far-red-induction_P Parameter: Plant Line Value: Columbia
  misc_feature: MA Experiment 20001450 PARAMETER Experiment Name: At_Far-red-induction_P Parameter: Timepoint (hr) Value: 8
  misc_feature: MA Experiment 20001450 PARAMETER Experiment Name: At_Far-red-induction_P Parameter: Tissue Value: Whole Plant
  misc_feature: MA Experiment ID: 20001451 Result: Up-regulated in Transcription
  misc_feature: MA Experiment 20001451 PARAMETER Experiment Name: At_Far-red-induction_P Parameter: Age (day) Value: 7
  misc_feature: MA Experiment 20001451 PARAMETER Experiment Name: At_Far-red-induction_P Parameter: Light Value: Far-red vs. White
  misc_feature: MA Experiment 20001451 PARAMETER Experiment Name: At_Far-red-induction_P Parameter: Organism Value: A. thaliana
  misc_feature: MA Experiment 20001451 PARAMETER Experiment Name: At_Far-red-induction_P Parameter: Plant Line Value: Columbia
  misc_feature: MA Experiment 20001451 PARAMETER Experiment Name: At_Far-red-induction_P Parameter: Timepoint (hr) Value: 24
  misc_feature: MA Experiment 20001451 PARAMETER Experiment Name: At_Far-red-induction_P Parameter: Tissue Value: Whole Plant
  misc_feature: MA Experiment ID: 20001554 Result: Up-regulated in Transcription
  misc_feature: MA Experiment 20001554 PARAMETER Experiment Name: At_Drought_Soil_Dry_P Parameter: Age (day) Value: 21
  misc_feature: MA Experiment 20001554 PARAMETER Experiment Name: At_Drought_Soil_Dry_P Parameter: Organism Value: A. thaliana
  misc_feature: MA Experiment 20001554 PARAMETER Experiment Name: At_Drought_Soil_Dry_P Parameter: Plant Line Value: WS
  misc_feature: MA Experiment 20001554 PARAMETER Experiment Name: At_Drought_Soil_Dry_P Parameter: Post Timepoint (hr) Value: None
  misc_feature: MA Experiment 20001554 PARAMETER Experiment Name: At_Drought_Soil_Dry_P Parameter: Post-Treatment Value: None
  misc_feature: MA Experiment 20001554 PARAMETER Experiment Name: At_Drought_Soil_Dry_P Parameter: Timepoint (day) Value: 7
  misc_feature: MA Experiment 20001554 PARAMETER Experiment Name: At_Drought_Soil_Dry_P Parameter: Treatment Value: Drought vs. No Drought
  misc_feature: MA Experiment ID: 20001555 Result: Up-regulated in Transcription
  misc_feature: MA Experiment 20001555 PARAMETER Experiment Name: At_Drought_Soil_Dry_P Parameter: Age (day) Value: 24
  misc_feature: MA Experiment 20001555 PARAMETER Experiment Name: At_Drought_Soil_Dry_P Parameter: Organism Value: A. thaliana
  misc_feature: MA Experiment 20001555 PARAMETER Experiment Name: At_Drought_Soil_Dry_P Parameter: Plant Line Value: WS
  misc_feature: MA Experiment 20001555 PARAMETER Experiment Name: At_Drought_Soil_Dry_P Parameter: Post Timepoint (hr) Value: None
  misc_feature: MA Experiment 20001555 PARAMETER Experiment Name: At_Drought_Soil_Dry_P Parameter: Post-Treatment Value: None
  misc_feature: MA Experiment 20001555 PARAMETER Experiment Name: At_Drought_Soil_Dry_P Parameter: Timepoint (day) Value: 10
  misc_feature: MA Experiment 20001555 PARAMETER Experiment Name: At_Drought_Soil_Dry_P Parameter: Treatment Value: Drought vs. No Drought
  misc_feature: MA Experiment ID: 20001559 Result: Up-regulated in Transcription
  misc_feature: MA Experiment 20001559 PARAMETER Experiment Name: At_Drought_Soil_Dry_P Parameter: Age (day) Value: 28
  misc_feature: MA Experiment 20001559 PARAMETER Experiment Name: At_Drought_Soil_Dry_P Parameter: Organism Value: A. thaliana
  misc_feature: MA Experiment 20001559 PARAMETER Experiment Name: At_Drought_Soil_Dry_P Parameter: Plant Line Value: WS
  misc_feature: MA Experiment 20001559 PARAMETER Experiment Name: At_Drought_Soil_Dry_P Parameter: Post Timepoint (hr) Value: 29
  misc_feature: MA Experiment 20001559 PARAMETER Experiment Name: At_Drought_Soil_Dry_P Parameter: Post-Treatment Value: Re-Water vs. No Drought
  misc_feature: MA Experiment 20001559 PARAMETER Experiment Name: At_Drought_Soil_Dry_P Parameter: Timepoint (day) Value: 14
  misc_feature: MA Experiment 20001559 PARAMETER Experiment Name: At_Drought_Soil_Dry_P Parameter: Treatment Value: Drought vs. No Drought
  misc_feature: MA Experiment ID: 20001904 Result: Up-regulated in Transcription
  misc_feature: MA Experiment 20001904 PARAMETER Experiment Name: At_Drought_Reproduction_P Parameter: Age (day) Value: 37
  misc_feature: MA Experiment 20001904 PARAMETER Experiment Name: At_Drought_Reproduction_P Parameter: Organism Value: A. thaliana
  misc_feature: MA Experiment 20001904 PARAMETER Experiment Name: At_Drought_Reproduction_P Parameter: Plant Line Value: WS
  misc_feature: MA Experiment 20001904 PARAMETER Experiment Name: At_Drought_Reproduction_P Parameter: Timepoint (day) Value: 7
  misc_feature: MA Experiment 20001904 PARAMETER Experiment Name: At_Drought_Reproduction_P Parameter: Tissue Value: Rosettes
  misc_feature: MA Experiment 20001904 PARAMETER Experiment Name: At_Drought_Reproduction_P Parameter: Treatment Value: Drought vs. No Drought
  misc_feature: MA Experiment ID: 20001905 Result: Up-regulated in Transcription
  misc_feature: MA Experiment 20001905 PARAMETER Experiment Name: At_Drought_Reproduction_P Parameter: Age (day) Value: 40
  misc_feature: MA Experiment 20001905 PARAMETER Experiment Name: At_Drought_Reproduction_P Parameter: Organism Value: A. thaliana
  misc_feature: MA Experiment 20001905 PARAMETER Experiment Name: At_Drought_Reproduction_P Parameter: Plant Line Value: WS
  misc_feature: MA Experiment 20001905 PARAMETER Experiment Name: At_Drought_Reproduction_P Parameter: Timepoint (day) Value: 10
  misc_feature: MA Experiment 20001905 PARAMETER Experiment Name: At_Drought_Reproduction_P Parameter: Tissue Value: Rosettes
  misc_feature: MA Experiment 20001905 PARAMETER Experiment Name: At_Drought_Reproduction_P Parameter: Treatment Value: Drought vs. No Drought
  misc_feature: MA Experiment ID: 20001906 Result: Up-regulated in Transcription
  misc_feature: MA Experiment 20001906 PARAMETER Experiment Name: At_Drought_Reproduction_P Parameter: Age (day) Value: 35
  misc_feature: MA Experiment 20001906 PARAMETER Experiment Name: At_Drought_Reproduction_P Parameter: Organism Value: A. thaliana
  misc_feature: MA Experiment 20001906 PARAMETER Experiment Name: At_Drought_Reproduction_P Parameter: Plant Line Value: WS
  misc_feature: MA Experiment 20001906 PARAMETER Experiment Name: At_Drought_Reproduction_P Parameter: Timepoint (day) Value: 5
  misc_feature: MA Experiment 20001906 PARAMETER Experiment Name: At_Drought_Reproduction_P Parameter: Tissue Value: Siliques
  misc_feature: MA Experiment 20001906 PARAMETER Experiment Name: At_Drought_Reproduction_P Parameter: Treatment Value: Drought vs. No Drought
  misc_feature: MA Experiment ID: 20001907 Result: Up-regulated in Transcription
  misc_feature: MA Experiment 20001907 PARAMETER Experiment Name: At_Drought_Reproduction_P Parameter: Age (day) Value: 37
  misc_feature: MA Experiment 20001907 PARAMETER Experiment Name: At_Drought_Reproduction_P Parameter: Organism Value: A. thaliana
  misc_feature: MA Experiment 20001907 PARAMETER Experiment Name: At_Drought_Reproduction_P Parameter: Plant Line Value: WS
  misc_feature: MA Experiment 20001907 PARAMETER Experiment Name: At_Drought_Reproduction_P Parameter: Timepoint (day) Value: 7
  misc_feature: MA Experiment 20001907 PARAMETER Experiment Name: At_Drought_Reproduction_P Parameter: Tissue Value: Siliques
  misc_feature: MA Experiment 20001907 PARAMETER Experiment Name: At_Drought_Reproduction_P Parameter: Treatment Value: Drought vs. No Drought
  misc_feature: MA Experiment ID: 20001908 Result: Up-regulated in Transcription
  misc_feature: MA Experiment 20001908 PARAMETER Experiment Name: At_Drought_Reproduction_P Parameter: Age (day) Value: 40
  misc_feature: MA Experiment 20001908 PARAMETER Experiment Name: At_Drought_Reproduction_P Parameter: Organism Value: A. thaliana
  misc_feature: MA Experiment 20001908 PARAMETER Experiment Name: At_Drought_Reproduction_P Parameter: Plant Line Value: WS
  misc_feature: MA Experiment 20001908 PARAMETER Experiment Name: At_Drought_Reproduction_P Parameter: Timepoint (day) Value: 10
  misc_feature: MA Experiment 20001908 PARAMETER Experiment Name: At_Drought_Reproduction_P Parameter: Tissue Value: Siliques
  misc_feature: MA Experiment 20001908 PARAMETER Experiment Name: At_Drought_Reproduction_P Parameter: Treatment Value: Drought vs. No Drought
  misc_feature: MA Experiment ID: 20001910 Result: Up-regulated in Transcription
  misc_feature: MA Experiment 20001910 PARAMETER Experiment Name: At_Drought_Reproduction_P Parameter: Age (day) Value: 37
  misc_feature: MA Experiment 20001910 PARAMETER Experiment Name: At_Drought_Reproduction_P Parameter: Organism Value: A. thaliana
  misc_feature: MA Experiment 20001910 PARAMETER Experiment Name: At_Drought_Reproduction_P Parameter: Plant Line Value: WS
  misc_feature: MA Experiment 20001910 PARAMETER Experiment Name: At_Drought_Reproduction_P Parameter: Timepoint (day) Value: 7
  misc_feature: MA Experiment 20001910 PARAMETER Experiment Name: At_Drought_Reproduction_P Parameter: Tissue Value: Flowers
  misc_feature: MA Experiment 20001910 PARAMETER Experiment Name: At_Drought_Reproduction_P Parameter: Treatment Value: Drought vs. No Drought
  misc_feature: MA Experiment ID: 20001911 Result: Up-regulated in Transcription
  misc_feature: MA Experiment 20001911 PARAMETER Experiment Name: At_Drought_Reproduction_P Parameter: Age (day) Value: 40
  misc_feature: MA Experiment 20001911 PARAMETER Experiment Name: At_Drought_Reproduction_P Parameter: Organism Value: A. thaliana
  misc_feature: MA Experiment 20001911 PARAMETER Experiment Name: At_Drought_Reproduction_P Parameter: Plant Line Value: WS
  misc_feature: MA Experiment 20001911 PARAMETER Experiment Name: At_Drought_Reproduction_P Parameter: Timepoint (day) Value: 10
  misc_feature: MA Experiment 20001911 PARAMETER Experiment Name: At_Drought_Reproduction_P Parameter: Tissue Value: Flowers
  misc_feature: MA Experiment 20001911 PARAMETER Experiment Name: At_Drought_Reproduction_P Parameter: Treatment Value: Drought vs. No Drought
aaaagatcgacgaacataaaaacaaaaacatataatttgggtttttagagttcgaaacttgaaatctttttttttttggttgctgaggaatcgaagtagaagagtataaatgggtgttagagagaaagatccgttagcccagttgagtttgccaccaggttttagattttatccgacagatgaagagcttcttgttcagtatctatgtcggaaagttgcaggctatcatttctctctccaggtcatcggagacatcgatctctacaagttcgatccttgggatttgccaagtaaggctttgtttggagagaaggaatggtatttctttagcccaagagatcggaaatatccgaacgggtcaagacccaatagagtagccgggtcgggttattggaaagcaacgggtactgacaaaattatcacggcggatggtcgtcgtgtcgggattaaaaaagctctggtcttttacgccggaaaagctcccaaaggcactaaaaccaactggattatgcacgagtatcgcttaatagaacattctcgtagccatggaagctccaagttggatgattgggtgttgtgtcgaatttacaagaaaacatctggatctcagagacaagctgttactcctgttcaagcttgtcgtgaagagcatagcacgaatgggtcgtcatcgtcttcttcatcacagcttgacgacgttcttgattcgttcccggagataaaagaccagtcttttaatcttcctcggatgaattcgctcaggacgattcttaacgggaactttgattgggctagcttggcaggtcttaatccaattccagagctagctccgaccaatggattaccgagttacggtggttacgatgcgtttcgagcggcggaaggtgaggcggagagtgggcatgtgaatcggcagcagaactcgagcgggttgactcagagtttcgggtacagctcgagtgggtttggtgtttcgggtcaaacattcgagtttaggcaatgagagagatgtgaagttactgatgggtgaaaaaagtaaaaaaaaaacttggagatagtagagtggcaattgatgtaaataatagggatttatatggggcttttaccgattcggtgaggcttaggattccacaaaggaaaaaggctcgactggggactagtttgatccaacttgacggcccacaaatgtgtaatgtttctcaacggagagaaaaataaatggttaccaatatttttacaccggttatgtgttgataccatttgcacaaaacggtttaagttctgaattgaataacttaacacccaaaatttggtaaaaagcttaatacaaaaagttcaaaggcattttcgcttactgcgacactcggagttgcagagtactctacgtaacagactctgttcatagagtttgcggcaccggtggtgggacattcttgcggacacagtatgtacttttggaagcatcgttcctaagggttgctgcagtaaactccttgtgacttggctcgcaagaaacataacatggccgcaagaaaaaacagcattaacgaagaggtgtttgagatcttcatgtctagtttattcttcctgttttattatgtgtcgactggtgtcaaaagaaacgtgttgattgtgaatttgtagacgccactctgtaaatttatttaaaataaactattttacttcacgtc

SEQ ID NO: 24428 - protein, 297 aa, Arabidopsis thaliana
  peptide (1)..(297): Ceres Seq. ID no. 13486728
  misc_feature (14)..(140): Pfam Name: No apical meristem (NAM) protein Pfam Description: No apical meristem (NAM) protein
  misc_feature (1)..(282): Homolog of NCBI NO: 21536744 NR Description: putative jasmonic acid regulatory protein
  misc_feature (1)..(291): Homolog of NCBI NO: 15219112 NR Description: No apical meristem (NAM) protein family
  misc_feature (1)..(282): Homolog of NCBI NO: 15232604 NR Description: No apical meristem (NAM) protein family
  misc_feature (1)..(279): Homolog of NCBI NO: 6175246 NR Description: jasmonic acid 2 [Lycopersicon esculentum]
  misc_feature (72)..(297): Homolog of NCBI NO: 15375404 NR Description: NAM-like protein [Arabidopsis thaliana]
  misc_feature (1)..(297): Homolog of NCBI NO: 31322582 NR Description: NAC-domain protein 485 [Brassica napus]
  misc_feature (6)..(297): Homolog of NCBI NO: 23397295 NR Description: unknown protein [Arabidopsis thaliana]
  misc_feature (1)..(62): Homolog of NCBI NO: 7486254 NR Description: hypothetical protein F27G19.10 - Arabidopsis
  misc_feature (62)..(297): Homolog of NCBI NO: 7486254 NR Description: hypothetical protein F27G19.10 - Arabidopsis
  misc_feature (1)..(297): Homolog of NCBI NO: 18416983 NR Description: No apical meristem (NAM) protein family
MGVREKDPLAQLSLPPGFRFYPTDEELLVQYLCRKVAGYHFSLQVIGDIDLYKFDPWDLPSKALFGEKEWYFFSPRDRKYPNGSRPNRVAGSGYWKATGTDKIITADGRRVGIKKALVFYAGKAPKGTKTNWIMHEYRLIEHSRSHGSSKLDDWVLCRIYKKTSGSQRQAVTPVQACREEHSTNGSSSSSSSQLDDVLDSFPEIKDQSFNLPRMNSLRTILNGNFDWASLAGLNPIPELAPTNGLPSYGGYDAFRAAEGEAESGHVNRQQNSSGLTQSFGYSSSGFGVSGQTFEFRQ

SEQ ID NO: 24429 - protein, 164 aa, Arabidopsis thaliana
  peptide (1)..(164): Ceres Seq. ID no. 13486729
  misc_feature (1)..(164): Homolog of NCBI NO: 30687579 NR Description: No apical meristem (NAM) protein family
  misc_feature (1)..(149): Homolog of NCBI NO: 21536744 NR Description: putative jasmonic acid regulatory protein
  misc_feature (1)..(158): Homolog of NCBI NO: 15219112 NR Description: No apical meristem (NAM) protein family
  misc_feature (1)..(149): Homolog of NCBI NO: 15232604 NR Description: No apical meristem (NAM) protein family
  misc_feature (1)..(146): Homolog of NCBI NO: 6175246 NR Description: jasmonic acid 2 [Lycopersicon esculentum]
  misc_feature (1)..(164): Homolog of NCBI NO: 15375404 NR Description: NAM-like protein [Arabidopsis thaliana]
  misc_feature (1)..(164): Homolog of NCBI NO: 31322582 NR Description: NAC-domain protein 485 [Brassica napus]
  misc_feature (1)..(164): Homolog of NCBI NO: 23397295 NR Description: unknown protein [Arabidopsis thaliana]
  misc_feature (1)..(164): Homolog of NCBI NO: 7486254 NR Description: hypothetical protein F27G19.10 - Arabidopsis
  misc_feature (1)..(164): Homolog of NCBI NO: 18416983 NR Description: No apical meristem (NAM) protein family
MHEYRLIEHSRSHGSSKLDDWVLCRIYKKTSGSQRQAVTPVQACREEHSTNGSSSSSSSQLDDVLDSFPEIKDQSFNLPRMNSLRTILNGNFDWASLAGLNPIPELAPTNGLPSYGGYDAFRAAEGEAESGHVNRQQNSSGLTQSFGYSSSGFGVSGQTFEFRQ

SEQ ID NO: 24430 - DNA, 843 bp, Arabidopsis thaliana
  misc_feature (1)..(843): Ceres Seq. ID no. 12321998
  misc_feature: MA Experiment ID: 108594 Result: Down-regulated in Transcription
  misc_feature: MA Experiment 108594 PARAMETER Experiment Name: At_Ler-rhl_Root_cDNA_P Parameter: Plant Line Value: null
  misc_feature: MA Experiment ID: 20000495 Result: Down-regulated in Transcription
  misc_feature: MA Experiment 20000495 PARAMETER Experiment Name: At_Guard_Cells_P Parameter: Harvest Date Value: 8/2/2002
  misc_feature: MA Experiment 20000495 PARAMETER Experiment Name: At_Guard_Cells_P Parameter: Organism Value: A. thaliana
  misc_feature: MA Experiment 20000495 PARAMETER Experiment Name: At_Guard_Cells_P Parameter: Tissue Value: Guard Cells vs. Leaves
  misc_feature: MA Experiment ID: 20000794 Result: Down-regulated in Transcription
  misc_feature: MA Experiment 20000794 PARAMETER Experiment Name: At_Petals_P Parameter: Age (day) Value: 23-25 days
  misc_feature: MA Experiment 20000794 PARAMETER Experiment Name: At_Petals_P Parameter: Plant Line Value: WS
  misc_feature: MA Experiment 20000794 PARAMETER Experiment Name: At_Petals_P Parameter: Tissue Value: Petals vs. Whole plant
  misc_feature: MA Experiment ID: 20001451 Result: Down-regulated in Transcription
  misc_feature: MA Experiment 20001451 PARAMETER Experiment Name: At_Far-red-induction_P Parameter: Age (day) Value: 7
  misc_feature: MA Experiment 20001451 PARAMETER Experiment Name: At_Far-red-induction_P Parameter: Light Value: Far-red vs. White
  misc_feature: MA Experiment 20001451 PARAMETER Experiment Name: At_Far-red-induction_P Parameter: Organism Value: A. thaliana
  misc_feature: MA Experiment 20001451 PARAMETER Experiment Name: At_Far-red-induction_P Parameter: Plant Line Value: Columbia
  misc_feature: MA Experiment 20001451 PARAMETER Experiment Name: At_Far-red-induction_P Parameter: Timepoint (hr) Value: 24
  misc_feature: MA Experiment 20001451 PARAMETER Experiment Name: At_Far-red-induction_P Parameter: Tissue Value: Whole Plant
  misc_feature: MA Experiment ID: 20001911 Result: Down-regulated in Transcription
  misc_feature: MA Experiment 20001911 PARAMETER Experiment Name: At_Drought_Reproduction_P Parameter: Age (day) Value: 40
  misc_feature: MA Experiment 20001911 PARAMETER Experiment Name: At_Drought_Reproduction_P Parameter: Organism Value: A. thaliana
  misc_feature: MA Experiment 20001911 PARAMETER Experiment Name: At_Drought_Reproduction_P Parameter: Plant Line Value: WS
  misc_feature: MA Experiment 20001911 PARAMETER Experiment Name: At_Drought_Reproduction_P Parameter: Timepoint (day) Value: 10
  misc_feature: MA Experiment 20001911 PARAMETER Experiment Name: At_Drought_Reproduction_P Parameter: Tissue Value: Flowers
  misc_feature: MA Experiment 20001911 PARAMETER Experiment Name: At_Drought_Reproduction_P Parameter: Treatment Value: Drought vs. No Drought
accactctcttctcctgttttcctcttccccaactctcaattttgctcagacaaaaaatcaatggctttgcaaatgcagcaaacttcagcagccttcacaatctcctcaccatccaccgccgctgcacgcatcaaactctcccctttcagaaccgtggcggttaaccgcggagttagatgcagcggcggtggagtcggaggcggagatgccgggaagaaaaaagcagttcctaattcgaattatgtagttcctattgacaaattctcgtcttcttcgtcgattactaggcctttgattgagatacttcgtgaccttaataagaagattcctgataacattgttaagagtcatgatcctccttctacttctgctgctacttctggttttatcccttggtaccatgcaaatcggatgcttagcttctatgctcctggttggtgtggtgaagttagagatgttattttctctgagaatggaaatgttactgttgtttatcgtctcactattcgtggctctgatggtgaggcacatcgtgaatcaactgggacagtaacgacgactgattatcacatcgaggatccagttactgcagctgaggaaatagcattctgcagagcatgtgctcgatttggtctcggcttgtatctataccacgaatagttcaccgatcatatcaagtttccttactgtttttcaagaccctcaattccgtgatctgtttgttttttcttccttctttttgacatccttgtgttatctagagtaccaaaacatgcaattaacaggagtttttatgtataaccaaactcttcatgttataatatatacagttacattacatc

SEQ ID NO: 24431 - protein, 219 aa, Arabidopsis thaliana
  peptide (1)..(219): Ceres Seq. ID no. 12321999
  misc_feature (91)..(219): Homolog of NCBI NO: 34907336 NR Description: putative SnRK1-interacting protein 1
  misc_feature (91)..(219): Homolog of NCBI NO: 9367245 NR Description: SnRK1-interacting protein 1 [Hordeum vulgare
  misc_feature (91)..(219): Homolog of NCBI NO: 15224018 NR Description: hypothetical protein; protein id: At1g71310.1
  misc_feature (75)..(175): Homolog of NCBI NO: 27573357 NR Description: hypothetical protein [Oryza sativa (japonica
  misc_feature (21)..(219): Homolog of NCBI NO: 15238827 NR Description: putative protein
  misc_feature (21)..(219): Homolog of NCBI NO: 21593360 NR Description: unknown [Arabidopsis thaliana]
PLSSPVFLFPNSQFCSDKKSMALQMQQTSAAFTISSPSTAAARIKLSPFRTVAVNRGVRCSGGGVGGGDAGKKKAVPNSNYVVPIDKFSSSSSITRPLIEILRDLNKKIPDNIVKSHDPPSTSAATSGFIPWYHANRMLSFYAPGWCGEVRDVIFSENGNVTVVYRLTIRGSDGEAHRESTGTVTTTDYHIEDPVTAAEEIAFCRACARFGLGLYLYHE

SEQ ID NO: 24432 - protein, 199 aa, Arabidopsis thaliana
  peptide (1)..(199): Ceres Seq. ID no. 12322000
  misc_feature (71)..(199): Homolog of NCBI NO: 34907336 NR Description: putative SnRK1-interacting protein 1
  misc_feature (71)..(199): Homolog of NCBI NO: 9367245 NR Description: SnRK1-interacting protein 1 [Hordeum vulgare
  misc_feature (71)..(199): Homolog of NCBI NO: 15224018 NR Description: hypothetical protein; protein id: At1g71310.1
  misc_feature (55)..(155): Homolog of NCBI NO: 27573357 NR Description: hypothetical protein [Oryza sativa (japonica
  misc_feature (1)..(199): Homolog of NCBI NO: 15238827 NR Description: putative protein
  misc_feature (1)..(199): Homolog of NCBI NO: 21593360 NR Description: unknown [Arabidopsis thaliana]
MALQMQQTSAAFTISSPSTAAARIKLSPFRTVAVNRGVRCSGGGVGGGDAGKKKAVPNSNYVVPIDKFSSSSSITRPLIEILRDLNKKIPDNIVKSHDPPSTSAATSGFIPWYHANRMLSFYAPGWCGEVRDVIFSENGNVTVVYRLTIRGSDGEAHRESTGTVTTTDYHIEDPVTAAEEIAFCRACARFGLGLYLYHE

SEQ ID NO: 24433 - protein, 195 aa, Arabidopsis thaliana
  peptide (1)..(195): Ceres Seq. ID no. 12322001
  misc_feature (67)..(195): Homolog of NCBI NO: 34907336 NR Description: putative SnRK1-interacting protein 1
  misc_feature (67)..(195): Homolog of NCBI NO: 9367245 NR Description: SnRK1-interacting protein 1 [Hordeum vulgare
  misc_feature (67)..(195): Homolog of NCBI NO: 15224018 NR Description: hypothetical protein; protein id: At1g71310.1
  misc_feature (51)..(151): Homolog of NCBI NO: 27573357 NR Description: hypothetical protein [Oryza sativa (japonica
  misc_feature (1)..(195): Homolog of NCBI NO: 15238827 NR Description: putative protein
  misc_feature (1)..(195): Homolog of NCBI NO: 21593360 NR Description: unknown [Arabidopsis thaliana]
MQQTSAAFTISSPSTAAARIKLSPFRTVAVNRGVRCSGGGVGGGDAGKKKAVPNSNYVVPIDKFSSSSSITRPLIEILRDLNKKIPDNIVKSHDPPSTSAATSGFIPWYHANRMLSFYAPGWCGEVRDVIFSENGNVTVVYRLTIRGSDGEAHRESTGTVTTTDYHIEDPVTAAEEIAFCRACARFGLGLYLYHE

SEQ ID NO: 24434 - DNA, 1137 bp, Arabidopsis thaliana
  misc_feature (1)..(1137): Ceres Seq. ID no. 12322002
  misc_feature: MA Experiment ID: 108569 Result: Up-regulated in Transcription
  misc_feature: MA Experiment 108569 PARAMETER Experiment Name: At_0.001%_MeJA__cDNA_P Parameter: Timepoint (hr) Value: 6
  misc_feature: MA Experiment 108569 PARAMETER Experiment Name: At_0.001%_MeJA__cDNA_P Parameter: Tissue Value: Aerial
  misc_feature: MA Experiment 108569 PARAMETER Experiment Name: At_0.001%_MeJA__cDNA_P Parameter: Treatment Value: 0.001% MeJA vs. No Treatment
  misc_feature: MA Experiment ID: 108573 Result: Up-regulated in Transcription
  misc_feature: MA Experiment 108573 PARAMETER Experiment Name: At_Drought_cDNA_P Parameter: Timepoint (hr) Value: 6
  misc_feature: MA Experiment 108573 PARAMETER Experiment Name: At_Drought_cDNA_P Parameter: Tissue Value: Aerial
  misc_feature: MA Experiment 108573 PARAMETER Experiment Name: At_Drought_cDNA_P Parameter: Treatment Value: Drought vs. No Drought
  misc_feature: MA Experiment ID: 20000111 Result: Up-regulated in Transcription
  misc_feature: MA Experiment 20000111 PARAMETER Experiment Name: At_42deg_Heat_cDNA_P Parameter: Temperature (deg C) Value: 42 vs. 22
  misc_feature: MA Experiment 20000111 PARAMETER Experiment Name: At_42deg_Heat_cDNA_P Parameter: Timepoint (hr) Value: 6
  misc_feature: MA Experiment 20000111 PARAMETER Experiment Name: At_42deg_Heat_cDNA_P Parameter: Tissue Value: Aerial
  misc_feature: MA Experiment ID: 20000113 Result: Up-regulated in Transcription
  misc_feature: MA Experiment 20000113 PARAMETER Experiment Name: At_42deg_Heat_cDNA_P Parameter: Temperature (deg C) Value: 42 vs. 22
  misc_feature: MA Experiment 20000113 PARAMETER Experiment Name: At_42deg_Heat_cDNA_P Parameter: Timepoint (hr) Value: 8
  misc_feature: MA Experiment 20000113 PARAMETER Experiment Name: At_42deg_Heat_cDNA_P Parameter: Tissue Value: Aerial
  misc_feature: MA Experiment ID: 20000224 Result: Down-regulated in Transcription
acttagaaatggcttcttcgtcttcacccccggcggcgatggaggtcggagaatctacaaactggacggagcttccaccggaactgacttcagcaatcctgcaccgtcttggcgcgattgagatacttgaaaacgctcagaaagtttgcagatcttggcgtcgtgtttgtaaagacccatcgatgtggcgtaaaattgacatgcataacctcggagatttggacgacatggattacaacctcgagatcatgtgccgtcacgctgttgatcgtagccagggaggcttggttgatatcggtatttggtactttggtactgttgatctcctcaattacatcgcccataggtcgagtaatctgagaagccttagacttataaggtgttctcaaattacagacgatggatttgtcgaagcagttgtgaaacttccacttgaagaactcgagttgtcatactgctcattttcagtagagtctctcagagttgtaggccagtgttgtttaaatatgaagactttgaagctgaacaagcatcctcaaaaggagaatgacgatgatgctctagcaatcgctgaaacaattccgaaacttcgccatctccagctttgtgggaacgggttgtcagacaccggtttaaacgctattcttgacaattgctcaaacctggaacatcttgatttacgccggtgtttcaatgttaaccttgttggggatttgcagaagcggtgttttgagagtgtcaaagttgtgagacaccctaatgactcgattcatgatatcgacattggttcatcagaagacgaagacccttatgacttctctgatatcgatctgatgtcaggtgatgatgattttgagggttactatgacttctcaggtgctagtgacttttctgactatgaccagtttgatttctagatgcatcggtttcgtgcaggtgaatttttttcgaacttgttcatgacttgttttaagttagctcatagtttcaatggattttatgtgtccttgaagtatgttaccgtttgtaatgatgtcttttgctgtttgtctttcaacaatttctaagctcagaaaagtttcaaagatggtgattgtttcatcttgcttttaacgaaagaaattgagtttattcttc

SEQ ID NO: 24435 - protein, 304 aa, Arabidopsis thaliana
  peptide (1)..(304): Ceres Seq. ID no. 12322003
  misc_feature (195)..(219): Pfam Name: Leucine Rich Repeat Pfam Description: Leucine Rich Repeat
  misc_feature (16)..(299): Homolog of NCBI NO: 40253673 NR Description: putative N7 protein [Oryza sativa (japonica
  misc_feature (82)..(277): Homolog of NCBI NO: 15236356 NR Description: putative nodulin; protein id: At4g03630.1
  misc_feature (79)..(255): Homolog of NCBI NO: 15237166 NR Description: nodulin-like protein; protein id: At5g52480.1
  misc_feature (17)..(258): Homolog of NCBI NO: 18412949 NR Description: F-box protein family, AtFBL21; protein id:
  misc_feature (17)..(274): Homolog of NCBI NO: 25376524 NR Description: N7-like protein [imported] - Arabidopsis thaliana
  misc_feature (4)..(240): Homolog of NCBI NO: 30692594 NR Description: predicted protein [Arabidopsis thaliana]
  misc_feature (3)..(296): Homolog of NCBI NO: 18412951 NR Description: F-box protein family, AtFBL22; protein id:
  misc_feature (6)..(263): Homolog of NCBI NO: 18412953 NR Description: F-box protein family, AtFBL9/AtFBL23; protein id:
  misc_feature (3)..(304): Homolog of NCBI NO: 18412947 NR Description: F-box protein family, AtFBL20
  misc_feature (3)..(304): Homolog of NCBI NO: 21593361 NR Description: F-box protein family, AtFBL20 [Arabidopsis
LEMASSSSPPAAMEVGESTNWTELPPELTSAILHRLGAIEILENAQKVCRSWRRVCKDPSMWRKIDMHNLGDLDDMDYNLEIMCRHAVDRSQGGLVDIGIWYFGTVDLLNYIAHRSSNLRSLRLIRCSQITDDGFVEAVVKLPLEELELSYCSFSVESLRVVGQCCLNMKTLKLNKHPQKENDDDALAIAETIPKLRHLQLCGNGLSDTGLNAILDNCSNLEHLDLRRCFNVNLVGDLQKRCFESVKVVRHPNDSIHDIDIGSSEDEDPYDFSDIDLMSGDDDFEGYYDFSGASDFSDYDQFDF

SEQ ID NO: 24436 - protein, 302 aa, Arabidopsis thaliana
  peptide (1)..(302): Ceres Seq. ID no. 12322004
  misc_feature (193)..(217): Pfam Name: Leucine Rich Repeat Pfam Description: Leucine Rich Repeat
  misc_feature (14)..(297): Homolog of NCBI NO: 40253673 NR Description: putative N7 protein [Oryza sativa (japonica
  misc_feature (80)..(275): Homolog of NCBI NO: 15236356 NR Description: putative nodulin; protein id: At4g03630.1
  misc_feature (77)..(253): Homolog of NCBI NO: 15237166 NR Description: nodulin-like protein; protein id: At5g52480.1
  misc_feature (15)..(256): Homolog of NCBI NO: 18412949 NR Description: F-box protein family, AtFBL21; protein id:
  misc_feature (15)..(272): Homolog of NCBI NO: 25376524 NR Description: N7-like protein [imported] - Arabidopsis thaliana
  misc_feature (2)..(238): Homolog of NCBI NO: 30692594 NR Description: predicted protein [Arabidopsis thaliana]
  misc_feature (1)..(294): Homolog of NCBI NO: 18412951 NR Description: F-box protein family, AtFBL22; protein id:
  misc_feature (4)..(261): Homolog of NCBI NO: 18412953 NR Description: F-box protein family, AtFBL9/AtFBL23; protein id:
  misc_feature (1)..(302): Homolog of NCBI NO: 18412947 NR Description: F-box protein family, AtFBL20
  misc_feature (1)..(302): Homolog of NCBI NO: 21593361 NR Description: F-box protein family, AtFBL20 [Arabidopsis
MASSSSPPAAMEVGESTNWTELPPELTSAILHRLGAIEILENAQKVCRSWRRVCKDPSMWRKIDMHNLGDLDDMDYNLEIMCRHAVDRSQGGLVDIGIWYFGTVDLLNYIAHRSSNLRSLRLIRCSQITDDGFVEAVVKLPLEELELSYCSFSVESLRVVGQCCLNMKTLKLNKHPQKENDDDALAIAETIPKLRHLQLCGNGLSDTGLNAILDNCSNLEHLDLRRCFNVNLVGDLQKRCFESVKVVRHPNDSIHDIDIGSSEDEDPYDFSDIDLMSGDDDFEGYYDFSGASDFSDYDQFDF

SEQ ID NO: 24437 - protein, 292 aa, Arabidopsis thaliana
  peptide (1)..(292): Ceres Seq. ID no. 12322005
  misc_feature (183)..(207): Pfam Name: Leucine Rich Repeat Pfam Description: Leucine Rich Repeat
  misc_feature (4)..(287): Homolog of NCBI NO: 40253673 NR Description: putative N7 protein [Oryza sativa (japonica
  misc_feature (70)..(265): Homolog of NCBI NO: 15236356 NR Description: putative nodulin; protein id: At4g03630.1
  misc_feature (67)..(243): Homolog of NCBI NO: 15237166 NR Description: nodulin-like protein; protein id: At5g52480.1
  misc_feature (5)..(246): Homolog of NCBI NO: 18412949 NR Description: F-box protein family, AtFBL21; protein id:
  misc_feature (5)..(262): Homolog of NCBI NO: 25376524 NR Description: N7-like protein [imported] - Arabidopsis thaliana
  misc_feature (1)..(228): Homolog of NCBI NO: 30692594 NR Description: predicted protein [Arabidopsis thaliana]
  misc_feature (1)..(284): Homolog of NCBI NO: 18412951 NR Description: F-box protein family, AtFBL22; protein id:
  misc_feature (1)..(251): Homolog of NCBI NO: 18412953 NR Description: F-box protein family, AtFBL9/AtFBL23; protein id:
  misc_feature (1)..(292): Homolog of NCBI NO: 18412947 NR Description: F-box protein family, AtFBL20
  misc_feature (1)..(292): Homolog of NCBI NO: 21593361 NR Description: F-box protein family, AtFBL20 [Arabidopsis
MEVGESTNWTELPPELTSAILHRLGAIEILENAQKVCRSWRRVCKDPSMWRKIDMHNLGDLDDMDYNLEIMCRHAVDRSQGGLVDIGIWYFGTVDLLNYIAHRSSNLRSLRLIRCSQITDDGFVEAVVKLPLEELELSYCSFSVESLRVVGQCCLNMKTLKLNKHPQKENDDDALAIAETIPKLRHLQLCGNGLSDTGLNAILDNCSNLEHLDLRRCFNVNLVGDLQKRCFESVKVVRHPNDSIHDIDIGSSEDEDPYDFSDIDLMSGDDDFEGYYDFSGASDFSDYDQFDF

SEQ ID NO: 24438 - DNA, 1262 bp, Arabidopsis thaliana
  misc_feature (1)..(1262): Ceres Seq. ID no. 12321476
  misc_feature: MA Experiment ID: 108434 Result: Up-regulated in Transcription
  misc_feature: MA Experiment 108434 PARAMETER Experiment Name: At_Root_Tips_cDNA_P Parameter: Tissue Value: Root Tips
  misc_feature: MA Experiment ID: 108435 Result: Up-regulated in Transcription
  misc_feature: MA Experiment 108435 PARAMETER Experiment Name: At_stm_Mutants_cDNA_P Parameter: Plant Line Value: wt Landsburg vs stm
  misc_feature: MA Experiment 108435 PARAMETER Experiment Name: At_stm_Mutants_cDNA_P Parameter: Tissue Value: Shoot Apical Meristem Region
  misc_feature: MA Experiment ID: 20000227 Result: Up-regulated in Transcription
  misc_feature: MA Experiment 20000227 PARAMETER Experiment Name: At_Root-Tips-vs-Tops_P Parameter: Tissue Value: Root Tips vs. Root Tops
  misc_feature: MA Experiment ID: 20000234 Result: Up-regulated in Transcription
  misc_feature: MA Experiment 20000234 PARAMETER Experiment Name: At_Siliques_P Parameter: Age (day) Value: 21
  misc_feature: MA Experiment 20000234 PARAMETER Experiment Name: At_Siliques_P Parameter: Organism Value: A. thaliana
  misc_feature: MA Experiment 20000234 PARAMETER Experiment Name: At_Siliques_P Parameter: Plant Line Value: WS
  misc_feature: MA Experiment 20000234 PARAMETER Experiment Name: At_Siliques_P Parameter: Tissue Value: Less Than 5mm Siliques vs. Whole Plant
  misc_feature: MA Experiment ID: 20000286 Result: Up-regulated in Transcription
  misc_feature: MA Experiment 20000286 PARAMETER Experiment Name: At_Open_Flower_P Parameter: Age (day) Value: 21
  misc_feature: MA Experiment 20000286 PARAMETER Experiment Name: At_Open_Flower_P Parameter: Plant Line Value: WS
  misc_feature: MA Experiment 20000286 PARAMETER Experiment Name: At_Open_Flower_P Parameter: Tissue Value: Half Open vs. Whole Plant
  misc_feature: MA Experiment ID: 20000495 Result: Up-regulated in Transcription
  misc_feature: MA Experiment 20000495 PARAMETER Experiment Name: At_Guard_Cells_P Parameter: Harvest Date Value: 8/2/2002
  misc_feature: MA Experiment 20000495 PARAMETER Experiment Name: At_Guard_Cells_P Parameter: Organism Value: A. thaliana
  misc_feature: MA Experiment 20000495 PARAMETER Experiment Name: At_Guard_Cells_P Parameter: Tissue Value: Guard Cells vs. Leaves
attttctatctttgttctcttctcctaatttcaaaagagccgttagagagagacagatcgagaaagaaccagagagagaaacctgagaaaatcgaagatggctacgaacattgggatgatggattctgcatatttcgtcgggagatcggagattctggcttggattaactctactctccaactcaatctctccaaagtcgaagaggcttgttcaggcgctgttcattgtcagctgatggattcggtgcatcctgggactgttccgatgcacaaggttaactttgatgcgaagagtgaatatgagatgattcagaactataaggttcttcaggatgtgtttaataaactcaagatcactaagcacatcgaagtgagcaaactcgttaagggaaggccattggataacttggagtttatgcagtggatgaaaaagtactgtgattctgttaatggaggccagcataattaccatgcacttgagagaagggaagccagcaaaggaggtaaagaagcaacgaagagagctgcagctacacaacaatcaggcaagagttcgtcttcttcagctccacctcgaccttcatcttcaaatggaacccgtaagcatgagccacaatccaacaacaccggtactcaccattcttcaactgggaatcaccaccactcttcaaaaccatcagctaaacaatctaaaccagtgcctgcttatgatgaaaagatcacagaactgaaactttacattgacagcttagagaaagagagagatttctatttctctaaactcagagatgtagagattctctgtcaaaacccagacacagagcacttacctcttgttggttccataaaaagaatcctatacgcagcagatggagaagacgttggagcagcagagacacagactttgagtcccattgctgaaggatcagaagagagaaggaacagtgtaacagagtcgcagaagaggaagctcatagtgaatctcgacgtagatgttgcagcgattacaacactctctccaagacaacgcctttctgatgcttctgatgtcaaatgcagtggttcatctcctctcttgacctgctgaaatcagagttagctatataatactctcttatgaaaacattctctctcagagaatctgttctatgtttgaaaaaaattccctatccctccttataaacatactctactagtactctgttgaaaatatcattgttgtgatgttttgtggtccttatggtataatatgttttgcccct

SEQ ID NO: 24439 - protein, 329 aa, Arabidopsis thaliana
  peptide (1)..(329): Ceres Seq. ID no. 12321477
  misc_feature (217)..(264): Pfam Name: EB1-like C-terminal motif Pfam Description: EB1-like C-terminal motif
  misc_feature (1)..(258): Homolog of NCBI NO: 19921706 NR Description: CG3265-PB [Drosophila melanogaster]
  misc_feature (1)..(259): Homolog of NCBI NO: 4689344 NR Description: LD08743p [Drosophila melanogaster]
  misc_feature (3)..(279): Homolog of NCBI NO: 29124955 NR Description: microtubule-associated protein EB1 [Chlamydomonas
  misc_feature (1)..(178): Homolog of NCBI NO: 26450360 NR Description: putative microtubule-associated protein EB1
  misc_feature (1)..(174): Homolog of NCBI NO: 32815913 NR Description: At3g47690 [Arabidopsis thaliana]
  misc_feature (1)..(291): Homolog of NCBI NO: 15241860 NR Description: microtubule-associated protein EB1-like protein
  misc_feature (206)..(261): Homolog of NCBI NO: 38344911 NR Description: OSJNBb0079B02.14 [Oryza sativa (japonica
  misc_feature (2)..(165): Homolog of NCBI NO: 38344911 NR Description: OSJNBb0079B02.14 [Oryza sativa (japonica
  misc_feature (2)..(326): Homolog of NCBI NO: 37535740 NR Description: putative microtubule-associated protein
  misc_feature (1)..(329): Homolog of NCBI NO: 15240262 NR Description: putative protein
MATNIGMMDSAYFVGRSEILAWINSTLQLNLSKVEEACSGAVHCQLMDSVHPGTVPMHKVNFDAKSEYEMIQNYKVLQDVFNKLKITKHIEVSKLVKGRPLDNLEFMQWMKKYCDSVNGGQHNYHALERREASKGGKEATKRAAATQQSGKSSSSSAPPRPSSSNGTRKHEPQSNNTGTHHSSTGNHHHSSKPSAKQSKPVPAYDEKITELKLYIDSLEKERDFYFSKLRDVEILCQNPDTEHLPLVGSIKRILYAADGEDVGAAETQTLSPIAEGSEERRNSVTESQKRKLIVNLDVDVAAITTLSPRQRLSDASDVKCSGSSPLLTC

SEQ ID NO: 24440 - protein, 323 aa, Arabidopsis thaliana
  peptide (1)..(323): Ceres Seq. ID no. 12321478
  misc_feature (211)..(258): Pfam Name: EB1-like C-terminal motif Pfam Description: EB1-like C-terminal motif
  misc_feature (1)..(252): Homolog of NCBI NO: 19921706 NR Description: CG3265-PB [Drosophila melanogaster]
  misc_feature (1)..(253): Homolog of NCBI NO: 4689344 NR Description: LD08743p [Drosophila melanogaster]
  misc_feature (1)..(273): Homolog of NCBI NO: 29124955 NR Description: microtubule-associated protein EB1 [Chlamydomonas
  misc_feature (1)..(172): Homolog of NCBI NO: 26450360 NR Description: putative microtubule-associated protein EB1
  misc_feature (1)..(168): Homolog of NCBI NO: 32815913 NR Description: At3g47690 [Arabidopsis thaliana]
  misc_feature (1)..(285): Homolog of NCBI NO: 15241860 NR Description: microtubule-associated protein EB1-like protein
  misc_feature (200)..(255): Homolog of NCBI NO: 38344911 NR Description: OSJNBb0079B02.14 [Oryza sativa (japonica
  misc_feature (1)..(159): Homolog of NCBI NO: 38344911 NR Description: OSJNBb0079B02.14 [Oryza sativa (japonica
  misc_feature (1)..(320): Homolog of NCBI NO: 37535740 NR Description: putative microtubule-associated protein
  misc_feature (1)..(323): Homolog of NCBI NO: 15240262 NR Description: putative protein
MMDSAYFVGRSEILAWINSTLQLNLSKVEEACSGAVHCQLMDSVHPGTVPMHKVNFDAKSEYEMIQNYKVLQDVFNKLKITKHIEVSKLVKGRPLDNLEFMQWMKKYCDSVNGGQHNYHALERREASKGGKEATKRAAATQQSGKSSSSSAPPRPSSSNGTRKHEPQSNNTGTHHSSTGNHHHSSKPSAKQSKPVPAYDEKITELKLYIDSLEKERDFYFSKLRDVEILCQNPDTEHLPLVGSIKRILYAADGEDVGAAETQTLSPIAEGSEERRNSVTESQKRKLIVNLDVDVAAITTLSPRQRLSDASDVKCSGSSPLLTC

SEQ ID NO: 24441 - protein, 322 aa, Arabidopsis thaliana
  peptide (1)..(322): Ceres Seq. ID no. 12321479
  misc_feature (210)..(257): Pfam Name: EB1-like C-terminal motif Pfam Description: EB1-like C-terminal motif
  misc_feature (1)..(322): Homolog of NCBI NO: 15240262 NR Description: putative protein
  misc_feature (1)..(251): Homolog of NCBI NO: 19921706 NR Description: CG3265-PB [Drosophila melanogaster]
  misc_feature (1)..(252): Homolog of NCBI NO: 4689344 NR Description: LD08743p [Drosophila melanogaster]
  misc_feature (1)..(272): Homolog of NCBI NO: 29124955 NR Description: microtubule-associated protein EB1 [Chlamydomonas
  misc_feature (1)..(171): Homolog of NCBI NO: 26450360 NR Description: putative microtubule-associated protein EB1
  misc_feature (1)..(167): Homolog of NCBI NO: 32815913 NR Description: At3g47690 [Arabidopsis thaliana]
  misc_feature (1)..(284): Homolog of NCBI NO: 15241860 NR Description: microtubule-associated protein EB1-like protein
  misc_feature (199)..(254): Homolog of NCBI NO: 38344911 NR Description: OSJNBb0079B02.14 [Oryza sativa (japonica
  misc_feature (1)..(158): Homolog of NCBI NO: 38344911 NR Description: OSJNBb0079B02.14 [Oryza sativa (japonica
  misc_feature (1)..(319): Homolog of NCBI NO: 37535740 NR Description: putative microtubule-associated protein
MDSAYFVGRSEILAWINSTLQLNLSKVEEACSGAVHCQLMDSVHPGTVPMHKVNFDAKSEYEMIQNYKVLQDVFNKLKITKHIEVSKLVKGRPLDNLEFMQWMKKYCDSVNGGQHNYHALERREASKGGKEATKRAAATQQSGKSSSSSAPPRPSSSNGTRKHEPQSNNTGTHHSSTGNHHHSSKPSAKQSKPVPAYDEKITELKLYIDSLEKERDFYFSKLRDVEILCQNPDTEHLPLVGSIKRILYAADGEDVGAAETQTLSPIAEGSEERRNSVTESQKRKLIVNLDVDVAAITTLSPRQRLSDASDVKCSGSSPLLTC

SEQ ID NO: 24442 - DNA, 1146 bp, Arabidopsis thaliana
  misc_feature (1)..(1146): Ceres Seq. ID no. 12321805
  misc_feature: MA Experiment ID: 108579 Result: Down-regulated in Transcription
  misc_feature: MA Experiment 108579 PARAMETER Experiment Name: At_4deg_Cold_cDNA_P Parameter: Temperature (deg C) Value: 4 vs. 22
  misc_feature: MA Experiment 108579 PARAMETER Experiment Name: At_4deg_Cold_cDNA_P Parameter: Timepoint (hr) Value: 6
  misc_feature: MA Experiment 108579 PARAMETER Experiment Name: At_4deg_Cold_cDNA_P Parameter: Tissue Value: Aerial
  misc_feature: MA Experiment ID: 108595 Result: Down-regulated in Transcription
  misc_feature: MA Experiment 108595 PARAMETER Experiment Name: At_Ler-pi_Ovule_cDNA_P Parameter: Plant Line Value: null
  misc_feature: MA Experiment ID: 20000224 Result: Down-regulated in Transcription
gcttcatttttttctccgaccaaacaagttccgggtgttttgaaagaaccccgacaatggcgtggaacgtgttcaagttctgcacagcacttcgcgccttgggttcgatcatgatcttaattgttatcgggatcatcggattcacatactacgccgttgtcgtcgttaattacggacctgctctactgatcggtggtgtcgattcattactatctgttctcgtcttagcgttcttccactttctgcttataatgctactgtggagttatttctctgttgttgtgacggaccctggtggtgttccaacgggttggaggccagaattagacatagagaaaagcgagggaaaccaagctttgattggagaagcttcggttggagattcctcgtctcatggtgtaagatattgtagaaagtgcaatcaatataaaccgcctcgttctcaccattgttcagtctgtggaagatgcatactaaagatggaccatcactgtgtttgggtggtgaattgtgttggtgcaaataactacaaatcatttctcctattcttgttttacacatttcttgagacaacggtagttgcagtatcactattgccaattttcctcgtattcttcagcgatggagatggtgatataaccgtatcaccaggaagcctagcagccagctttgttgcatttgtattgaacatagcatttgccctaagtgtcctaggcttcctaataatgcacataatgttggtcgctcgtaacaccacaactattgaggcgtatgagaagcatacagtgaactggccatacaacgttggtcgtaagacaaactttgaacaggtttttggaagtgataaaatgtattggttcgtgccattgtacacggaagacgataagaagaagttgccagcacttggagggttagactttacgagcaggtcggagtccgagacagagccgcttcagtctctatgaccttacaaacttgaaatttttggaagtgtgtcttctgctttgtgtatgtatcaatcaaatattatatcaaacattgtcttgtgtattataaagattagtgcctattgtggaatttgtatctttttatttcgtgaaaagaaatttctcaaacttcttaaatataccattttcacatttgctc

SEQ ID NO: 24443 - protein, 320 aa, Arabidopsis thaliana
  peptide (1)..(320): Ceres Seq. ID no. 12321806
  misc_feature (125)..(189): Pfam Name: DHHC zinc finger domain Pfam Description: DHHC zinc finger domain
  misc_feature (26)..(299): Homolog of NCBI NO: 19921954 NR Description: CG1407-PB [Drosophila melanogaster]
  misc_feature (6)..(305): Homolog of NCBI NO: 29791459 NR Description: Similar to RIKEN cDNA 5033406L14 gene [Homo
  misc_feature (227)..(277): Homolog of NCBI NO: 18411456 NR Description: hypothetical protein; protein id: At4g00840.1
  misc_feature (84)..(241): Homolog of NCBI NO: 18411456 NR Description: hypothetical protein; protein id: At4g00840.1
  misc_feature (19)..(139): Homolog of NCBI NO: 11358343 NR Description: hypothetical protein T4C21.210 - Arabidopsis
  misc_feature (159)..(315): Homolog of NCBI NO: 11358343 NR Description: hypothetical protein T4C21.210 - Arabidopsis
  misc_feature (18)..(315): Homolog of NCBI NO: 22331887 NR Description: putative protein
  misc_feature (15)..(320): Homolog of NCBI NO: 7486880 NR Description: hypothetical protein T12H17.140 - Arabidopsis
  misc_feature (19)..(320): Homolog of NCBI NO: 21593364 NR Description: unknown [Arabidopsis thaliana]
  misc_feature (19)..(320): Homolog of NCBI NO: 18416000 NR Description: Expressed protein
FIFFSDQTSSGCFERTPTMAWNVFKFCTALRALGSIMILIVIGIIGFTYYAVVVVNYGPALLIGGVDSLLSVLVLAFFHFLLIMLLWSYFSVVVTDPGGVPTGWRPELDIEKSEGNQALIGEASVGDSSSHGVRYCRKCNQYKPPRSHHCSVCGRCILKMDHHCVWVVNCVGANNYKSFLLFLFYTFLETTVVAVSLLPIFLVFFSDGDGDITVSPGSLAASFVAFVLNIAFALSVLGFLIMHIMLVARNTTTIEAYEKHTVNWPYNVGRKTNFEQVFGSDKMYWFVPLYTEDDKKKLPALGGLDFTSRSESETEPLQSL

SEQ ID NO: 24444 - protein, 302 aa, Arabidopsis thaliana
  peptide (1)..(302): Ceres Seq. ID no. 12321807
  misc_feature (107)..(171): Pfam Name: DHHC zinc finger domain Pfam Description: DHHC zinc finger domain
  misc_feature (8)..(281): Homolog of NCBI NO: 19921954 NR Description: CG1407-PB [Drosophila melanogaster]
  misc_feature (1)..(287): Homolog of NCBI NO: 29791459 NR Description: Similar to RIKEN cDNA 5033406L14 gene [Homo
  misc_feature (209)..(259): Homolog of NCBI NO: 18411456 NR Description: hypothetical protein; protein id: At4g00840.1
  misc_feature (66)..(223): Homolog of NCBI NO: 18411456 NR Description: hypothetical protein; protein id: At4g00840.1
  misc_feature (1)..(121): Homolog of NCBI NO: 11358343 NR Description: hypothetical protein T4C21.210 - Arabidopsis
  misc_feature (141)..(297): Homolog of NCBI NO: 11358343 NR Description: hypothetical protein T4C21.210 - Arabidopsis
  misc_feature (1)..(297): Homolog of NCBI NO: 22331887 NR Description: putative protein
  misc_feature (1)..(302): Homolog of NCBI NO: 7486880 NR Description: hypothetical protein T12H17.140 - Arabidopsis
  misc_feature (1)..(302): Homolog of NCBI NO: 21593364 NR Description: unknown [Arabidopsis thaliana]
  misc_feature (1)..(302): Homolog of NCBI NO: 18416000 NR Description: Expressed protein
MAWNVFKFCTALRALGSIMILIVIGIIGFTYYAVVVVNYGPALLIGGVDSLLSVLVLAFFHFLLIMLLWSYFSVVVTDPGGVPTGWRPELDIEKSEGNQALIGEASVGDSSSHGVRYCRKCNQYKPPRSHHCSVCGRCILKMDHHCVWVVNCVGANNYKSFLLFLFYTFLETTVVAVSLLPIFLVFFSDGDGDITVSPGSLAASFVAFVLNIAFALSVLGFLIMHIMLVARNTTTIEAYEKHTVNWPYNVGRKTNFEQVFGSDKMYWFVPLYTEDDKKKLPALGGLDFTSRSESETEPLQSL

SEQ ID NO: 24445 - protein, 284 aa, Arabidopsis thaliana
  peptide (1)..(284): Ceres Seq. ID no. 12321808
  misc_feature (89)..(153): Pfam Name: DHHC zinc finger domain Pfam Description: DHHC zinc finger domain
  misc_feature (1)..(263): Homolog of NCBI NO: 19921954 NR Description: CG1407-PB [Drosophila melanogaster]
  misc_feature (1)..(269): Homolog of NCBI NO: 29791459 NR Description: Similar to RIKEN cDNA 5033406L14 gene [Homo
  misc_feature (191)..(241): Homolog of NCBI NO: 18411456 NR Description: hypothetical protein; protein id: At4g00840.1
  misc_feature (48)..(205): Homolog of NCBI NO: 18411456 NR Description: hypothetical protein; protein id: At4g00840.1
  misc_feature (1)..(103): Homolog of NCBI NO: 11358343 NR Description: hypothetical protein T4C21.210 - Arabidopsis
  misc_feature (123)..(279): Homolog of NCBI NO: 11358343 NR Description: hypothetical protein T4C21.210 - Arabidopsis
  misc_feature (1)..(279): Homolog of NCBI NO: 22331887 NR Description: putative protein
  misc_feature (1)..(284): Homolog of NCBI NO: 7486880 NR Description: hypothetical protein T12H17.140 - Arabidopsis
  misc_feature (1)..(284): Homolog of NCBI NO: 21593364 NR Description: unknown [Arabidopsis thaliana]
  misc_feature (1)..(284): Homolog of NCBI NO: 18416000 NR Description: Expressed protein
MILIVIGIIGFTYYAVVVVNYGPALLIGGVDSLLSVLVLAFFHFLLIMLLWSYFSVVVTDPGGVPTGWRPELDIEKSEGNQALIGEASVGDSSSHGVRYCRKCNQYKPPRSHHCSVCGRCILKMDHHCVWVVNCVGANNYKSFLLFLFYTFLETTVVAVSLLPIFLVFFSDGDGDITVSPGSLAASFVAFVLNIAFALSVLGFLIMHIMLVARNTTTIEAYEKHTVNWPYNVGRKTNFEQVFGSDKMYWFVPLYTEDDKKKLPALGGLDFTSRSESETEPLQSL

SEQ ID NO: 24446 - DNA, 1188 bp, Arabidopsis thaliana
  misc_feature (1)..(1188): Ceres Seq. ID no. 12325059
  misc_feature: MA Experiment ID: 108434 Result: Up-regulated in Transcription
  misc_feature: MA Experiment 108434 PARAMETER Experiment Name: At_Root_Tips_cDNA_P Parameter: Tissue Value: Root Tips
  misc_feature: MA Experiment ID: 108595 Result: Down-regulated in Transcription
  misc_feature: MA Experiment 108595 PARAMETER Experiment Name: At_Ler-pi_Ovule_cDNA_P Parameter: Plant Line Value: null
  misc_feature: MA Experiment ID: 20000087 Result: Down-regulated in Transcription
  misc_feature: MA Experiment 20000087 PARAMETER Experiment Name: At_100uM_ABA_Mutants_cDNA_P Parameter: Plant Line Value: WS
  misc_feature: MA Experiment 20000087 PARAMETER Experiment Name: At_100uM_ABA_Mutants_cDNA_P Parameter: Timepoint (hr) Value: 6
  misc_feature: MA Experiment 20000087 PARAMETER Experiment Name: At_100uM_ABA_Mutants_cDNA_P Parameter: Tissue Value: Aerial
  misc_feature: MA Experiment 20000087 PARAMETER Experiment Name: At_100uM_ABA_Mutants_cDNA_P Parameter: Treatment Value: 100uM ABA vs. No Treatment
  misc_feature: MA Experiment ID: 20000329 Result: Down-regulated in Transcription
  misc_feature: MA Experiment 20000329 PARAMETER Experiment Name: At_4deg_Cold_Sub_P Parameter: Age (day) Value: 14
  misc_feature: MA Experiment 20000329 PARAMETER Experiment Name: At_4deg_Cold_Sub_P Parameter: Organism Value: A. thaliana
  misc_feature: MA Experiment 20000329 PARAMETER Experiment Name: At_4deg_Cold_Sub_P Parameter: Plant Line Value: WS
  misc_feature: MA Experiment 20000329 PARAMETER Experiment Name: At_4deg_Cold_Sub_P Parameter: Temperature (deg C) Value: 4 vs. 22
  misc_feature: MA Experiment 20000329 PARAMETER Experiment Name: At_4deg_Cold_Sub_P Parameter: Timepoint (hr) Value: 6
  misc_feature: MA Experiment 20000329 PARAMETER Experiment Name: At_4deg_Cold_Sub_P Parameter: Tissue Value: Aerial
  misc_feature: MA Experiment ID: 20000440 Result: Up-regulated in Transcription
  misc_feature: MA Experiment 20000440 PARAMETER Experiment Name: At_Closed-Flower__Sub_P Parameter: Tissue Value: Closed Flower vs. Whole Plant
acccgacccggatctattagacactcgttcttcgtcgttatcaattcggagatgattccgcttcctctgttaccaacgccgattgaaaccaactacagagcttgcaccattccttatagattcccttccgataatctcaagaaagccactcctactgaaatctcctggatcaacgtcttcgccaattccattccttctttcaagaaacgtgcagagagcgataccagtgttccagatgctcctgctagagctaaaatttttgaacaaagatatgcgggatttcttgaaggctggaagaaagatccagagagtaatggtgggccaccagatggtgttattctcggccgagttcgtgagcatttactcagagagttaggatttagggacatattcaagaaagtcaaggatgaggagaatgcaaaggctatatcactatttcctgaagttgtcagtctgagtgatgctattgaagatgacggagaacggttagagaatttggtgagagggatatttgctggaaacatctttgatcttggttctgcacagcttgctgaggttttctcaagggatggcatatctttcttggctacctctcaaaacttggttccacgaccatgggtcatcgatgacttgaacaagttccaagccaaatgggtcaagaagccttggaagaaggcagtgatttttgttgataattctggtgcagacataattttgggtattttgcctttcgcaagagagttgctccgtcgaggaattcaggtggtgctagctgctaacgagctgccagctatcaacgatgtaacataactgagcttacagatatcgtgtcgcagttaaaggatggaaatggccaattgataggcgttgatacttcaaagcttctgattgcaaattcagggaacgatttagcggttattgatctctcaagagtatcgcacgagcttgcttacctttcatctgatgcagacttagtcatcctagaaggcatgggtcgcgggatcgagacaaacctttatgctcagttcaagtgtgattctctcaagatcggaatggtgaagcacgttgaagtagcacagtttctcggaggacgactttacgactgtgtctttaaattcaatgaagttcagagttaattacatttcaatgatattgtactgaatcatccattcgatatatcattttatc

SEQ ID NO: 24447 - protein, 269 aa, Arabidopsis thaliana
  peptide (1)..(269): Ceres Seq. ID no. 12325060
  misc_feature (58)..(269): Pfam Name: Protein of unknown function DUF89 Pfam Description: Protein of unknown function DUF89
  misc_feature (56)..(269): Homolog of NCBI NO: 33112586 NR Description: Probable pantothenate kinase 1 (Pantothenic acid
  misc_feature (113)..(254): Homolog of NCBI NO: 7486028 NR Description: hypothetical protein F23E12.80 - Arabidopsis
  misc_feature (18)..(182): Homolog of NCBI NO: 7486028 NR Description: hypothetical protein F23E12.80 - Arabidopsis
  misc_feature (15)..(178): Homolog of NCBI NO: 25370535 NR Description: hypothetical protein At2g17340 [imported] -
  misc_feature (15)..(269): Homolog of NCBI NO: 18418688 NR Description: putative protein
  misc_feature (15)..(269): Homolog of NCBI NO: 21554145 NR Description: unknown [Arabidopsis thaliana]
  misc_feature (15)..(269): Homolog of NCBI NO: 21554574 NR Description: unknown [Arabidopsis thaliana]
  misc_feature (15)..(269): Homolog of NCBI NO: 18398388 NR Description: expressed protein
  misc_feature (175)..(234): Homolog of NCBI NO: 15227811 NR Description: unknown protein; protein id: At2g17320.1
  misc_feature (18)..(184): Homolog of NCBI NO: 15227811 NR Description: unknown protein; protein id: At2g17320.1
TRPGSIRHSFFVVINSEMIPLPLLPTPIETNYRACTIPYRFPSDNLKKATPTEISWINVFANSIPSFKKRAESDTSVPDAPARAKIFEQRYAGFLEGWKKDPESNGGPPDGVILGRVREHLLRELGFRDIFKKVKDEENAKAISLFPEVVSLSDAIEDDGERLENLVRGIFAGNIFDLGSAQLAEVFSRDGISFLATSQNLVPRPWVIDDLNKFQAKWVKKPWKKAVIFVDNSGADIILGILPFARELLRRGIQVVLAANELPAINDVT

SEQ ID NO: 24448 - protein, 252 aa, Arabidopsis thaliana
  peptide (1)..(252): Ceres Seq. ID no. 12325061
  misc_feature (41)..(252): Pfam Name: Protein of unknown function DUF89 Pfam Description: Protein of unknown function DUF89
  misc_feature (39)..(252): Homolog of NCBI NO: 33112586 NR Description: Probable pantothenate kinase 1 (Pantothenic acid
  misc_feature (96)..(237): Homolog of NCBI NO: 7486028 NR Description: hypothetical protein F23E12.80 - Arabidopsis
  misc_feature (1)..(165): Homolog of NCBI NO: 7486028 NR Description: hypothetical protein F23E12.80 - Arabidopsis
  misc_feature (1)..(161): Homolog of NCBI NO: 25370535 NR Description: hypothetical protein At2g17340 [imported] -
  misc_feature (1)..(252): Homolog of NCBI NO: 18418688 NR Description: putative protein
  misc_feature (1)..(252): Homolog of NCBI NO: 21554145 NR Description: unknown [Arabidopsis thaliana]
  misc_feature (1)..(252): Homolog of NCBI NO: 21554574 NR Description: unknown [Arabidopsis thaliana]
  misc_feature (1)..(252): Homolog of NCBI NO: 18398388 NR Description: expressed protein
  misc_feature (158)..(217): Homolog of NCBI NO: 15227811 NR Description: unknown protein; protein id: At2g17320.1
  misc_feature (1)..(167): Homolog of NCBI NO: 15227811 NR Description: unknown protein; protein id: At2g17320.1
MIPLPLLPTPIETNYRACTIPYRFPSDNLKKATPTEISWINVFANSIPSFKKRAESDTSVPDAPARAKIFEQRYAGFLEGWKKDPESNGGPPDGVILGRVREHLLRELGFRDIFKKVKDEENAKAISLFPEVVSLSDAIEDDGERLENLVRGIFAGNIFDLGSAQLAEVFSRDGISFLATSQNLVPRPWVIDDLNKFQAKWVKKPWKKAVIFVDNSGADIILGILPFARELLRRGIQVVLAANELPAINDVT

SEQ ID NO: 24449 - DNA, 1473 bp, Arabidopsis thaliana
  misc_feature (1)..(1473): Ceres Seq. ID no. 12371852
  misc_feature: MA Experiment ID: 108433 Result: Down-regulated in Transcription
  misc_feature: MA Experiment 108433 PARAMETER Experiment Name: At_rhl_Mutant2_cDNA_P Parameter: Age (day) Value: 7
  misc_feature: MA Experiment 108433 PARAMETER Experiment Name: At_rhl_Mutant2_cDNA_P Parameter: Organism Value: A. thaliana
  misc_feature: MA Experiment 108433 PARAMETER Experiment Name: At_rhl_Mutant2_cDNA_P Parameter: Plant Line Value: rhl Mutant vs. wt landsburg
  misc_feature: MA Experiment 108433 PARAMETER Experiment Name: At_rhl_Mutant2_cDNA_P Parameter: Tissue Value: Roots
  misc_feature: MA Experiment ID: 108435 Result: Up-regulated in Transcription
  misc_feature: MA Experiment 108435 PARAMETER Experiment Name: At_stm_Mutants_cDNA_P Parameter: Plant Line Value: wt Landsburg vs stm
  misc_feature: MA Experiment 108435 PARAMETER Experiment Name: At_stm_Mutants_cDNA_P Parameter: Tissue Value: Shoot Apical Meristem Region
  misc_feature: MA Experiment ID: 108461 Result: Up-regulated in Transcription
  misc_feature: MA Experiment 108461 PARAMETER Experiment Name: At_Germinating_Seeds_cDNA_P Parameter: Age (day) Value: 1 vs. 0
  misc_feature: MA Experiment 108461 PARAMETER Experiment Name: At_Germinating_Seeds_cDNA_P Parameter: Tissue Value: Germinating Seeds
  misc_feature: MA Experiment ID: 108462 Result: Up-regulated in Transcription
  misc_feature: MA Experiment 108462 PARAMETER Experiment Name: At_Germinating_Seeds_cDNA_P Parameter: Age (day) Value: 2 vs. 0
  misc_feature: MA Experiment 108462 PARAMETER Experiment Name: At_Germinating_Seeds_cDNA_P Parameter: Tissue Value: Germinating Seeds
  misc_feature: MA Experiment ID: 108463 Result: Up-regulated in Transcription
  misc_feature: MA Experiment 108463 PARAMETER Experiment Name: At_Germinating_Seeds_cDNA_P Parameter: Age (day) Value: 3 vs. 0
  misc_feature: MA Experiment 108463 PARAMETER Experiment Name: At_Germinating_Seeds_cDNA_P Parameter: Tissue Value: Germinating Seeds
  misc_feature: MA Experiment ID: 108464 Result: Up-regulated in Transcription
  misc_feature: MA Experiment 108464 PARAMETER Experiment Name: At_Germinating_Seeds_cDNA_P Parameter: Age (day) Value: 4 vs. 0
  misc_feature: MA Experiment 108464 PARAMETER Experiment Name: At_Germinating_Seeds_cDNA_P Parameter: Tissue Value: Germinating Seeds
  misc_feature: MA Experiment ID: 108473 Result: Down-regulated in Transcription
  misc_feature: MA Experiment 108473 PARAMETER Experiment Name: At_Drought_Flowers_cDNA_P Parameter: Timepoint (hr) Value: 7 d
  misc_feature: MA Experiment 108473 PARAMETER Experiment Name: At_Drought_Flowers_cDNA_P Parameter: Tissue Value: Flower
  misc_feature: MA Experiment 108473 PARAMETER Experiment Name: At_Drought_Flowers_cDNA_P Parameter: Treatment Value: Drought vs. No Drought
  misc_feature: MA Experiment ID: 108489 Result: Down-regulated in Transcription
  misc_feature: MA Experiment ID: 108561 Result: Down-regulated in Transcription
  misc_feature: MA Experiment 108561 PARAMETER Experiment Name: At_100uM_ABA_cDNA_P Parameter: Timepoint (hr) Value: 6
  misc_feature: MA Experiment 108561 PARAMETER Experiment Name: At_100uM_ABA_cDNA_P Parameter: Tissue Value: Aerial
  misc_feature: MA Experiment 108561 PARAMETER Experiment Name: At_100uM_ABA_cDNA_P Parameter: Treatment Value: 100uM ABA vs. No Treatment
  misc_feature: MA Experiment ID: 108569 Result: Up-regulated in Transcription
  misc_feature: MA Experiment 108569 PARAMETER Experiment Name: At_0.001%_MeJA__cDNA_P Parameter: Timepoint (hr) Value: 6
  misc_feature: MA Experiment 108569 PARAMETER Experiment Name: At_0.001%_MeJA__cDNA_P Parameter: Tissue Value: Aerial
  misc_feature: MA Experiment 108569 PARAMETER Experiment Name: At_0.001%_MeJA__cDNA_P Parameter: Treatment Value: 0.001% MeJA vs. No Treatment
  misc_feature: MA Experiment ID: 108577 Result: Up-regulated in Transcription
  misc_feature: MA Experiment 108577 PARAMETER Experiment Name: At_42deg_Heat_cDNA_P Parameter: Temperature (deg C) Value: 42 vs. 22
  misc_feature: MA Experiment 108577 PARAMETER Experiment Name: At_42deg_Heat_cDNA_P Parameter: Timepoint (hr) Value: 6
  misc_feature: MA Experiment 108577 PARAMETER Experiment Name: At_42deg_Heat_cDNA_P Parameter: Tissue Value: Aerial
  misc_feature: MA Experiment ID: 108668 Result: Down-regulated in Transcription
  misc_feature: MA Experiment 108668 PARAMETER Experiment Name: At_2mM_SA_cDNA_P Parameter: Plant Line Value: WS
  misc_feature: MA Experiment 108668 PARAMETER Experiment Name: At_2mM_SA_cDNA_P Parameter: Timepoint (hr) Value: 6
  misc_feature: MA Experiment 108668 PARAMETER Experiment Name: At_2mM_SA_cDNA_P Parameter: Treatment Value: 2mM SA vs. No Treatment
  misc_feature: MA Experiment ID: 20000069 Result: Down-regulated in Transcription
  misc_feature: MA Experiment 20000069 PARAMETER Experiment Name: At_100uM_ABA_Mutants_cDNA_P Parameter: Plant Line Value: CS23
  misc_feature: MA Experiment 20000069 PARAMETER Experiment Name: At_100uM_ABA_Mutants_cDNA_P Parameter: Timepoint (hr) Value: 6
  misc_feature: MA Experiment 20000069 PARAMETER Experiment Name: At_100uM_ABA_Mutants_cDNA_P Parameter: Tissue Value: Aerial
  misc_feature: MA Experiment 20000069 PARAMETER Experiment Name: At_100uM_ABA_Mutants_cDNA_P Parameter: Treatment Value: 100uM ABA vs. No Treatment
  misc_feature: MA Experiment ID: 20000070 Result: Down-regulated in Transcription
  misc_feature: MA Experiment 20000070 PARAMETER Experiment Name: At_100uM_ABA_Mutants_cDNA_P Parameter: Plant Line Value: CS24
  misc_feature: MA Experiment 20000070 PARAMETER Experiment Name: At_100uM_ABA_Mutants_cDNA_P Parameter: Timepoint (hr) Value: 6
  misc_feature: MA Experiment 20000070 PARAMETER Experiment Name: At_100uM_ABA_Mutants_cDNA_P Parameter: Tissue Value: Aerial
  misc_feature: MA Experiment 20000070 PARAMETER Experiment Name: At_100uM_ABA_Mutants_cDNA_P Parameter: Treatment Value: 100uM ABA vs. No Treatment
  misc_feature: MA Experiment ID: 20000071 Result: Down-regulated in Transcription
  misc_feature: MA Experiment 20000071 PARAMETER Experiment Name: At_100uM_ABA_Mutants_cDNA_P Parameter: Plant Line Value: CS8104
  misc_feature: MA Experiment 20000071 PARAMETER Experiment Name: At_100uM_ABA_Mutants_cDNA_P Parameter: Timepoint (hr) Value: 6
  misc_feature: MA Experiment 20000071 PARAMETER Experiment Name: At_100uM_ABA_Mutants_cDNA_P Parameter: Tissue Value: Aerial
  misc_feature: MA Experiment 20000071 PARAMETER Experiment Name: At_100uM_ABA_Mutants_cDNA_P Parameter: Treatment Value: 100uM ABA vs. No Treatment
  misc_feature: MA Experiment ID: 20000072 Result: Down-regulated in Transcription
  misc_feature: MA Experiment 20000072 PARAMETER Experiment Name: At_100uM_ABA_Mutants_cDNA_P Parameter: Plant Line Value: CS8105
  misc_feature: MA Experiment 20000072 PARAMETER Experiment Name: At_100uM_ABA_Mutants_cDNA_P Parameter: Timepoint (hr) Value: 6
  misc_feature: MA Experiment 20000072 PARAMETER Experiment Name: At_100uM_ABA_Mutants_cDNA_P Parameter: Tissue Value: Aerial
  misc_feature: MA Experiment 20000072 PARAMETER Experiment Name: At_100uM_ABA_Mutants_cDNA_P Parameter: Treatment Value: 100uM ABA vs. No Treatment
  misc_feature: MA Experiment ID: 20000086 Result: Down-regulated in Transcription
  misc_feature: MA Experiment 20000086 PARAMETER Experiment Name: At_100uM_ABA_Mutants_cDNA_P Parameter: Plant Line Value: CS22
  misc_feature: MA Experiment 20000086 PARAMETER Experiment Name: At_100uM_ABA_Mutants_cDNA_P Parameter: Timepoint (hr) Value: 6
  misc_feature: MA Experiment 20000086 PARAMETER Experiment Name: At_100uM_ABA_Mutants_cDNA_P Parameter: Tissue Value: Aerial
  misc_feature: MA Experiment 20000086 PARAMETER Experiment Name: At_100uM_ABA_Mutants_cDNA_P Parameter: Treatment Value: 100uM ABA vs. No Treatment
  misc_feature: MA Experiment ID: 20000087 Result: Down-regulated in Transcription
  misc_feature: MA Experiment 20000087 PARAMETER Experiment Name: At_100uM_ABA_Mutants_cDNA_P Parameter: Plant Line Value: WS
  misc_feature: MA Experiment 20000087 PARAMETER Experiment Name: At_100uM_ABA_Mutants_cDNA_P Parameter: Timepoint (hr) Value: 6
  misc_feature: MA Experiment 20000087 PARAMETER Experiment Name: At_100uM_ABA_Mutants_cDNA_P Parameter: Tissue Value: Aerial
  misc_feature: MA Experiment 20000087 PARAMETER Experiment Name: At_100uM_ABA_Mutants_cDNA_P Parameter: Treatment Value: 100uM ABA vs. No Treatment
  misc_feature: MA Experiment ID: 20000088 Result: Down-regulated in Transcription
  misc_feature: MA Experiment 20000088 PARAMETER Experiment Name: At_100uM_ABA_Mutants_cDNA_P Parameter: Plant Line Value: Landsberg
  misc_feature: MA Experiment 20000088 PARAMETER Experiment Name: At_100uM_ABA_Mutants_cDNA_P Parameter: Timepoint (hr) Value: 6
  misc_feature: MA Experiment 20000088 PARAMETER Experiment Name: At_100uM_ABA_Mutants_cDNA_P Parameter: Tissue Value: Aerial
  misc_feature: MA Experiment 20000088 PARAMETER Experiment Name: At_100uM_ABA_Mutants_cDNA_P Parameter: Treatment Value: 100uM ABA vs. No Treatment
  misc_feature: MA Experiment ID: 20000089 Result: Down-regulated in Transcription
  misc_feature: MA Experiment ID: 20000090 Result: Down-regulated in Transcription
  misc_feature: MA Experiment ID: 20000111 Result: Up-regulated in Transcription
  misc_feature: MA Experiment 20000111 PARAMETER Experiment Name: At_42deg_Heat_cDNA_P Parameter: Temperature (deg C) Value: 42 vs. 22
  misc_feature: MA Experiment 20000111 PARAMETER Experiment Name: At_42deg_Heat_cDNA_P Parameter: Timepoint (hr) Value: 6
  misc_feature: MA Experiment 20000111 PARAMETER Experiment Name: At_42deg_Heat_cDNA_P Parameter: Tissue Value: Aerial
  misc_feature: MA Experiment ID: 20000113 Result: Up-regulated in Transcription
  misc_feature: MA Experiment 20000113 PARAMETER Experiment Name: At_42deg_Heat_cDNA_P Parameter: Temperature (deg C) Value: 42 vs. 22
  misc_feature: MA Experiment 20000113 PARAMETER Experiment Name: At_42deg_Heat_cDNA_P Parameter: Timepoint (hr) Value: 8
  misc_feature: MA Experiment 20000113 PARAMETER Experiment Name: At_42deg_Heat_cDNA_P Parameter: Tissue Value: Aerial
  misc_feature: MA Experiment ID: 20000117 Result: Down-regulated in Transcription
  misc_feature: MA Experiment 20000117 PARAMETER Experiment Name: At_100uM_ABA_Mutants_cDNA_P Parameter: Plant Line Value: Columbia
  misc_feature: MA Experiment 20000117 PARAMETER Experiment Name: At_100uM_ABA_Mutants_cDNA_P Parameter: Timepoint (hr) Value: 6
  misc_feature: MA Experiment 20000117 PARAMETER Experiment Name: At_100uM_ABA_Mutants_cDNA_P Parameter: Tissue Value: Aerial
  misc_feature: MA Experiment 20000117 PARAMETER Experiment Name: At_100uM_ABA_Mutants_cDNA_P Parameter: Treatment Value: 100uM ABA vs. No Treatment
  misc_feature: MA Experiment ID: 20000173 Result: Up-regulated in Transcription
  misc_feature: MA Experiment 20000173 PARAMETER Experiment Name: At_42deg_Heat_P Parameter: Age (day) Value: 14
  misc_feature: MA Experiment 20000173 PARAMETER Experiment Name: At_42deg_Heat_P Parameter: Organism Value: A. thaliana
  misc_feature: MA Experiment 20000173 PARAMETER Experiment Name: At_42deg_Heat_P Parameter: Plant Line Value: WS
  misc_feature: MA Experiment 20000173 PARAMETER Experiment Name: At_42deg_Heat_P Parameter: Temperature (deg C) Value: 42 vs. 22
  misc_feature: MA Experiment 20000173 PARAMETER Experiment Name: At_42deg_Heat_P Parameter: Timepoint (hr) Value: 6
  misc_feature: MA Experiment 20000173 PARAMETER Experiment Name: At_42deg_Heat_P Parameter: Tissue Value: Aerial
  misc_feature: MA Experiment ID: 20000179 Result: Up-regulated in Transcription
  misc_feature: MA Experiment 20000179 PARAMETER Experiment Name: At_Germinating_Seeds_P Parameter: Age (hr) Value: 6 vs. 0
  misc_feature: MA Experiment 20000179 PARAMETER Experiment Name: At_Germinating_Seeds_P Parameter: Tissue Value: Germinating Seeds
  misc_feature: MA Experiment ID: 20000180 Result: Up-regulated in Transcription
  misc_feature: MA Experiment 20000180 PARAMETER Experiment Name: At_Germinating_Seeds_P Parameter: Age (hr) Value: 24 vs. 0
  misc_feature: MA Experiment 20000180 PARAMETER Experiment Name: At_Germinating_Seeds_P Parameter: Tissue Value: Germinating Seeds
  misc_feature: MA Experiment ID: 20000182 Result: Down-regulated in Transcription
  misc_feature: MA Experiment 20000182 PARAMETER Experiment Name: At_2mM_SA_P Parameter: Age (day) Value: 14
  misc_feature: MA Experiment 20000182 PARAMETER Experiment Name: At_2mM_SA_P Parameter: Organism Value: A. thaliana
  misc_feature: MA Experiment 20000182 PARAMETER Experiment Name: At_2mM_SA_P Parameter: Plant Line Value: WS
  misc_feature: MA Experiment 20000182 PARAMETER Experiment Name: At_2mM_SA_P Parameter: Timepoint (hr) Value: 6
  misc_feature: MA Experiment 20000182 PARAMETER Experiment Name: At_2mM_SA_P Parameter: Tissue Value: Aerial
  misc_feature: MA Experiment 20000182 PARAMETER Experiment Name: At_2mM_SA_P Parameter: Treatment Value: 2mM SA vs. No Treatment
  misc_feature: MA Experiment ID: 20000184 Result: Up-regulated in Transcription
  misc_feature: MA Experiment 20000184 PARAMETER Experiment Name: At_Shoots__P Parameter: Age (day) Value: 7
  misc_feature: MA Experiment 20000184 PARAMETER Experiment Name: At_Shoots__P Parameter: Tissue Value: Shoots vs. Whole Plant
  misc_feature: MA Experiment ID: 20000185 Result: Up-regulated in Transcription
  misc_feature: MA Experiment 20000185 PARAMETER Experiment Name: At_Roots__P Parameter: Age (day) Value: 7 vs. 21
  misc_feature: MA Experiment 20000185 PARAMETER Experiment Name: At_Roots__P Parameter: Organism Value: A. thaliana
  misc_feature: MA Experiment 20000185 PARAMETER Experiment Name: At_Roots__P Parameter: Tissue Value: Roots vs. Whole Plant
  misc_feature: MA Experiment ID: 20000213 Result: Up-regulated in Transcription
  misc_feature: MA Experiment 20000213 PARAMETER Experiment Name: At_4deg_Cold_P Parameter: Timepoint (hr) Value: 2
  misc_feature: MA Experiment ID: 20000224 Result: Up-regulated in Transcription
  misc_feature: MA Experiment ID: 20000234 Result: Up-regulated in Transcription
  misc_feature: MA Experiment 20000234 PARAMETER Experiment Name: At_Siliques_P Parameter: Age (day) Value: 21
  misc_feature: MA Experiment 20000234 PARAMETER Experiment Name: At_Siliques_P Parameter: Organism Value: A. thaliana
  misc_feature: MA Experiment 20000234 PARAMETER Experiment Name: At_Siliques_P Parameter: Plant Line Value: WS
  misc_feature: MA Experiment 20000234 PARAMETER Experiment Name: At_Siliques_P Parameter: Tissue Value: Less Than 5mm Siliques vs. Whole Plant
  misc_feature: MA Experiment ID: 20000264 Result: Up-regulated in Transcription
  misc_feature: MA Experiment 20000264 PARAMETER Experiment Name: At_Open_Flower_P Parameter: Age (day) Value: 21
  misc_feature: MA Experiment 20000264 PARAMETER Experiment Name: At_Open_Flower_P Parameter: Plant Line Value: WS
  misc_feature: MA Experiment 20000264 PARAMETER Experiment Name: At_Open_Flower_P Parameter: Tissue Value: Open Flower vs. Whole Plant
  misc_feature: MA Experiment ID: 20000265 Result: Up-regulated in Transcription
  misc_feature: MA Experiment 20000265 PARAMETER Experiment Name: At_Open_Flower_P Parameter: Age (day) Value: 21
  misc_feature: MA Experiment 20000265 PARAMETER Experiment Name: At_Open_Flower_P Parameter: Plant Line Value: WS
  misc_feature: MA Experiment 20000265 PARAMETER Experiment Name: At_Open_Flower_P Parameter: Tissue Value: Closed Flower vs. Whole Plant
  misc_feature: MA Experiment ID: 20000286 Result: Up-regulated in Transcription
  misc_feature: MA Experiment 20000286 PARAMETER Experiment Name: At_Open_Flower_P Parameter: Age (day) Value: 21
  misc_feature: MA Experiment 20000286 PARAMETER Experiment Name: At_Open_Flower_P Parameter: Plant Line Value: WS
  misc_feature: MA Experiment 20000286 PARAMETER Experiment Name: At_Open_Flower_P Parameter: Tissue Value: Half Open vs. Whole Plant
  misc_feature: MA Experiment ID: 20000308 Result: Up-regulated in Transcription
  misc_feature: MA Experiment 20000308 PARAMETER Experiment Name: At_100mM_NaCl__P Parameter: Age (day) Value: 17
  misc_feature: MA Experiment 20000308 PARAMETER Experiment Name: At_100mM_NaCl__P Parameter: Organism Value: A. thaliana
  misc_feature: MA Experiment 20000308 PARAMETER Experiment Name: At_100mM_NaCl__P Parameter: Plant Line Value: WS
  misc_feature: MA Experiment 20000308 PARAMETER Experiment Name: At_100mM_NaCl__P Parameter: Timepoint (hr) Value: 72
  misc_feature: MA Experiment 20000308 PARAMETER Experiment Name: At_100mM_NaCl__P Parameter: Tissue Value: Whole Plant
  misc_feature: MA Experiment 20000308 PARAMETER Experiment Name: At_100mM_NaCl__P Parameter: Treatment Value: 100mM NaCl vs. No Treatment
  misc_feature: MA Experiment ID: 20000436 Result: Up-regulated in Transcription
  misc_feature: MA Experiment 20000436 PARAMETER Experiment Name: At_Drought_P Parameter: Age (day) Value: 7
  misc_feature: MA Experiment 20000436 PARAMETER Experiment Name: At_Drought_P Parameter: Organism Value: A. thaliana
  misc_feature: MA Experiment 20000436 PARAMETER Experiment Name: At_Drought_P Parameter: Plant Line Value: WS
  misc_feature: MA Experiment 20000436 PARAMETER Experiment Name: At_Drought_P Parameter: Timepoint (hr) Value: 12
  misc_feature: MA Experiment 20000436 PARAMETER Experiment Name: At_Drought_P Parameter: Tissue Value: Whole Plant
  misc_feature: MA Experiment 20000436 PARAMETER Experiment Name: At_Drought_P Parameter: Treatment Value: Drought vs. No Drought
  misc_feature: MA Experiment ID: 20000439 Result: Up-regulated in Transcription
  misc_feature: MA Experiment 20000439 PARAMETER Experiment Name: At_Roots__P Parameter: Age (day) Value: 14 vs. 21
  misc_feature: MA Experiment 20000439 PARAMETER Experiment Name: At_Roots__P Parameter: Organism Value: A. thaliana
  misc_feature: MA Experiment 20000439 PARAMETER Experiment Name: At_Roots__P Parameter: Tissue Value: Roots vs. Whole Plant
  misc_feature: MA Experiment ID: 20000452 Result: Up-regulated in Transcription
  misc_feature: MA Experiment 20000452 PARAMETER Experiment Name: At_CS6879_Shoots-Roots_P Parameter: Age (day) Value: 14
  misc_feature: MA Experiment 20000452 PARAMETER Experiment Name: At_CS6879_Shoots-Roots_P Parameter: Organism Value: A. thaliana
  misc_feature: MA Experiment 20000452 PARAMETER Experiment Name: At_CS6879_Shoots-Roots_P Parameter: Plant Line Value: CS6879 vs. WS
  misc_feature: MA Experiment 20000452 PARAMETER Experiment Name: At_CS6879_Shoots-Roots_P Parameter: Tissue Value: Shoots
  misc_feature: MA Experiment ID: 20000455 Result: Up-regulated in Transcription
  misc_feature: MA Experiment 20000455 PARAMETER Experiment Name: At_100uM_ABA_P Parameter: Age (day) Value: 16
  misc_feature: MA Experiment 20000455 PARAMETER Experiment Name: At_100uM_ABA_P Parameter: Organism Value: A. thaliana
  misc_feature: MA Experiment 20000455 PARAMETER Experiment Name: At_100uM_ABA_P Parameter: Plant Line Value: WS
  misc_feature: MA Experiment 20000455 PARAMETER Experiment Name: At_100uM_ABA_P Parameter: Timepoint (hr) Value: 48
  misc_feature: MA Experiment 20000455 PARAMETER Experiment Name: At_100uM_ABA_P Parameter: Tissue Value: Aerial
  misc_feature: MA Experiment 20000455 PARAMETER Experiment Name: At_100uM_ABA_P Parameter: Treatment Value: 100uM ABA vs. No Treatment
  misc_feature: MA Experiment ID: 20000495 Result: Down-regulated in Transcription
  misc_feature: MA Experiment 20000495 PARAMETER Experiment Name: At_Guard_Cells_P Parameter: Harvest Date Value: 8/2/2002
  misc_feature: MA Experiment 20000495 PARAMETER Experiment Name: At_Guard_Cells_P Parameter: Organism Value: A. thaliana
  misc_feature: MA Experiment 20000495 PARAMETER Experiment Name: At_Guard_Cells_P Parameter: Tissue Value: Guard Cells vs. Leaves
  misc_feature: MA Experiment ID: 20000573 Result: Down-regulated in Transcription
  misc_feature: MA Experiment 20000573 PARAMETER Experiment Name: At_100uM_ABA_Mutants__P Parameter: Organism Value: A. thaliana
  misc_feature: MA Experiment 20000573 PARAMETER Experiment Name: At_100uM_ABA_Mutants__P Parameter: Plant Line Value: CS22 vs. Ler wt
  misc_feature: MA Experiment 20000573 PARAMETER Experiment Name: At_100uM_ABA_Mutants__P Parameter: Timepoint (hr) Value: N/A
  misc_feature: MA Experiment 20000573 PARAMETER Experiment Name: At_100uM_ABA_Mutants__P Parameter: Tissue Value: Whole Plant
  misc_feature: MA Experiment 20000573 PARAMETER Experiment Name: At_100uM_ABA_Mutants__P Parameter: Treatment Value: None
  misc_feature: MA Experiment ID: 20001248 Result: Down-regulated in Transcription
  misc_feature: MA Experiment 20001248 PARAMETER Experiment Name: At_Far-red-induction_P Parameter: Age (day) Value: 7
  misc_feature: MA Experiment 20001248 PARAMETER Experiment Name: At_Far-red-induction_P Parameter: Light Value: Far-red vs. White
  misc_feature: MA Experiment 20001248 PARAMETER Experiment Name: At_Far-red-induction_P Parameter: Organism Value: A. thaliana
  misc_feature: MA Experiment 20001248 PARAMETER Experiment Name: At_Far-red-induction_P Parameter: Plant Line Value: Columbia
  misc_feature: MA Experiment 20001248 PARAMETER Experiment Name: At_Far-red-induction_P Parameter: Timepoint (hr) Value: 4
  misc_feature: MA Experiment 20001248 PARAMETER Experiment Name: At_Far-red-induction_P Parameter: Tissue Value: Whole Plant
  misc_feature: MA Experiment ID: 20001450 Result: Down-regulated in Transcription
  misc_feature: MA Experiment 20001450 PARAMETER Experiment Name: At_Far-red-induction_P Parameter: Age (day) Value: 7
  misc_feature: MA Experiment 20001450 PARAMETER Experiment Name: At_Far-red-induction_P Parameter: Light Value: Far-red vs. White
  misc_feature: MA Experiment 20001450 PARAMETER Experiment Name: At_Far-red-induction_P Parameter: Organism Value: A. thaliana
  misc_feature: MA Experiment 20001450 PARAMETER Experiment Name: At_Far-red-induction_P Parameter: Plant Line Value: Columbia
  misc_feature: MA Experiment 20001450 PARAMETER Experiment Name: At_Far-red-induction_P Parameter: Timepoint (hr) Value: 8
  misc_feature: MA Experiment 20001450 PARAMETER Experiment Name: At_Far-red-induction_P Parameter: Tissue Value: Whole Plant
  misc_feature: MA Experiment ID: 20001451 Result: Down-regulated in Transcription
  misc_feature: MA Experiment 20001451 PARAMETER Experiment Name: At_Far-red-induction_P Parameter: Age (day) Value: 7
  misc_feature: MA Experiment 20001451 PARAMETER Experiment Name: At_Far-red-induction_P Parameter: Light Value: Far-red vs. White
  misc_feature: MA Experiment 20001451 PARAMETER Experiment Name: At_Far-red-induction_P Parameter: Organism Value: A. thaliana
  misc_feature: MA Experiment 20001451 PARAMETER Experiment Name: At_Far-red-induction_P Parameter: Plant Line Value: Columbia
  misc_feature: MA Experiment 20001451 PARAMETER Experiment Name: At_Far-red-induction_P Parameter: Timepoint (hr) Value: 24
  misc_feature: MA Experiment 20001451 PARAMETER Experiment Name: At_Far-red-induction_P Parameter: Tissue Value: Whole Plant
  misc_feature: MA Experiment ID: 20001503 Result: Up-regulated in Transcription
  misc_feature: MA Experiment 20001503 PARAMETER Experiment Name: At_Far-red-enriched_P Parameter: Age (day) Value: 7
  misc_feature: MA Experiment 20001503 PARAMETER Experiment Name: At_Far-red-enriched_P Parameter: Light Value: Far-red enriched vs. White
  misc_feature: MA Experiment 20001503 PARAMETER Experiment Name: At_Far-red-enriched_P Parameter: Organism Value: A. thaliana
  misc_feature: MA Experiment 20001503 PARAMETER Experiment Name: At_Far-red-enriched_P Parameter: Plant Line Value: Columbia
  misc_feature: MA Experiment 20001503 PARAMETER Experiment Name: At_Far-red-enriched_P Parameter: Timepoint (day) Value: 3
  misc_feature: MA Experiment 20001503 PARAMETER Experiment Name: At_Far-red-enriched_P Parameter: Tissue Value: Whole Plant
  misc_feature: MA Experiment ID: 20001504 Result: Up-regulated in Transcription
  misc_feature: MA Experiment 20001504 PARAMETER Experiment Name: At_Far-red-enriched_P Parameter: Age (day) Value: 10
  misc_feature: MA Experiment 20001504 PARAMETER Experiment Name: At_Far-red-enriched_P Parameter: Light Value: Far-red enriched vs. White
  misc_feature: MA Experiment 20001504 PARAMETER Experiment Name: At_Far-red-enriched_P Parameter: Organism Value: A. thaliana
  misc_feature: MA Experiment 20001504 PARAMETER Experiment Name: At_Far-red-enriched_P Parameter: Plant Line Value: Columbia
  misc_feature: MA Experiment 20001504 PARAMETER Experiment Name: At_Far-red-enriched_P Parameter: Timepoint (day) Value: 6
  misc_feature: MA Experiment 20001504 PARAMETER Experiment Name: At_Far-red-enriched_P Parameter: Tissue Value: Whole Plant
  misc_feature: MA Experiment ID: 20001555 Result: Up-regulated in Transcription
  misc_feature: MA Experiment 20001555 PARAMETER Experiment Name: At_Drought_Soil_Dry_P Parameter: Age (day) Value: 24
  misc_feature: MA Experiment 20001555 PARAMETER Experiment Name: At_Drought_Soil_Dry_P Parameter: Organism Value: A. thaliana
  misc_feature: MA Experiment 20001555 PARAMETER Experiment Name: At_Drought_Soil_Dry_P Parameter: Plant Line Value: WS
  misc_feature: MA Experiment 20001555 PARAMETER Experiment Name: At_Drought_Soil_Dry_P Parameter: Post Timepoint (hr) Value: None
  misc_feature: MA Experiment 20001555 PARAMETER Experiment Name: At_Drought_Soil_Dry_P Parameter: Post-Treatment Value: None
  misc_feature: MA Experiment 20001555 PARAMETER Experiment Name: At_Drought_Soil_Dry_P Parameter: Timepoint (day) Value: 10
  misc_feature: MA Experiment 20001555 PARAMETER Experiment Name: At_Drought_Soil_Dry_P Parameter: Treatment Value: Drought vs. No Drought
  misc_feature: MA Experiment ID: 20001556 Result: Up-regulated in Transcription
  misc_feature: MA Experiment 20001556 PARAMETER Experiment Name: At_Drought_Soil_Dry_P Parameter: Age (day) Value: 26
  misc_feature: MA Experiment 20001556 PARAMETER Experiment Name: At_Drought_Soil_Dry_P Parameter: Organism Value: A. thaliana
  misc_feature: MA Experiment 20001556 PARAMETER Experiment Name: At_Drought_Soil_Dry_P Parameter: Plant Line Value: WS
  misc_feature: MA Experiment 20001556 PARAMETER Experiment Name: At_Drought_Soil_Dry_P Parameter: Post Timepoint (hr) Value: None
  misc_feature: MA Experiment 20001556 PARAMETER Experiment Name: At_Drought_Soil_Dry_P Parameter: Post-Treatment Value: None
  misc_feature: MA Experiment 20001556 PARAMETER Experiment Name: At_Drought_Soil_Dry_P Parameter: Timepoint (day) Value: 12
  misc_feature: MA Experiment 20001556 PARAMETER Experiment Name: At_Drought_Soil_Dry_P Parameter: Treatment Value: Drought vs. No Drought
  misc_feature: MA Experiment ID: 20001557 Result: Up-regulated in Transcription
  misc_feature: MA Experiment 20001557 PARAMETER Experiment Name: At_Drought_Soil_Dry_P Parameter: Age (day) Value: 27
  misc_feature: MA Experiment 20001557 PARAMETER Experiment Name: At_Drought_Soil_Dry_P Parameter: Organism Value: A. thaliana
  misc_feature: MA Experiment 20001557 PARAMETER Experiment Name: At_Drought_Soil_Dry_P Parameter: Plant Line Value: WS
  misc_feature: MA Experiment 20001557 PARAMETER Experiment Name: At_Drought_Soil_Dry_P Parameter: Post Timepoint (hr) Value: 3
  misc_feature: MA Experiment 20001557 PARAMETER Experiment Name: At_Drought_Soil_Dry_P Parameter: Post-Treatment Value: Re-Water vs. No Drought
  misc_feature: MA Experiment 20001557 PARAMETER Experiment Name: At_Drought_Soil_Dry_P Parameter: Timepoint (day) Value: 13
  misc_feature: MA Experiment 20001557 PARAMETER Experiment Name: At_Drought_Soil_Dry_P Parameter: Treatment Value: Drought vs. No Drought
  misc_feature: MA Experiment ID: 20001558 Result: Up-regulated in Transcription
  misc_feature: MA Experiment 20001558 PARAMETER Experiment Name: At_Drought_Soil_Dry_P Parameter: Age (day) Value: 27
  misc_feature: MA Experiment 20001558 PARAMETER Experiment Name: At_Drought_Soil_Dry_P Parameter: Organism Value: A. thaliana
  misc_feature: MA Experiment 20001558 PARAMETER Experiment Name: At_Drought_Soil_Dry_P Parameter: Plant Line Value: WS
  misc_feature: MA Experiment 20001558 PARAMETER Experiment Name: At_Drought_Soil_Dry_P Parameter: Post Timepoint (hr) Value: 6
  misc_feature: MA Experiment 20001558 PARAMETER Experiment Name: At_Drought_Soil_Dry_P Parameter: Post-Treatment Value: Re-Water vs. No Drought
  misc_feature: MA Experiment 20001558 PARAMETER Experiment Name: At_Drought_Soil_Dry_P Parameter: Timepoint (day) Value: 13
  misc_feature: MA Experiment 20001558 PARAMETER Experiment Name: At_Drought_Soil_Dry_P Parameter: Treatment Value: Drought vs. No Drought
  misc_feature: MA Experiment ID: 20001559 Result: Up-regulated in Transcription
  misc_feature: MA Experiment 20001559 PARAMETER Experiment Name: At_Drought_Soil_Dry_P Parameter: Age (day) Value: 28
  misc_feature: MA Experiment 20001559 PARAMETER Experiment Name: At_Drought_Soil_Dry_P Parameter: Organism Value: A. thaliana
  misc_feature: MA Experiment 20001559 PARAMETER Experiment Name: At_Drought_Soil_Dry_P Parameter: Plant Line Value: WS
  misc_feature: MA Experiment 20001559 PARAMETER Experiment Name: At_Drought_Soil_Dry_P Parameter: Post Timepoint (hr) Value: 29
  misc_feature: MA Experiment 20001559 PARAMETER Experiment Name: At_Drought_Soil_Dry_P Parameter: Post-Treatment Value: Re-Water vs. No Drought
  misc_feature: MA Experiment 20001559 PARAMETER Experiment Name: At_Drought_Soil_Dry_P Parameter: Timepoint (day) Value: 14
  misc_feature: MA Experiment 20001559 PARAMETER Experiment Name: At_Drought_Soil_Dry_P Parameter: Treatment Value: Drought vs. No Drought
  misc_feature: MA Experiment ID: 20001904 Result: Up-regulated in Transcription
  misc_feature: MA Experiment 20001904 PARAMETER Experiment Name: At_Drought_Reproduction_P Parameter: Age (day) Value: 37
  misc_feature: MA Experiment 20001904 PARAMETER Experiment Name: At_Drought_Reproduction_P Parameter: Organism Value: A. thaliana
  misc_feature: MA Experiment 20001904 PARAMETER Experiment Name: At_Drought_Reproduction_P Parameter: Plant Line Value: WS
  misc_feature: MA Experiment 20001904 PARAMETER Experiment Name: At_Drought_Reproduction_P Parameter: Timepoint (day) Value: 7
  misc_feature: MA Experiment 20001904 PARAMETER Experiment Name: At_Drought_Reproduction_P Parameter: Tissue Value: Rosettes
  misc_feature: MA Experiment 20001904 PARAMETER Experiment Name: At_Drought_Reproduction_P Parameter: Treatment Value: Drought vs. No Drought
  misc_feature: MA Experiment ID: 20001911 Result: Down-regulated in Transcription
  misc_feature: MA Experiment 20001911 PARAMETER Experiment Name: At_Drought_Reproduction_P Parameter: Age (day) Value: 40
  misc_feature: MA Experiment 20001911 PARAMETER Experiment Name: At_Drought_Reproduction_P Parameter: Organism Value: A. thaliana
  misc_feature: MA Experiment 20001911 PARAMETER Experiment Name: At_Drought_Reproduction_P Parameter: Plant Line Value: WS
  misc_feature: MA Experiment 20001911 PARAMETER Experiment Name: At_Drought_Reproduction_P Parameter: Timepoint (day) Value: 10
  misc_feature: MA Experiment 20001911 PARAMETER Experiment Name: At_Drought_Reproduction_P Parameter: Tissue Value: Flowers
  misc_feature: MA Experiment 20001911 PARAMETER Experiment Name: At_Drought_Reproduction_P Parameter: Treatment Value: Drought vs. No Drought
  misc_feature: Phenotype: FERTILITY Fertility-Reduced
  misc_feature: Phenotype: SEED Color-Light
  misc_feature: Phenotype: SEED Color-Light
  misc_feature: Phenotype: SEED Color-Light
  misc_feature: Phenotype: WHOLE SEEDLING Dark Green
  misc_feature: Phenotype: WHOLE PLANT Size-Small
  misc_feature: Phenotype: FLOWERS Other
  misc_feature: Phenotype: FLOWERS Other
  misc_feature: Phenotype: INFLORESCENCE Strength-Weak
  misc_feature: Phenotype: FERTILITY Fertility-Reduced
  misc_feature: Phenotype: SEED Color-Light
aaatacacctaacttgtttagtacacaacagcaacatcaaactctaataaacccaagttggtgtatactataatggtgatggctggtgcttcttctttggatgagatcagacaggctcagagagctgatggacctgcaggcatcttggctattggcactgctaaccctgagaaccatgtgcttcaggcggagtatcctgactactacttccgcatcaccaacagtgaacacatgaccgacctcaaggagaagttcaagcgcatgtgcgacaagtcgacaattcggaaacgtcacatgcatctgacggaggaattcctcaaggaaaacccacacatgtgtgcttacatggctccttctctggacaccagacaggacatcgtggtggtcgaagtccctaagctaggcaaagaagcggcagtgaaggccatcaaggagtggggccagcccaagtcaaagatcactcatgtcgtcttctgcactacctccggcgtcgacatgcctggtgctgactaccagctcaccaagcttcttggtctccgtccttccgtcaagcgtctcatgatgtaccagcaaggttgcttcgccggcggtactgtcctccgtatcgctaaggatctcgccgagaacaatcgtggagcacgtgtcctcgttgtctgctctgagatcacagccgttaccttccgtggtccctctgacacccaccttgactccctcgtcggtcaggctcttttcagtgatggcgccgccgcactcattgtggggtcggaccctgacacatctgtcggagagaaacccatctttgagatggtgtctgccgctcagaccatccttccagactctgatggtgccatagacggacatttgagggaagttggtctcaccttccatctcctcaaggatgttcccggcctcatctccaagaacattgtgaagagtctagacgaagcgtttaaacctttggggataagtgactggaactccctcttctggatagcccaccctggaggtccagcgatcctagaccaggtggagataaagctaggactaaaggaagagaagatgagggcgacacgtcacgtgttgagcgagtatggaaacatgtcgagcgcgtgcgttctcttcatactagacgagatgaggaggaagtcagctaaggatggtgtggccacgacaggagaagggttggagtggggtgtcttgtttggtttcggaccaggtctcactgttgagacagtcgtcttgcacagcgttcctctctaaacagaacgcttgccttctatctgcctacctacctacgcaaaactttaatcctgtcttatgttttatataatataatcattatatgtttacgcaataattaaggaagaattcatttgatgtgatatgtgatatgtgctggacaggtctattcgactgtttttgtactctcttttttgtgtctttttacaatattaaatctatgggtcttgaatc

SEQ ID NO: 24450 - protein, 395 aa, Arabidopsis thaliana
  peptide (1)..(395): Ceres Seq. ID no. 12371853
  misc_feature (6)..(233): Pfam Name: Chalcone and stilbene synthases, N-terminal domain Pfam Description: Chalcone and stilbene synthases, N-terminal
  misc_feature (1)..(395): Homolog of NCBI NO: 6684415 NR Description: chalcone synthase [Halimolobos perplexa var.
  misc_feature (1)..(395): Homolog of NCBI NO: 6684427 NR Description: chalcone synthase [Capsella rubella]
  misc_feature (1)..(395): Homolog of NCBI NO: 15810020 NR Description: AT5g13930/MAC12_11 [Arabidopsis thaliana]
  misc_feature (1)..(395): Homolog of NCBI NO: 12002439 NR Description: chalcone synthase [Arabidopsis korshinskyi]
  misc_feature (1)..(395): Homolog of NCBI NO: 6684414 NR Description: chalcone synthase [Arabidopsis griffithiana]
  misc_feature (1)..(395): Homolog of NCBI NO: 6684416 NR Description: chalcone synthase [Arabidopsis halleri]
  misc_feature (3)..(395): Homolog of NCBI NO: 21593365 NR Description: chalcone synthase (naringenin-chalcone synthase)
  misc_feature (1)..(395): Homolog of NCBI NO: 15865172 NR Description: naringenin-chalcone synthase [Arabidopsis
  misc_feature (1)..(395): Homolog of NCBI NO: 1246019 NR Description: chalcone synthase; CHS [Arabidopsis]
  misc_feature (1)..(395): Homolog of NCBI NO: 15240753 NR Description: chalcone synthase (naringenin-chalcone synthase)
MVMAGASSLDEIRQAQRADGPAGILAIGTANPENHVLQAEYPDYYFRITNSEHMTDLKEKFKRMCDKSTIRKRHMHLTEEFLKENPHMCAYMAPSLDTRQDIVVVEVPKLGKEAAVKAIKEWGQPKSKITHVVFCTTSGVDMPGADYQLTKLLGLRPSVKRLMMYQQGCFAGGTVLRIAKDLAENNRGARVLVVCSEITAVTFRGPSDTHLDSLVGQALFSDGAAALIVGSDPDTSVGEKPIFEMVSAAQTILPDSDGAIDGHLREVGLTFHLLKDVPGLISKNIVKSLDEAFKPLGISDWNSLFWIAHPGGPAILDQVEIKLGLKEEKMRATRHVLSEYGNMSSACVLFILDEMRRKSAKDGVATTGEGLEWGVLFGFGPGLTVETVVLHSVPL

SEQ ID NO: 24451 - protein, 393 aa, Arabidopsis thaliana
  peptide (1)..(393): Ceres Seq. ID no. 12371854
  misc_feature (4)..(231): Pfam Name: Chalcone and stilbene synthases, N-terminal domain Pfam Description: Chalcone and stilbene synthases, N-terminal
  misc_feature (1)..(393): Homolog of NCBI NO: 6684415 NR Description: chalcone synthase [Halimolobos perplexa var.
  misc_feature (1)..(393): Homolog of NCBI NO: 6684427 NR Description: chalcone synthase [Capsella rubella]
  misc_feature (1)..(393): Homolog of NCBI NO: 15810020 NR Description: AT5g13930/MAC12_11 [Arabidopsis thaliana]
  misc_feature (1)..(393): Homolog of NCBI NO: 12002439 NR Description: chalcone synthase [Arabidopsis korshinskyi]
  misc_feature (1)..(393): Homolog of NCBI NO: 6684414 NR Description: chalcone synthase [Arabidopsis griffithiana]
  misc_feature (1)..(393): Homolog of NCBI NO: 6684416 NR Description: chalcone synthase [Arabidopsis halleri]
  misc_feature (1)..(393): Homolog of NCBI NO: 21593365 NR Description: chalcone synthase (naringenin-chalcone synthase)
  misc_feature (1)..(393): Homolog of NCBI NO: 15865172 NR Description: naringenin-chalcone synthase [Arabidopsis
  misc_feature (1)..(393): Homolog of NCBI NO: 1246019 NR Description: chalcone synthase; CHS [Arabidopsis]
  misc_feature (1)..(393): Homolog of NCBI NO: 15240753 NR Description: chalcone synthase (naringenin-chalcone synthase)
MAGASSLDEIRQAQRADGPAGILAIGTANPENHVLQAEYPDYYFRITNSEHMTDLKEKFKRMCDKSTIRKRHMHLTEEFLKENPHMCAYMAPSLDTRQDIVVVEVPKLGKEAAVKAIKEWGQPKSKITHVVFCTTSGVDMPGADYQLTKLLGLRPSVKRLMMYQQGCFAGGTVLRIAKDLAENNRGARVLVVCSEITAVTFRGPSDTHLDSLVGQALFSDGAAALIVGSDPDTSVGEKPIFEMVSAAQTILPDSDGAIDGHLREVGLTFHLLKDVPGLISKNIVKSLDEAFKPLGISDWNSLFWIAHPGGPAILDQVEIKLGLKEEKMRATRHVLSEYGNMSSACVLFILDEMRRKSAKDGVATTGEGLEWGVLFGFGPGLTVETVVLHSVPL

SEQ ID NO: 24452 - protein, 342 aa, Arabidopsis thaliana
  peptide (1)..(342): Ceres Seq. ID no. 12371855
  misc_feature (1)..(180): Pfam Name: Chalcone and stilbene synthases, N-terminal domain Pfam Description: Chalcone and stilbene synthases, N-terminal
  misc_feature (1)..(342): Homolog of NCBI NO: 6684427 NR Description: chalcone synthase [Capsella rubella]
  misc_feature (1)..(342): Homolog of NCBI NO: 15810020 NR Description: AT5g13930/MAC12_11 [Arabidopsis thaliana]
  misc_feature (1)..(342): Homolog of NCBI NO: 12002439 NR Description: chalcone synthase [Arabidopsis korshinskyi]
  misc_feature (1)..(342): Homolog of NCBI NO: 6684414 NR Description: chalcone synthase [Arabidopsis griffithiana]
  misc_feature (1)..(342): Homolog of NCBI NO: 6684416 NR Description: chalcone synthase [Arabidopsis halleri]
  misc_feature (1)..(342): Homolog of NCBI NO: 6684415 NR Description: chalcone synthase [Halimolobos perplexa var.
  misc_feature (1)..(342): Homolog of NCBI NO: 21593365 NR Description: chalcone synthase (naringenin-chalcone synthase)
  misc_feature (1)..(342): Homolog of NCBI NO: 15865172 NR Description: naringenin-chalcone synthase [Arabidopsis
  misc_feature (1)..(342): Homolog of NCBI NO: 1246019 NR Description: chalcone synthase; CHS [Arabidopsis]
  misc_feature (1)..(342): Homolog of NCBI NO: 15240753 NR Description: chalcone synthase (naringenin-chalcone synthase)
MTDLKEKFKRMCDKSTIRKRHMHLTEEFLKENPHMCAYMAPSLDTRQDIVVVEVPKLGKEAAVKAIKEWGQPKSKITHVVFCTTSGVDMPGADYQLTKLLGLRPSVKRLMMYQQGCFAGGTVLRIAKDLAENNRGARVLVVCSEITAVTFRGPSDTHLDSLVGQALFSDGAAALIVGSDPDTSVGEKPIFEMVSAAQTILPDSDGAIDGHLREVGLTFHLLKDVPGLISKNIVKSLDEAFKPLGISDWNSLFWIAHPGGPAILDQVEIKLGLKEEKMRATRHVLSEYGNMSSACVLFILDEMRRKSAKDGVATTGEGLEWGVLFGFGPGLTVETVVLHSVPL

SEQ ID NO: 24453 - DNA, 1507 bp, Arabidopsis thaliana
  misc_feature (1)..(1507): Ceres Seq. ID no. 12348339
  misc_feature: MA Experiment ID: 108462 Result: Down-regulated in Transcription
  misc_feature: MA Experiment 108462 PARAMETER Experiment Name: At_Germinating_Seeds_cDNA_P Parameter: Age (day) Value: 2 vs. 0
  misc_feature: MA Experiment 108462 PARAMETER Experiment Name: At_Germinating_Seeds_cDNA_P Parameter: Tissue Value: Germinating Seeds
  misc_feature: MA Experiment ID: 108463 Result: Down-regulated in Transcription
  misc_feature: MA Experiment 108463 PARAMETER Experiment Name: At_Germinating_Seeds_cDNA_P Parameter: Age (day) Value: 3 vs. 0
  misc_feature: MA Experiment 108463 PARAMETER Experiment Name: At_Germinating_Seeds_cDNA_P Parameter: Tissue Value: Germinating Seeds
  misc_feature: MA Experiment ID: 108573 Result: Up-regulated in Transcription
  misc_feature: MA Experiment 108573 PARAMETER Experiment Name: At_Drought_cDNA_P Parameter: Timepoint (hr) Value: 6
  misc_feature: MA Experiment 108573 PARAMETER Experiment Name: At_Drought_cDNA_P Parameter: Tissue Value: Aerial
  misc_feature: MA Experiment 108573 PARAMETER Experiment Name: At_Drought_cDNA_P Parameter: Treatment Value: Drought vs. No Drought
  misc_feature: MA Experiment ID: 108595 Result: Down-regulated in Transcription
  misc_feature: MA Experiment 108595 PARAMETER Experiment Name: At_Ler-pi_Ovule_cDNA_P Parameter: Plant Line Value: null
  misc_feature: MA Experiment ID: 20000224 Result: Down-regulated in Transcription
  misc_feature: MA Experiment ID: 20001451 Result: Down-regulated in Transcription
  misc_feature: MA Experiment 20001451 PARAMETER Experiment Name: At_Far-red-induction_P Parameter: Age (day) Value: 7
  misc_feature: MA Experiment 20001451 PARAMETER Experiment Name: At_Far-red-induction_P Parameter: Light Value: Far-red vs. White
  misc_feature: MA Experiment 20001451 PARAMETER Experiment Name: At_Far-red-induction_P Parameter: Organism Value: A. thaliana
  misc_feature: MA Experiment 20001451 PARAMETER Experiment Name: At_Far-red-induction_P Parameter: Plant Line Value: Columbia
  misc_feature: MA Experiment 20001451 PARAMETER Experiment Name: At_Far-red-induction_P Parameter: Timepoint (hr) Value: 24
  misc_feature: MA Experiment 20001451 PARAMETER Experiment Name: At_Far-red-induction_P Parameter: Tissue Value: Whole Plant
acagagagatagattgggaattgaatttgggaatccaggtttagggatgaatcgatcaacgatgatgattatgaggattgaagagtcggcgattgttttgtctctgctcaaatcggatctccggccgatggaagacgttttatcggaattcgactctaagttcgaaagcgctcgttacctcagtgtctgcaattctctttccatgatgttgcaggatcagcagatgtttaagaatactgaacgtctaattgcatttggtatcatataccagtgttattcttcacagaagccatctttcaacccgtttttatctgaaatgataagtgctgcttgtaatgaacagctggaaaagtctgaaagggcatttcttctccacctgttacaatggaatagttacaacaacgtgaaagagattctcaaactctcagctgttgattatatcagatcgtttgatccttcaactcatgattttccggaactaggagagctgcaacgagagtatggcgacaaagccgatcctggaccatctagtcacatttttgcagactattccctgaaaaagctattgcatgatcctgatgttcctcgtgggtgtgatcctaactctccagagtttgatgtgcaagctggagtgaatcccagaattggatctggtgatagggatgaggcactatctggattcttaggaaatttgacaatggggggattaggtcctaggtggatccgtccatgtccaccaaggtgcccagttcatcagagcgagttgctttggattgaccctgataacaagcatgagcttgtttgggacgataaaatgtgtgctgatactagcagtggtgcaacagttagagacttgcttgttaagggtttaaaggtgacactttcacctacggagcaagaggacatcgttacagaattggcaaatgacccaaagcttgtctttcactgcggaataactccacgggagctgccgcaattagtagagcacaatcctcagatagcagttgaaattctcaccaagttgaataactccacagagattaatgactattatgaagctctaggaaatatggacatgagcctgcactcaatggaagttgtgaataggctcacaactgcagttgaacttcccaaggacttcatacggatgtacatcactaattgcatatcgtcttgtgagaacgctaagcaagacaaatacatgcagaataggcttgtacggcttgtttgcgtcttcttgcaaagcttaattcgtaacaagatcatcaacgtgaaggatctattcatagaagttcaagctttctgcattgagttttctcgggttcgagaagcagctggtctcttcaggcttttgaaacaattggatgaataatttactctttcttcttcttcttcttcttctaatcatcttcgtctccattttattgtattccctatttttgtagctaaagaaagtactttattttgaatccaagacagttttcgctttttctagagtttcattctc

SEQ ID NO: 24454 - protein, 456 aa, Arabidopsis thaliana
  peptide (1)..(456): Ceres Seq. ID no. 12348340
  misc_feature (16)..(456): Homolog of NCBI NO: 21539503 NR Description: putative protein [Arabidopsis thaliana]
  misc_feature (345)..(456): Homolog of NCBI NO: 34875640 NR Description: similar to DNA segment, Chr 1, Brigham & Womens
  misc_feature (252)..(456): Homolog of NCBI NO: 24762515 NR Description: CG13567-PB [Drosophila melanogaster]
  misc_feature (184)..(456): Homolog of NCBI NO: 40538809 NR Description: hypothetical protein C40 [Homo sapiens]
  misc_feature (184)..(456): Homolog of NCBI NO: 37588935 NR Description: C40 protein [Homo sapiens]
  misc_feature (184)..(456): Homolog of NCBI NO: 6048964 NR Description: unknown [Homo sapiens]
  misc_feature (184)..(456): Homolog of NCBI NO: 26553441 NR Description: DNA segment, Chr 1, Brigham & Women's Genetics
  misc_feature (184)..(456): Homolog of NCBI NO: 26334389 NR Description: unnamed protein product [Mus musculus]
  misc_feature (16)..(456): Homolog of NCBI NO: 30686822 NR Description: expressed protein [Arabidopsis thaliana]
  misc_feature (16)..(456): Homolog of NCBI NO: 15238813 NR Description: putative protein; protein id: At5g18420.1
QRDRLGIEFGNPGLGMNRSTMMIMRIEESAIVLSLLKSDLRPMEDVLSEFDSKFESARYLSVCNSLSMMLQDQQMFKNTERLIAFGIIYQCYSSQKPSFNPFLSEMISAACNEQLEKSERAFLLHLLQWNSYNNVKEILKLSAVDYIRSFDPSTHDFPELGELQREYGDKADPGPSSHIFADYSLKKLLHDPDVPRGCDPNSPEFDVQAGVNPRIGSGDRDEALSGFLGNLTMGGLGPRWIRPCPPRCPVHQSELLWIDPDNKHELVWDDKMCADTSSGATVRDLLVKGLKVTLSPTEQEDIVTELANDPKLVFHCGITPRELPQLVEHNPQIAVEILTKLNNSTEINDYYEALGNMDMSLHSMEVVNRLTTAVELPKDFIRMYITNCISSCENAKQDKYMQNRLVRLVCVFLQSLIRNKIINVKDLFIEVQAFCIEFSRVREAAGLFRLLKQLDE

SEQ ID NO: 24455 - protein, 441 aa, Arabidopsis thaliana
  peptide (1)..(441): Ceres Seq. ID no. 12348341
  misc_feature (330)..(441): Homolog of NCBI NO: 34875640 NR Description: similar to DNA segment, Chr 1, Brigham & Womens
  misc_feature (237)..(441): Homolog of NCBI NO: 24762515 NR Description: CG13567-PB [Drosophila melanogaster]
  misc_feature (169)..(441): Homolog of NCBI NO: 37588935 NR Description: C40 protein [Homo sapiens]
  misc_feature (169)..(441): Homolog of NCBI NO: 40538809 NR Description: hypothetical protein C40 [Homo sapiens]
  misc_feature (169)..(441): Homolog of NCBI NO: 6048964 NR Description: unknown [Homo sapiens]
  misc_feature (169)..(441): Homolog of NCBI NO: 26553441 NR Description: DNA segment, Chr 1, Brigham & Women's Genetics
  misc_feature (169)..(441): Homolog of NCBI NO: 26334389 NR Description: unnamed protein product [Mus musculus]
  misc_feature (1)..(441): Homolog of NCBI NO: 30686822 NR Description: expressed protein [Arabidopsis thaliana]
  misc_feature (1)..(441): Homolog of NCBI NO: 15238813 NR Description: putative protein; protein id: At5g18420.1
  misc_feature (1)..(441): Homolog of NCBI NO: 21539503 NR Description: putative protein [Arabidopsis thaliana]
MNRSTMMIMRIEESAIVLSLLKSDLRPMEDVLSEFDSKFESARYLSVCNSLSMMLQDQQMFKNTERLIAFGIIYQCYSSQKPSFNPFLSEMISAACNEQLEKSERAFLLHLLQWNSYNNVKEILKLSAVDYIRSFDPSTHDFPELGELQREYGDKADPGPSSHIFADYSLKKLLHDPDVPRGCDPNSPEFDVQAGVNPRIGSGDRDEALSGFLGNLTMGGLGPRWIRPCPPRCPVHQSELLWIDPDNKHELVWDDKMCADTSSGATVRDLLVKGLKVTLSPTEQEDIVTELANDPKLVFHCGITPRELPQLVEHNPQIAVEILTKLNNSTEINDYYEALGNMDMSLHSMEVVNRLTTAVELPKDFIRMYITNCISSCENAKQDKYMQNRLVRLVCVFLQSLIRNKIINVKDLFIEVQAFCIEFSRVREAAGLFRLLKQLDE

SEQ ID NO: 24456 - protein, 436 aa, Arabidopsis thaliana
  peptide (1)..(436): Ceres Seq. ID no. 12348342
  misc_feature (325)..(436): Homolog of NCBI NO: 34875640 NR Description: similar to DNA segment, Chr 1, Brigham & Womens
  misc_feature (232)..(436): Homolog of NCBI NO: 24762515 NR Description: CG13567-PB [Drosophila melanogaster]
  misc_feature (164)..(436): Homolog of NCBI NO: 37588935 NR Description: C40 protein [Homo sapiens]
  misc_feature (164)..(436): Homolog of NCBI NO: 40538809 NR Description: hypothetical protein C40 [Homo sapiens]
  misc_feature (164)..(436): Homolog of NCBI NO: 6048964 NR Description: unknown [Homo sapiens]
  misc_feature (164)..(436): Homolog of NCBI NO: 26553441 NR Description: DNA segment, Chr 1, Brigham & Women's Genetics
  misc_feature (164)..(436): Homolog of NCBI NO: 26334389 NR Description: unnamed protein product [Mus musculus]
  misc_feature (1)..(436): Homolog of NCBI NO: 30686822 NR Description: expressed protein [Arabidopsis thaliana]
  misc_feature (1)..(436): Homolog of NCBI NO: 15238813 NR Description: putative protein; protein id: At5g18420.1
  misc_feature (1)..(436): Homolog of NCBI NO: 21539503 NR Description: putative protein [Arabidopsis thaliana]
MMIMRIEESAIVLSLLKSDLRPMEDVLSEFDSKFESARYLSVCNSLSMMLQDQQMFKNTERLIAFGIIYQCYSSQKPSFNPFLSEMISAACNEQLEKSERAFLLHLLQWNSYNNVKEILKLSAVDYIRSFDPSTHDFPELGELQREYGDKADPGPSSHIFADYSLKKLLHDPDVPRGCDPNSPEFDVQAGVNPRIGSGDRDEALSGFLGNLTMGGLGPRWIRPCPPRCPVHQSELLWIDPDNKHELVWDDKMCADTSSGATVRDLLVKGLKVTLSPTEQEDIVTELANDPKLVFHCGITPRELPQLVEHNPQIAVEILTKLNNSTEINDYYEALGNMDMSLHSMEVVNRLTTAVELPKDFIRMYITNCISSCENAKQDKYMQNRLVRLVCVFLQSLIRNKIINVKDLFIEVQAFCIEFSRVREAAGLFRLLKQLDE

SEQ ID NO: 24457 - DNA, 1187 bp, Arabidopsis thaliana
  misc_feature (1)..(1187): Ceres Seq. ID no. 13487935
  misc_feature: MA Experiment ID: 108435 Result: Down-regulated in Transcription
  misc_feature: MA Experiment 108435 PARAMETER Experiment Name: At_stm_Mutants_cDNA_P Parameter: Plant Line Value: wt Landsburg vs stm
  misc_feature: MA Experiment 108435 PARAMETER Experiment Name: At_stm_Mutants_cDNA_P Parameter: Tissue Value: Shoot Apical Meristem Region
  misc_feature: MA Experiment ID: 108667 Result: Up-regulated in Transcription
  misc_feature: MA Experiment 108667 PARAMETER Experiment Name: At_2mM_SA_cDNA_P Parameter: Plant Line Value: WS
  misc_feature: MA Experiment 108667 PARAMETER Experiment Name: At_2mM_SA_cDNA_P Parameter: Timepoint (hr) Value: 1
  misc_feature: MA Experiment 108667 PARAMETER Experiment Name: At_2mM_SA_cDNA_P Parameter: Treatment Value: 2mM SA vs. No Treatment
  misc_feature: MA Experiment ID: 108668 Result: Up-regulated in Transcription
  misc_feature: MA Experiment 108668 PARAMETER Experiment Name: At_2mM_SA_cDNA_P Parameter: Plant Line Value: WS
  misc_feature: MA Experiment 108668 PARAMETER Experiment Name: At_2mM_SA_cDNA_P Parameter: Timepoint (hr) Value: 6
  misc_feature: MA Experiment 108668 PARAMETER Experiment Name: At_2mM_SA_cDNA_P Parameter: Treatment Value: 2mM SA vs. No Treatment
  misc_feature: MA Experiment ID: 20000113 Result: Down-regulated in Transcription
  misc_feature: MA Experiment 20000113 PARAMETER Experiment Name: At_42deg_Heat_cDNA_P Parameter: Temperature (deg C) Value: 42 vs. 22
  misc_feature: MA Experiment 20000113 PARAMETER Experiment Name: At_42deg_Heat_cDNA_P Parameter: Timepoint (hr) Value: 8
  misc_feature: MA Experiment 20000113 PARAMETER Experiment Name: At_42deg_Heat_cDNA_P Parameter: Tissue Value: Aerial
  misc_feature: MA Experiment ID: 20000179 Result: Up-regulated in Transcription
  misc_feature: MA Experiment 20000179 PARAMETER Experiment Name: At_Germinating_Seeds_P Parameter: Age (hr) Value: 6 vs. 0
  misc_feature: MA Experiment 20000179 PARAMETER Experiment Name: At_Germinating_Seeds_P Parameter: Tissue Value: Germinating Seeds
  misc_feature: MA Experiment ID: 20000180 Result: Up-regulated in Transcription
  misc_feature: MA Experiment 20000180 PARAMETER Experiment Name: At_Germinating_Seeds_P Parameter: Age (hr) Value: 24 vs. 0
  misc_feature: MA Experiment 20000180 PARAMETER Experiment Name: At_Germinating_Seeds_P Parameter: Tissue Value: Germinating Seeds
  misc_feature: MA Experiment ID: 20000182 Result: Up-regulated in Transcription
  misc_feature: MA Experiment 20000182 PARAMETER Experiment Name: At_2mM_SA_P Parameter: Age (day) Value: 14
  misc_feature: MA Experiment 20000182 PARAMETER Experiment Name: At_2mM_SA_P Parameter: Organism Value: A. thaliana
  misc_feature: MA Experiment 20000182 PARAMETER Experiment Name: At_2mM_SA_P Parameter: Plant Line Value: WS
  misc_feature: MA Experiment 20000182 PARAMETER Experiment Name: At_2mM_SA_P Parameter: Timepoint (hr) Value: 6
  misc_feature: MA Experiment 20000182 PARAMETER Experiment Name: At_2mM_SA_P Parameter: Tissue Value: Aerial
  misc_feature: MA Experiment 20000182 PARAMETER Experiment Name: At_2mM_SA_P Parameter: Treatment Value: 2mM SA vs. No Treatment
  misc_feature: MA Experiment ID: 20000185 Result: Up-regulated in Transcription
  misc_feature: MA Experiment 20000185 PARAMETER Experiment Name: At_Roots__P Parameter: Age (day) Value: 7 vs. 21
  misc_feature: MA Experiment 20000185 PARAMETER Experiment Name: At_Roots__P Parameter: Organism Value: A. thaliana
  misc_feature: MA Experiment 20000185 PARAMETER Experiment Name: At_Roots__P Parameter: Tissue Value: Roots vs. Whole Plant
  misc_feature: MA Experiment ID: 20000234 Result: Down-regulated in Transcription
  misc_feature: MA Experiment 20000234 PARAMETER Experiment Name: At_Siliques_P Parameter: Age (day) Value: 21
  misc_feature: MA Experiment 20000234 PARAMETER Experiment Name: At_Siliques_P Parameter: Organism Value: A. thaliana
  misc_feature: MA Experiment 20000234 PARAMETER Experiment Name: At_Siliques_P Parameter: Plant Line Value: WS
  misc_feature: MA Experiment 20000234 PARAMETER Experiment Name: At_Siliques_P Parameter: Tissue Value: Less Than 5mm Siliques vs. Whole Plant
  misc_feature: MA Experiment ID: 20000264 Result: Down-regulated in Transcription
  misc_feature: MA Experiment 20000264 PARAMETER Experiment Name: At_Open_Flower_P Parameter: Age (day) Value: 21
  misc_feature: MA Experiment 20000264 PARAMETER Experiment Name: At_Open_Flower_P Parameter: Plant Line Value: WS
  misc_feature: MA Experiment 20000264 PARAMETER Experiment Name: At_Open_Flower_P Parameter: Tissue Value: Open Flower vs. Whole Plant
  misc_feature: MA Experiment ID: 20000265 Result: Down-regulated in Transcription
  misc_feature: MA Experiment 20000265 PARAMETER Experiment Name: At_Open_Flower_P Parameter: Age (day) Value: 21
  misc_feature: MA Experiment 20000265 PARAMETER Experiment Name: At_Open_Flower_P Parameter: Plant Line Value: WS
  misc_feature: MA Experiment 20000265 PARAMETER Experiment Name: At_Open_Flower_P Parameter: Tissue Value: Closed Flower vs. Whole Plant
  misc_feature: MA Experiment ID: 20000286 Result: Down-regulated in Transcription
  misc_feature: MA Experiment 20000286 PARAMETER Experiment Name: At_Open_Flower_P Parameter: Age (day) Value: 21
  misc_feature: MA Experiment 20000286 PARAMETER Experiment Name: At_Open_Flower_P Parameter: Plant Line Value: WS
  misc_feature: MA Experiment 20000286 PARAMETER Experiment Name: At_Open_Flower_P Parameter: Tissue Value: Half Open vs. Whole Plant
  misc_feature: MA Experiment ID: 20000439 Result: Up-regulated in Transcription
  misc_feature: MA Experiment 20000439 PARAMETER Experiment Name: At_Roots__P Parameter: Age (day) Value: 14 vs. 21
  misc_feature: MA Experiment 20000439 PARAMETER Experiment Name: At_Roots__P Parameter: Organism Value: A. thaliana
  misc_feature: MA Experiment 20000439 PARAMETER Experiment Name: At_Roots__P Parameter: Tissue Value: Roots vs. Whole Plant
  misc_feature: MA Experiment ID: 20000527 Result: Down-regulated in Transcription
  misc_feature: MA Experiment 20000527 PARAMETER Experiment Name: At_10percent_PEG_P Parameter: Age (day) Value: 20
  misc_feature: MA Experiment 20000527 PARAMETER Experiment Name: At_10percent_PEG_P Parameter: Organism Value: A. thaliana
  misc_feature: MA Experiment 20000527 PARAMETER Experiment Name: At_10percent_PEG_P Parameter: Plant Line Value: WS
  misc_feature: MA Experiment 20000527 PARAMETER Experiment Name: At_10percent_PEG_P Parameter: Timepoint (day) Value: 20
  misc_feature: MA Experiment 20000527 PARAMETER Experiment Name: At_10percent_PEG_P Parameter: Tissue Value: Whole Plant
  misc_feature: MA Experiment 20000527 PARAMETER Experiment Name: At_10percent_PEG_P Parameter: Treatment Value: 10percent PEG vs. No Treatment
  misc_feature: MA Experiment ID: 20001554 Result: Down-regulated in Transcription
  misc_feature: MA Experiment 20001554 PARAMETER Experiment Name: At_Drought_Soil_Dry_P Parameter: Age (day) Value: 21
  misc_feature: MA Experiment 20001554 PARAMETER Experiment Name: At_Drought_Soil_Dry_P Parameter: Organism Value: A. thaliana
  misc_feature: MA Experiment 20001554 PARAMETER Experiment Name: At_Drought_Soil_Dry_P Parameter: Plant Line Value: WS
  misc_feature: MA Experiment 20001554 PARAMETER Experiment Name: At_Drought_Soil_Dry_P Parameter: Post Timepoint (hr) Value: None
  misc_feature: MA Experiment 20001554 PARAMETER Experiment Name: At_Drought_Soil_Dry_P Parameter: Post-Treatment Value: None
  misc_feature: MA Experiment 20001554 PARAMETER Experiment Name: At_Drought_Soil_Dry_P Parameter: Timepoint (day) Value: 7
  misc_feature: MA Experiment 20001554 PARAMETER Experiment Name: At_Drought_Soil_Dry_P Parameter: Treatment Value: Drought vs. No Drought
  misc_feature: MA Experiment ID: 20001555 Result: Down-regulated in Transcription
  misc_feature: MA Experiment 20001555 PARAMETER Experiment Name: At_Drought_Soil_Dry_P Parameter: Age (day) Value: 24
  misc_feature: MA Experiment 20001555 PARAMETER Experiment Name: At_Drought_Soil_Dry_P Parameter: Organism Value: A. thaliana
  misc_feature: MA Experiment 20001555 PARAMETER Experiment Name: At_Drought_Soil_Dry_P Parameter: Plant Line Value: WS
  misc_feature: MA Experiment 20001555 PARAMETER Experiment Name: At_Drought_Soil_Dry_P Parameter: Post Timepoint (hr) Value: None
  misc_feature: MA Experiment 20001555 PARAMETER Experiment Name: At_Drought_Soil_Dry_P Parameter: Post-Treatment Value: None
  misc_feature: MA Experiment 20001555 PARAMETER Experiment Name: At_Drought_Soil_Dry_P Parameter: Timepoint (day) Value: 10
  misc_feature: MA Experiment 20001555 PARAMETER Experiment Name: At_Drought_Soil_Dry_P Parameter: Treatment Value: Drought vs. No Drought
  misc_feature: MA Experiment ID: 20001556 Result: Down-regulated in Transcription
  misc_feature: MA Experiment 20001556 PARAMETER Experiment Name: At_Drought_Soil_Dry_P Parameter: Age (day) Value: 26
  misc_feature: MA Experiment 20001556 PARAMETER Experiment Name: At_Drought_Soil_Dry_P Parameter: Organism Value: A. thaliana
  misc_feature: MA Experiment 20001556 PARAMETER Experiment Name: At_Drought_Soil_Dry_P Parameter: Plant Line Value: WS
  misc_feature: MA Experiment 20001556 PARAMETER Experiment Name: At_Drought_Soil_Dry_P Parameter: Post Timepoint (hr) Value: None
  misc_feature: MA Experiment 20001556 PARAMETER Experiment Name: At_Drought_Soil_Dry_P Parameter: Post-Treatment Value: None
  misc_feature: MA Experiment 20001556 PARAMETER Experiment Name: At_Drought_Soil_Dry_P Parameter: Timepoint (day) Value: 12
  misc_feature: MA Experiment 20001556 PARAMETER Experiment Name: At_Drought_Soil_Dry_P Parameter: Treatment Value: Drought vs. No Drought
  misc_feature: MA Experiment ID: 20001558 Result: Down-regulated in Transcription
  misc_feature: MA Experiment 20001558 PARAMETER Experiment Name: At_Drought_Soil_Dry_P Parameter: Age (day) Value: 27
  misc_feature: MA Experiment 20001558 PARAMETER Experiment Name: At_Drought_Soil_Dry_P Parameter: Organism Value: A. thaliana
  misc_feature: MA Experiment 20001558 PARAMETER Experiment Name: At_Drought_Soil_Dry_P Parameter: Plant Line Value: WS
  misc_feature: MA Experiment 20001558 PARAMETER Experiment Name: At_Drought_Soil_Dry_P Parameter: Post Timepoint (hr) Value: 6
  misc_feature: MA Experiment 20001558 PARAMETER Experiment Name: At_Drought_Soil_Dry_P Parameter: Post-Treatment Value: Re-Water vs. No Drought
  misc_feature: MA Experiment 20001558 PARAMETER Experiment Name: At_Drought_Soil_Dry_P Parameter: Timepoint (day) Value: 13
  misc_feature: MA Experiment 20001558 PARAMETER Experiment Name: At_Drought_Soil_Dry_P Parameter: Treatment Value: Drought vs. No Drought
  misc_feature: MA Experiment ID: 20001559 Result: Down-regulated in Transcription
  misc_feature: MA Experiment 20001559 PARAMETER Experiment Name: At_Drought_Soil_Dry_P Parameter: Age (day) Value: 28
  misc_feature: MA Experiment 20001559 PARAMETER Experiment Name: At_Drought_Soil_Dry_P Parameter: Organism Value: A. thaliana
  misc_feature: MA Experiment 20001559 PARAMETER Experiment Name: At_Drought_Soil_Dry_P Parameter: Plant Line Value: WS
  misc_feature: MA Experiment 20001559 PARAMETER Experiment Name: At_Drought_Soil_Dry_P Parameter: Post Timepoint (hr) Value: 29
  misc_feature: MA Experiment 20001559 PARAMETER Experiment Name: At_Drought_Soil_Dry_P Parameter: Post-Treatment Value: Re-Water vs. No Drought
  misc_feature: MA Experiment 20001559 PARAMETER Experiment Name: At_Drought_Soil_Dry_P Parameter: Timepoint (day) Value: 14
  misc_feature: MA Experiment 20001559 PARAMETER Experiment Name: At_Drought_Soil_Dry_P Parameter: Treatment Value: Drought vs. No Drought
  misc_feature: MA Experiment ID: 20001560 Result: Down-regulated in Transcription
  misc_feature: MA Experiment 20001560 PARAMETER Experiment Name: At_Drought_Soil_Dry_P Parameter: Age (day) Value: 28
  misc_feature: MA Experiment 20001560 PARAMETER Experiment Name: At_Drought_Soil_Dry_P Parameter: Organism Value: A. thaliana
  misc_feature: MA Experiment 20001560 PARAMETER Experiment Name: At_Drought_Soil_Dry_P Parameter: Plant Line Value: WS
  misc_feature: MA Experiment 20001560 PARAMETER Experiment Name: At_Drought_Soil_Dry_P Parameter: Post Timepoint (hr) Value: None
  misc_feature: MA Experiment 20001560 PARAMETER Experiment Name: At_Drought_Soil_Dry_P Parameter: Post-Treatment Value: None
  misc_feature: MA Experiment 20001560 PARAMETER Experiment Name: At_Drought_Soil_Dry_P Parameter: Timepoint (day) Value: 14
  misc_feature: MA Experiment 20001560 PARAMETER Experiment Name: At_Drought_Soil_Dry_P Parameter: Treatment Value: Drought vs. No Drought
  misc_feature: MA Experiment ID: 20001905 Result: Down-regulated in Transcription
  misc_feature: MA Experiment 20001905 PARAMETER Experiment Name: At_Drought_Reproduction_P Parameter: Age (day) Value: 40
  misc_feature: MA Experiment 20001905 PARAMETER Experiment Name: At_Drought_Reproduction_P Parameter: Organism Value: A. thaliana
  misc_feature: MA Experiment 20001905 PARAMETER Experiment Name: At_Drought_Reproduction_P Parameter: Plant Line Value: WS
  misc_feature: MA Experiment 20001905 PARAMETER Experiment Name: At_Drought_Reproduction_P Parameter: Timepoint (day) Value: 10
  misc_feature: MA Experiment 20001905 PARAMETER Experiment Name: At_Drought_Reproduction_P Parameter: Tissue Value: Rosettes
  misc_feature: MA Experiment 20001905 PARAMETER Experiment Name: At_Drought_Reproduction_P Parameter: Treatment Value: Drought vs. No Drought
aaattcaagtagaaacaatggagaagccaaagttcaagactgtccaagaggtggttgcagctggcgaaggactgccggagagatatctccacgcacccaccggagacggcgaagttcaacctcttaacgcagcggtaccggagatggatattccggccatcgatctgaatcttctcctctcttcttctgaagctggtcaacaagagctgagtaaacttcactcggcactctctacatggggcgttgttcaggtgatgaatcatggaattacaaaagcgtttcttgacaagatttacaagctaaccaaggagttctttgcgcttccgaccgaagagaaacagaagtgcgcgagagagattgatagtatccaaggatatggtaacgacatgattctttgggatgatcaagttcttgattggatcgaccgtttgtatattactacttaccctgaagatcaaagacaacttaatttctggcctgaagtcccacttggattcagggaaactttacatgaatacacaatgaagcaacggatagtgattgagcaattttttaaggccatggctagatctttggaattagaagagaatagttttctagacatgtatggagaaagtgctacgttggatactagattcaacatgtatccaccatgtccgagcccggacaaggttattggtgttaaaccgcacgctgatggctcggctatcactcttctcttacccgacaaagatgtcggagggcttcagttccagaaagatgggaagtggtataaagctcctatagtccctgatacaattttgatcaatgttggtgatcaaatggagataatgagcaatgggatatacaagagcccggttcatagagtggtgactaacagagaaaaggaaagaatatctgtggcaactttttgcattccaggtgcagataaagagattcagcctgtgaatgagcttgtgtctgaggcaagaccaagattatataaaacagttaagaagtatgtggagctctacttcaagtactatcaacaaggccgaagacctattgaagctgcattgatctgatcacacttttcaagtctcatttattggtttcacaaatgaatctgtttctttcgttacttgagatcctttataagaataaaactgtttccttgtttgttggaatgtgaggctgcattgtgttgc

SEQ ID NO: 24458 - protein, 353 aa, Arabidopsis thaliana
  peptide (1)..(353): Ceres Seq. ID no. 13487936
  misc_feature (206)..(306): Pfam Name: 2OG-Fe(II) oxygenase superfamily Pfam Description: 2OG-Fe(II) oxygenase superfamily
  misc_feature (14)..(353): Homolog of NCBI NO: 34898468 NR Description: Similar to Prunus armeniaca
  misc_feature (14)..(328): Homolog of NCBI NO: 34898470 NR Description: ESTs D47168(S12332),D46350(S10967) correspond to region of the predicted gene.~Similar to Prunus armeniaca
  misc_feature (14)..(330): Homolog of NCBI NO: 24413982 NR Description: ethylene-forming-enzyme-like dioxygenase-like
  misc_feature (14)..(353): Homolog of NCBI NO: 24413984 NR Description: ethylene-forming-enzyme-like dioxygenase-like
  misc_feature (13)..(353): Homolog of NCBI NO: 2688828 NR Description: ethylene-forming-enzyme-like dioxygenase [Prunus
  misc_feature (6)..(353): Homolog of NCBI NO: 15239524 NR Description: oxidoreductase, 2OG-Fe(II) oxygenase family
  misc_feature (6)..(353): Homolog of NCBI NO: 15241383 NR Description: oxidoreductase, 2OG-Fe(II) oxygenase family
  misc_feature (6)..(353): Homolog of NCBI NO: 15222131 NR Description: oxidoreductase, 2OG-Fe(II) oxygenase family
  misc_feature (6)..(353): Homolog of NCBI NO: 21593366 NR Description: ethylene-forming-enzyme-like dioxygenase-like
  misc_feature (6)..(353): Homolog of NCBI NO: 15241348 NR Description: oxidoreductase, 2OG-Fe(II) oxygenase family
IQVETMEKPKFKTVQEVVAAGEGLPERYLHAPTGDGEVQPLNAAVPEMDIPAIDLNLLLSSSEAGQQELSKLHSALSTWGVVQVMNHGITKAFLDKIYKLTKEFFALPTEEKQKCAREIDSIQGYGNDMILWDDQVLDWIDRLYITTYPEDQRQLNFWPEVPLGFRETLHEYTMKQRIVIEQFFKAMARSLELEENSFLDMYGESATLDTRFNMYPPCPSPDKVIGVKPHADGSAITLLLPDKDVGGLQFQKDGKWYKAPIVPDTILINVGDQMEIMSNGIYKSPVHRVVTNREKERISVATFCIPGADKEIQPVNELVSEARPRLYKTVKKYVELYFKYYQQGRRPIEAALI

SEQ ID NO: 24459 - protein, 348 aa, Arabidopsis thaliana
  peptide (1)..(348): Ceres Seq. ID no. 13487937
  misc_feature (201)..(301): Pfam Name: 2OG-Fe(II) oxygenase superfamily Pfam Description: 2OG-Fe(II) oxygenase superfamily
  misc_feature (9)..(348): Homolog of NCBI NO: 34898468 NR Description: Similar to Prunus armeniaca
  misc_feature (9)..(323): Homolog of NCBI NO: 34898470 NR Description: ESTs D47168(S12332),D46350(S10967) correspond to region of the predicted gene.~Similar to Prunus armeniaca
  misc_feature (9)..(325): Homolog of NCBI NO: 24413982 NR Description: ethylene-forming-enzyme-like dioxygenase-like
  misc_feature (9)..(348): Homolog of NCBI NO: 24413984 NR Description: ethylene-forming-enzyme-like dioxygenase-like
  misc_feature (8)..(348): Homolog of NCBI NO: 2688828 NR Description: ethylene-forming-enzyme-like dioxygenase [Prunus
  misc_feature (1)..(348): Homolog of NCBI NO: 15239524 NR Description: oxidoreductase, 2OG-Fe(II) oxygenase family
  misc_feature (1)..(348): Homolog of NCBI NO: 15241383 NR Description: oxidoreductase, 2OG-Fe(II) oxygenase family
  misc_feature (1)..(348): Homolog of NCBI NO: 15222131 NR Description: oxidoreductase, 2OG-Fe(II) oxygenase family
  misc_feature (1)..(348): Homolog of NCBI NO: 21593366 NR Description: ethylene-forming-enzyme-like dioxygenase-like
  misc_feature (1)..(348): Homolog of NCBI NO: 15241348 NR Description: oxidoreductase, 2OG-Fe(II) oxygenase family
MEKPKFKTVQEVVAAGEGLPERYLHAPTGDGEVQPLNAAVPEMDIPAIDLNLLLSSSEAGQQELSKLHSALSTWGVVQVMNHGITKAFLDKIYKLTKEFFALPTEEKQKCAREIDSIQGYGNDMILWDDQVLDWIDRLYITTYPEDQRQLNFWPEVPLGFRETLHEYTMKQRIVIEQFFKAMARSLELEENSFLDMYGESATLDTRFNMYPPCPSPDKVIGVKPHADGSAITLLLPDKDVGGLQFQKDGKWYKAPIVPDTILINVGDQMEIMSNGIYKSPVHRVVTNREKERISVATFCIPGADKEIQPVNELVSEARPRLYKTVKKYVELYFKYYQQGRRPIEAALI

SEQ ID NO: 24460 - protein, 306 aa, Arabidopsis thaliana
  peptide (1)..(306): Ceres Seq. ID no. 13487938
  misc_feature (159)..(259): Pfam Name: 2OG-Fe(II) oxygenase superfamily Pfam Description: 2OG-Fe(II) oxygenase superfamily
  misc_feature (1)..(306): Homolog of NCBI NO: 34898468 NR Description: Similar to Prunus armeniaca
  misc_feature (1)..(281): Homolog of NCBI NO: 34898470 NR Description: ESTs D47168(S12332),D46350(S10967) correspond to region of the predicted gene.~Similar to Prunus armeniaca
  misc_feature (1)..(283): Homolog of NCBI NO: 24413982 NR Description: ethylene-forming-enzyme-like dioxygenase-like
  misc_feature (1)..(306): Homolog of NCBI NO: 24413984 NR Description: ethylene-forming-enzyme-like dioxygenase-like
  misc_feature (1)..(306): Homolog of NCBI NO: 2688828 NR Description: ethylene-forming-enzyme-like dioxygenase [Prunus
  misc_feature (1)..(306): Homolog of NCBI NO: 15239524 NR Description: oxidoreductase, 2OG-Fe(II) oxygenase family
  misc_feature (1)..(306): Homolog of NCBI NO: 15241383 NR Description: oxidoreductase, 2OG-Fe(II) oxygenase family
  misc_feature (1)..(306): Homolog of NCBI NO: 15222131 NR Description: oxidoreductase, 2OG-Fe(II) oxygenase family
  misc_feature (1)..(306): Homolog of NCBI NO: 21593366 NR Description: ethylene-forming-enzyme-like dioxygenase-like
  misc_feature (1)..(306): Homolog of NCBI NO: 15241348 NR Description: oxidoreductase, 2OG-Fe(II) oxygenase family
MDIPAIDLNLLLSSSEAGQQELSKLHSALSTWGVVQVMNHGITKAFLDKIYKLTKEFFALPTEEKQKCAREIDSIQGYGNDMILWDDQVLDWIDRLYITTYPEDQRQLNFWPEVPLGFRETLHEYTMKQRIVIEQFFKAMARSLELEENSFLDMYGESATLDTRFNMYPPCPSPDKVIGVKPHADGSAITLLLPDKDVGGLQFQKDGKWYKAPIVPDTILINVGDQMEIMSNGIYKSPVHRVVTNREKERISVATFCIPGADKEIQPVNELVSEARPRLYKTVKKYVELYFKYYQQGRRPIEAALI

SEQ ID NO: 24461 - DNA, 1944 bp, Arabidopsis thaliana
  misc_feature (1)..(1944): Ceres Seq. ID no. 12336460
  misc_feature: MA Experiment ID: 108462 Result: Down-regulated in Transcription
  misc_feature: MA Experiment 108462 PARAMETER Experiment Name: At_Germinating_Seeds_cDNA_P Parameter: Age (day) Value: 2 vs. 0
  misc_feature: MA Experiment 108462 PARAMETER Experiment Name: At_Germinating_Seeds_cDNA_P Parameter: Tissue Value: Germinating Seeds
  misc_feature: MA Experiment ID: 108463 Result: Down-regulated in Transcription
  misc_feature: MA Experiment 108463 PARAMETER Experiment Name: At_Germinating_Seeds_cDNA_P Parameter: Age (day) Value: 3 vs. 0
  misc_feature: MA Experiment 108463 PARAMETER Experiment Name: At_Germinating_Seeds_cDNA_P Parameter: Tissue Value: Germinating Seeds
  misc_feature: MA Experiment ID: 108488 Result: Up-regulated in Transcription
  misc_feature: MA Experiment ID: 108489 Result: Up-regulated in Transcription
  misc_feature: MA Experiment ID: 108501 Result: Up-regulated in Transcription
  misc_feature: MA Experiment 108501 PARAMETER Experiment Name: At_ap2_floral_buds_cDNA_P Parameter: Plant Line Value: ap2 (Ler.)
  misc_feature: MA Experiment 108501 PARAMETER Experiment Name: At_ap2_floral_buds_cDNA_P Parameter: Tissue Value: Closed Flower
  misc_feature: MA Experiment ID: 108607 Result: Down-regulated in Transcription
  misc_feature: MA Experiment 108607 PARAMETER Experiment Name: At_100uM_ABA_cDNA_P Parameter: Timepoint (hr) Value: 4
  misc_feature: MA Experiment 108607 PARAMETER Experiment Name: At_100uM_ABA_cDNA_P Parameter: Tissue Value: Aerial
  misc_feature: MA Experiment 108607 PARAMETER Experiment Name: At_100uM_ABA_cDNA_P Parameter: Treatment Value: 100uM ABA vs. No Treatment
  misc_feature: MA Experiment ID: 20000089 Result: Up-regulated in Transcription
  misc_feature: MA Experiment ID: 20000090 Result: Up-regulated in Transcription
  misc_feature: MA Experiment ID: 20000173 Result: Down-regulated in Transcription
  misc_feature: MA Experiment 20000173 PARAMETER Experiment Name: At_42deg_Heat_P Parameter: Age (day) Value: 14
  misc_feature: MA Experiment 20000173 PARAMETER Experiment Name: At_42deg_Heat_P Parameter: Organism Value: A. thaliana
  misc_feature: MA Experiment 20000173 PARAMETER Experiment Name: At_42deg_Heat_P Parameter: Plant Line Value: WS
  misc_feature: MA Experiment 20000173 PARAMETER Experiment Name: At_42deg_Heat_P Parameter: Temperature (deg C) Value: 42 vs. 22
  misc_feature: MA Experiment 20000173 PARAMETER Experiment Name: At_42deg_Heat_P Parameter: Timepoint (hr) Value: 6
  misc_feature: MA Experiment 20000173 PARAMETER Experiment Name: At_42deg_Heat_P Parameter: Tissue Value: Aerial
  misc_feature: MA Experiment ID: 20000179 Result: Down-regulated in Transcription
  misc_feature: MA Experiment 20000179 PARAMETER Experiment Name: At_Germinating_Seeds_P Parameter: Age (hr) Value: 6 vs. 0
  misc_feature: MA Experiment 20000179 PARAMETER Experiment Name: At_Germinating_Seeds_P Parameter: Tissue Value: Germinating Seeds
  misc_feature: MA Experiment ID: 20000180 Result: Down-regulated in Transcription
  misc_feature: MA Experiment 20000180 PARAMETER Experiment Name: At_Germinating_Seeds_P Parameter: Age (hr) Value: 24 vs. 0
  misc_feature: MA Experiment 20000180 PARAMETER Experiment Name: At_Germinating_Seeds_P Parameter: Tissue Value: Germinating Seeds
  misc_feature: MA Experiment ID: 20000214 Result: Up-regulated in Transcription
  misc_feature: MA Experiment 20000214 PARAMETER Experiment Name: At_4deg_Cold_P Parameter: Timepoint (hr) Value: 6
  misc_feature: MA Experiment ID: 20001247 Result: Down-regulated in Transcription
  misc_feature: MA Experiment 20001247 PARAMETER Experiment Name: At_Far-red-induction_P Parameter: Age (day) Value: 7
  misc_feature: MA Experiment 20001247 PARAMETER Experiment Name: At_Far-red-induction_P Parameter: Light Value: Far-red vs. White
  misc_feature: MA Experiment 20001247 PARAMETER Experiment Name: At_Far-red-induction_P Parameter: Organism Value: A. thaliana
  misc_feature: MA Experiment 20001247 PARAMETER Experiment Name: At_Far-red-induction_P Parameter: Plant Line Value: Columbia
  misc_feature: MA Experiment 20001247 PARAMETER Experiment Name: At_Far-red-induction_P Parameter: Timepoint (hr) Value: 1
  misc_feature: MA Experiment 20001247 PARAMETER Experiment Name: At_Far-red-induction_P Parameter: Tissue Value: Whole Plant
  misc_feature: MA Experiment ID: 20001248 Result: Up-regulated in Transcription
  misc_feature: MA Experiment 20001248 PARAMETER Experiment Name: At_Far-red-induction_P Parameter: Age (day) Value: 7
  misc_feature: MA Experiment 20001248 PARAMETER Experiment Name: At_Far-red-induction_P Parameter: Light Value: Far-red vs. White
  misc_feature: MA Experiment 20001248 PARAMETER Experiment Name: At_Far-red-induction_P Parameter: Organism Value: A. thaliana
  misc_feature: MA Experiment 20001248 PARAMETER Experiment Name: At_Far-red-induction_P Parameter: Plant Line Value: Columbia
  misc_feature: MA Experiment 20001248 PARAMETER Experiment Name: At_Far-red-induction_P Parameter: Timepoint (hr) Value: 4
  misc_feature: MA Experiment 20001248 PARAMETER Experiment Name: At_Far-red-induction_P Parameter: Tissue Value: Whole Plant
  misc_feature: MA Experiment ID: 20001458 Result: Up-regulated in Transcription
  misc_feature: MA Experiment 20001458 PARAMETER Experiment Name: At_50mM_NH4NO3_L-to-H_P Parameter: Age (day) Value: Undefined
  misc_feature: MA Experiment 20001458 PARAMETER Experiment Name: At_50mM_NH4NO3_L-to-H_P Parameter: Organism Value: Undefined
  misc_feature: MA Experiment 20001458 PARAMETER Experiment Name: At_50mM_NH4NO3_L-to-H_P Parameter: Plant Line Value: Undefined
  misc_feature: MA Experiment 20001458 PARAMETER Experiment Name: At_50mM_NH4NO3_L-to-H_P Parameter: Timepoint (hr) Value: 2
  misc_feature: MA Experiment 20001458 PARAMETER Experiment Name: At_50mM_NH4NO3_L-to-H_P Parameter: Tissue Value: Siliques
  misc_feature: MA Experiment 20001458 PARAMETER Experiment Name: At_50mM_NH4NO3_L-to-H_P Parameter: Treatment Value: 50mM NH4NO3 vs. 100mM Manitol
  misc_feature: MA Experiment ID: 20001557 Result: Up-regulated in Transcription
  misc_feature: MA Experiment 20001557 PARAMETER Experiment Name: At_Drought_Soil_Dry_P Parameter: Age (day) Value: 27
  misc_feature: MA Experiment 20001557 PARAMETER Experiment Name: At_Drought_Soil_Dry_P Parameter: Organism Value: A. thaliana
  misc_feature: MA Experiment 20001557 PARAMETER Experiment Name: At_Drought_Soil_Dry_P Parameter: Plant Line Value: WS
  misc_feature: MA Experiment 20001557 PARAMETER Experiment Name: At_Drought_Soil_Dry_P Parameter: Post Timepoint (hr) Value: 3
  misc_feature: MA Experiment 20001557 PARAMETER Experiment Name: At_Drought_Soil_Dry_P Parameter: Post-Treatment Value: Re-Water vs. No Drought
  misc_feature: MA Experiment 20001557 PARAMETER Experiment Name: At_Drought_Soil_Dry_P Parameter: Timepoint (day) Value: 13
  misc_feature: MA Experiment 20001557 PARAMETER Experiment Name: At_Drought_Soil_Dry_P Parameter: Treatment Value: Drought vs. No Drought
  misc_feature: MA Experiment ID: 20001558 Result: Up-regulated in Transcription
  misc_feature: MA Experiment 20001558 PARAMETER Experiment Name: At_Drought_Soil_Dry_P Parameter: Age (day) Value: 27
  misc_feature: MA Experiment 20001558 PARAMETER Experiment Name: At_Drought_Soil_Dry_P Parameter: Organism Value: A. thaliana
  misc_feature: MA Experiment 20001558 PARAMETER Experiment Name: At_Drought_Soil_Dry_P Parameter: Plant Line Value: WS
  misc_feature: MA Experiment 20001558 PARAMETER Experiment Name: At_Drought_Soil_Dry_P Parameter: Post Timepoint (hr) Value: 6
  misc_feature: MA Experiment 20001558 PARAMETER Experiment Name: At_Drought_Soil_Dry_P Parameter: Post-Treatment Value: Re-Water vs. No Drought
  misc_feature: MA Experiment 20001558 PARAMETER Experiment Name: At_Drought_Soil_Dry_P Parameter: Timepoint (day) Value: 13
  misc_feature: MA Experiment 20001558 PARAMETER Experiment Name: At_Drought_Soil_Dry_P Parameter: Treatment Value: Drought vs. No Drought
  misc_feature: MA Experiment ID: 20001559 Result: Up-regulated in Transcription
  misc_feature: MA Experiment 20001559 PARAMETER Experiment Name: At_Drought_Soil_Dry_P Parameter: Age (day) Value: 28
  misc_feature: MA Experiment 20001559 PARAMETER Experiment Name: At_Drought_Soil_Dry_P Parameter: Organism Value: A. thaliana
  misc_feature: MA Experiment 20001559 PARAMETER Experiment Name: At_Drought_Soil_Dry_P Parameter: Plant Line Value: WS
  misc_feature: MA Experiment 20001559 PARAMETER Experiment Name: At_Drought_Soil_Dry_P Parameter: Post Timepoint (hr) Value: 29
  misc_feature: MA Experiment 20001559 PARAMETER Experiment Name: At_Drought_Soil_Dry_P Parameter: Post-Treatment Value: Re-Water vs. No Drought
  misc_feature: MA Experiment 20001559 PARAMETER Experiment Name: At_Drought_Soil_Dry_P Parameter: Timepoint (day) Value: 14
  misc_feature: MA Experiment 20001559 PARAMETER Experiment Name: At_Drought_Soil_Dry_P Parameter: Treatment Value: Drought vs. No Drought
  misc_feature: MA Experiment ID: 20001560 Result: Up-regulated in Transcription
  misc_feature: MA Experiment 20001560 PARAMETER Experiment Name: At_Drought_Soil_Dry_P Parameter: Age (day) Value: 28
  misc_feature: MA Experiment 20001560 PARAMETER Experiment Name: At_Drought_Soil_Dry_P Parameter: Organism Value: A. thaliana
  misc_feature: MA Experiment 20001560 PARAMETER Experiment Name: At_Drought_Soil_Dry_P Parameter: Plant Line Value: WS
  misc_feature: MA Experiment 20001560 PARAMETER Experiment Name: At_Drought_Soil_Dry_P Parameter: Post Timepoint (hr) Value: None
  misc_feature: MA Experiment 20001560 PARAMETER Experiment Name: At_Drought_Soil_Dry_P Parameter: Post-Treatment Value: None
  misc_feature: MA Experiment 20001560 PARAMETER Experiment Name: At_Drought_Soil_Dry_P Parameter: Timepoint (day) Value: 14
  misc_feature: MA Experiment 20001560 PARAMETER Experiment Name: At_Drought_Soil_Dry_P Parameter: Treatment Value: Drought vs. No Drought
aatatcttcacgcagctgtctagggtttttcgcctctttctcaactctcttctcgaaaacctagcagtcgtctctttctcagttctccatgggaaagtctaaatccgccaccaaagttgcagagattaaggccactaagcctttgaagaaaggcaagagagagcctgaagatgatattgacaccaaagtgagtcttaagaagcagaagaaagacgtgattgctgctgtccagaaggaaaaagctgtgaagaaggttcctaagaaggttgagagctctgatgattcagattctgaatctgaggaagaggagaaggctaagaaagtcccagccaagaaggctgcttcaagcagtgatgagtcatctgatgactcttcttcagatgatgaacctgcacccaagaaggccgttgctgctactaacggaactgttgcaaagaagtctaaggatgactcatcatcatctgatgatgattcttcagacgaggaagttgctgtcaccaagaagcccgcagctgctgctaaaaatggctctgtaaaggccaagaaagagagttcgtctgaagatgattcatcttctgaagacgaacctgcgaagaaacctgctgctaagattgccaagccagctgctaaggattcttcatcctctgatgatgactcagatgaggattccgaggatgagaaacctgctaccaagaaggcagctcctgctgctgccaaggctgcaagcagctcagattcatcagatgaagattctgatgaggaaagtgaagatgagaaacctgcccagaaaaaggctgacactaaggcctctaaaaaatcgagtagtgatgagtcaagcgagtctgaggaagatgagagtgaagacgaggaggaaacccctaagaaaaagagctctgatgtagaaatggttgatgctgagaaatcaagtgctaaacagccaaagacaccatccactcctgctgctggaggatcaaagacactctttgctgccaatctctcttttaacattgaaagagcagatgttgagaatttcttcaaagaagctggtgaagttgttgatgttagattctctaccaacagagacgatggttctttcaggggatttggccatgttgagttcgcatcttctgaagaagcacagaaggcgcttgaattccatggtaggccattgctcggtcgtgagattcgtcttgatattgctcaggagagaggtgagagaggcgagagacccgcattcactccacaaagcggcaacttcagaagtggtggtgatggtggtgatgaaaagaaaattttcgttaagggatttgacgcttcactttctgaggatgatatcaagaacactttgagggaacatttcagttcatgtggagagatcaaaaatgtatctgttccaattgaccgtgacactggtaactccaaaggaattgcttaccttgagttttcagaaggcaaagagaaggcgttggaactaaatggaagtgatatgggaggaggattctatcttgtagtcgatgagcctagaccgagaggagatagcagtggtggtggtggatttggaaggggcaatggtcgtttcggtagtggtggtggcagaggaagagatggaggtcgtggtcgttttggtagtggtggtggcagaggaagagatggaggtcgtggtcgttttggtagtggtggtggcaggggaagtgatcgtggtcgtggaagacctagttttactccccaaggtaagaagactaccttcggtgacgagtagaagcgtctgtagaagaaaagtctcttcttatgttgttaacttatgatacttcgcatccttttattgtttcgtttcttttttgttctagttaagtttctgtcagaaccttaaatttttgtctgaatgttaagttaagctcaattttgagtgctttgggtgttcaatcattgttatcttcgtctatc

SEQ ID NO: 24462 - protein, 556 aa, Arabidopsis thaliana
  peptide (1)..(556): Ceres Seq. ID no. 12336461
  misc_feature (402)..(475): Pfam Name: RNA recognition motif. (a.k.a. RRM, RBD, or RNP domain) Pfam Description: RNA recognition motif. (a.k.a. RRM, RBD, or RNP
  misc_feature (402)..(475): Pfam Name: RNA recognition motif. (a.k.a. RRM, RBD, or RNP domain) Pfam Description: RNA recognition motif. (a.k.a. RRM, RBD, or RNP
  misc_feature (14)..(553): Homolog of NCBI NO: 40741753 NR Description: hypothetical protein AN4865.2 [Aspergillus
  misc_feature (5)..(556): Homolog of NCBI NO: 7440063 NR Description: nucleolin homolog nuM1 - alfalfa
  misc_feature (1)..(556): Homolog of NCBI NO: 38344339 NR Description: OSJNBa0058K23.21 [Oryza sativa (japonica
  misc_feature (389)..(548): Homolog of NCBI NO: 7770338 NR Description: F27J15.29 [Arabidopsis thaliana]
  misc_feature (1)..(556): Homolog of NCBI NO: 7440062 NR Description: nucleolin homolog - garden pea
  misc_feature (14)..(553): Homolog of NCBI NO: 40741753 NR Description: hypothetical protein AN4865.2 [Aspergillus
  misc_feature (1)..(556): Homolog of NCBI NO: 38344339 NR Description: OSJNBa0058K23.21 [Oryza sativa (japonica
  misc_feature (1)..(556): Homolog of NCBI NO: 7440062 NR Description: nucleolin homolog - garden pea
  misc_feature (1)..(556): Homolog of NCBI NO: 15222009 NR Description: nucleolin, putative; protein id: At1g48920.1
  misc_feature (4)..(556): Homolog of NCBI NO: 9294322 NR Description: contains similarity to nucleolin, protein
  misc_feature (4)..(556): Homolog of NCBI NO: 15229678 NR Description: nucleolin, putative; protein id: At3g18610.1
  misc_feature (1)..(556): Homolog of NCBI NO: 21700195 NR Description: tobacco nucleolin [Nicotiana tabacum]
  misc_feature (3)..(556): Homolog of NCBI NO: 40253662 NR Description: putative nucleolin [Oryza sativa (japonica
  misc_feature (389)..(548): Homolog of NCBI NO: 7770338 NR Description: F27J15.29 [Arabidopsis thaliana]
  misc_feature (5)..(556): Homolog of NCBI NO: 7440063 NR Description: nucleolin homolog nuM1 - alfalfa
  misc_feature (3)..(556): Homolog of NCBI NO: 40253662 NR Description: putative nucleolin [Oryza sativa (japonica
  misc_feature (1)..(556): Homolog of NCBI NO: 21700195 NR Description: tobacco nucleolin [Nicotiana tabacum]
  misc_feature (4)..(556): Homolog of NCBI NO: 15229678 NR Description: nucleolin, putative; protein id: At3g18610.1
  misc_feature (4)..(556): Homolog of NCBI NO: 9294322 NR Description: contains similarity to nucleolin, protein
  misc_feature (1)..(556): Homolog of NCBI NO: 15222009 NR Description: nucleolin, putative; protein id: At1g48920.1
MGKSKSATKVAEIKATKPLKKGKREPEDDIDTKVSLKKQKKDVIAAVQKEKAVKKVPKKVESSDDSDSESEEEEKAKKVPAKKAASSSDESSDDSSSDDEPAPKKAVAATNGTVAKKSKDDSSSSDDDSSDEEVAVTKKPAAAAKNGSVKAKKESSSEDDSSSEDEPAKKPAAKIAKPAAKDSSSSDDDSDEDSEDEKPATKKAAPAAAKAASSSDSSDEDSDEESEDEKPAQKKADTKASKKSSSDESSESEEDESEDEEETPKKKSSDVEMVDAEKSSAKQPKTPSTPAAGGSKTLFAANLSFNIERADVENFFKEAGEVVDVRFSTNRDDGSFRGFGHVEFASSEEAQKALEFHGRPLLGREIRLDIAQERGERGERPAFTPQSGNFRSGGDGGDEKKIFVKGFDASLSEDDIKNTLREHFSSCGEIKNVSVPIDRDTGNSKGIAYLEFSEGKEKALELNGSDMGGGFYLVVDEPRPRGDSSGGGGFGRGNGRFGSGGGRGRDGGRGRFGSGGGRGRDGGRGRFGSGGGRGSDRGRGRPSFTPQGKKTTFGDE

SEQ ID NO: 24463 - protein, 284 aa, Arabidopsis thaliana
  peptide (1)..(284): Ceres Seq. ID no. 12336462
  misc_feature (130)..(203): Pfam Name: RNA recognition motif. (a.k.a. RRM, RBD, or RNP domain) Pfam Description: RNA recognition motif. (a.k.a. RRM, RBD, or RNP
  misc_feature (130)..(203): Pfam Name: RNA recognition motif. (a.k.a. RRM, RBD, or RNP domain) Pfam Description: RNA recognition motif. (a.k.a. RRM, RBD, or RNP
  misc_feature (1)..(281): Homolog of NCBI NO: 40741753 NR Description: hypothetical protein AN4865.2 [Aspergillus
  misc_feature (1)..(284): Homolog of NCBI NO: 7440063 NR Description: nucleolin homolog nuM1 - alfalfa
  misc_feature (1)..(284): Homolog of NCBI NO: 38344339 NR Description: OSJNBa0058K23.21 [Oryza sativa (japonica
  misc_feature (117)..(276): Homolog of NCBI NO: 7770338 NR Description: F27J15.29 [Arabidopsis thaliana]
  misc_feature (1)..(284): Homolog of NCBI NO: 7440062 NR Description: nucleolin homolog - garden pea
  misc_feature (1)..(281): Homolog of NCBI NO: 40741753 NR Description: hypothetical protein AN4865.2 [Aspergillus
  misc_feature (1)..(284): Homolog of NCBI NO: 38344339 NR Description: OSJNBa0058K23.21 [Oryza sativa (japonica
  misc_feature (1)..(284): Homolog of NCBI NO: 7440062 NR Description: nucleolin homolog - garden pea
  misc_feature (1)..(284): Homolog of NCBI NO: 15222009 NR Description: nucleolin, putative; protein id: At1g48920.1
  misc_feature (1)..(284): Homolog of NCBI NO: 9294322 NR Description: contains similarity to nucleolin, protein
  misc_feature (1)..(284): Homolog of NCBI NO: 15229678 NR Description: nucleolin, putative; protein id: At3g18610.1
  misc_feature (1)..(284): Homolog of NCBI NO: 21700195 NR Description: tobacco nucleolin [Nicotiana tabacum]
  misc_feature (1)..(284): Homolog of NCBI NO: 40253662 NR Description: putative nucleolin [Oryza sativa (japonica
  misc_feature (117)..(276): Homolog of NCBI NO: 7770338 NR Description: F27J15.29 [Arabidopsis thaliana]
  misc_feature (1)..(284): Homolog of NCBI NO: 7440063 NR Description: nucleolin homolog nuM1 - alfalfa
  misc_feature (1)..(284): Homolog of NCBI NO: 40253662 NR Description: putative nucleolin [Oryza sativa (japonica
  misc_feature (1)..(284): Homolog of NCBI NO: 21700195 NR Description: tobacco nucleolin [Nicotiana tabacum]
  misc_feature (1)..(284): Homolog of NCBI NO: 15229678 NR Description: nucleolin, putative; protein id: At3g18610.1
  misc_feature (1)..(284): Homolog of NCBI NO: 9294322 NR Description: contains similarity to nucleolin, protein
  misc_feature (1)..(284): Homolog of NCBI NO: 15222009 NR Description: nucleolin, putative; protein id: At1g48920.1
MVDAEKSSAKQPKTPSTPAAGGSKTLFAANLSFNIERADVENFFKEAGEVVDVRFSTNRDDGSFRGFGHVEFASSEEAQKALEFHGRPLLGREIRLDIAQERGERGERPAFTPQSGNFRSGGDGGDEKKIFVKGFDASLSEDDIKNTLREHFSSCGEIKNVSVPIDRDTGNSKGIAYLEFSEGKEKALELNGSDMGGGFYLVVDEPRPRGDSSGGGGFGRGNGRFGSGGGRGRDGGRGRFGSGGGRGRDGGRGRFGSGGGRGSDRGRGRPSFTPQGKKTTFGDE

SEQ ID NO: 24464 - DNA, 1549 bp, Arabidopsis thaliana
  misc_feature (1)..(1549): Ceres Seq. ID no. 13487151
  misc_feature: MA Experiment ID: 108434 Result: Down-regulated in Transcription
  misc_feature: MA Experiment 108434 PARAMETER Experiment Name: At_Root_Tips_cDNA_P Parameter: Tissue Value: Root Tips
  misc_feature: MA Experiment ID: 108573 Result: Up-regulated in Transcription
  misc_feature: MA Experiment 108573 PARAMETER Experiment Name: At_Drought_cDNA_P Parameter: Timepoint (hr) Value: 6
  misc_feature: MA Experiment 108573 PARAMETER Experiment Name: At_Drought_cDNA_P Parameter: Tissue Value: Aerial
  misc_feature: MA Experiment 108573 PARAMETER Experiment Name: At_Drought_cDNA_P Parameter: Treatment Value: Drought vs. No Drought
  misc_feature: MA Experiment ID: 108585 Result: Up-regulated in Transcription
  misc_feature: MA Experiment 108585 PARAMETER Experiment Name: At_5mM_NaNP_cDNA_P Parameter: Timepoint (hr) Value: 6
  misc_feature: MA Experiment 108585 PARAMETER Experiment Name: At_5mM_NaNP_cDNA_P Parameter: Tissue Value: Aerial
  misc_feature: MA Experiment 108585 PARAMETER Experiment Name: At_5mM_NaNP_cDNA_P Parameter: Treatment Value: null
  misc_feature: MA Experiment ID: 20000214 Result: Down-regulated in Transcription
  misc_feature: MA Experiment 20000214 PARAMETER Experiment Name: At_4deg_Cold_P Parameter: Timepoint (hr) Value: 6
  misc_feature: MA Experiment ID: 20000224 Result: Down-regulated in Transcription
  misc_feature: MA Experiment ID: 20001247 Result: Up-regulated in Transcription
  misc_feature: MA Experiment 20001247 PARAMETER Experiment Name: At_Far-red-induction_P Parameter: Age (day) Value: 7
  misc_feature: MA Experiment 20001247 PARAMETER Experiment Name: At_Far-red-induction_P Parameter: Light Value: Far-red vs. White
  misc_feature: MA Experiment 20001247 PARAMETER Experiment Name: At_Far-red-induction_P Parameter: Organism Value: A. thaliana
  misc_feature: MA Experiment 20001247 PARAMETER Experiment Name: At_Far-red-induction_P Parameter: Plant Line Value: Columbia
  misc_feature: MA Experiment 20001247 PARAMETER Experiment Name: At_Far-red-induction_P Parameter: Timepoint (hr) Value: 1
  misc_feature: MA Experiment 20001247 PARAMETER Experiment Name: At_Far-red-induction_P Parameter: Tissue Value: Whole Plant
  misc_feature: MA Experiment ID: 20001905 Result: Up-regulated in Transcription
  misc_feature: MA Experiment 20001905 PARAMETER Experiment Name: At_Drought_Reproduction_P Parameter: Age (day) Value: 40
  misc_feature: MA Experiment 20001905 PARAMETER Experiment Name: At_Drought_Reproduction_P Parameter: Organism Value: A. thaliana
  misc_feature: MA Experiment 20001905 PARAMETER Experiment Name: At_Drought_Reproduction_P Parameter: Plant Line Value: WS
  misc_feature: MA Experiment 20001905 PARAMETER Experiment Name: At_Drought_Reproduction_P Parameter: Timepoint (day) Value: 10
  misc_feature: MA Experiment 20001905 PARAMETER Experiment Name: At_Drought_Reproduction_P Parameter: Tissue Value: Rosettes
  misc_feature: MA Experiment 20001905 PARAMETER Experiment Name: At_Drought_Reproduction_P Parameter: Treatment Value: Drought vs. No Drought
agttgtcgtcgtcatcttcaatttggacttccaacgccgacaccgtttaactccgatggttcccccgccgtctaatccgcagcaggttcagcagttcctctcctctgccctctcccagcgcggcccatcttcagtcccctacgaagagtccaacaagtggttgatccggcaacatctacttaacctaatctcttcttacccttccttagagcccaaaacggcatcgtttatgcacaacgatggtcgctccgtcaacctccttcaagcagatggtacgattccgatgccttttcatggagtcacctataacatacctgtgattatctggctcctcgagtcatatcctcgtcatcctccttgcgtctatgtgaatcccaccgctgatatgatcatcaagcgacctcacgcacatgtcactccttctggtctcgtttctcttccgtaccttcagaattgggtctaccctagctccaatctcgtagatctcgtctccgatctcagcgctgcttttgctcgtgatccgcctctttattctcgacgccgtcctcagccaccgccaccgtctcctcctacggtatacgattcgtctctgtcacgacctccttcggctgatcagtcattgcctagaccgttcccgccatcaccttacggcggaggagtaagtagggtgcaagtgcagcatgttcaccaccagcagcaatctgatgatgcggcggaggttttcaagagaaatgcgattaataagatggtggagatggttcatagcgatttggtttcgatgaggagagccagagaagctgaagcagaggagctgctgagcttgcaagctgggctgaagagaagagaggatgagcttaatatagggttgaaagagatggttgaggagaaagaaacacttgaacaacaattacagattatctccatgaacactgatattctagactcgtgggttagagagaaccaaggcaaaaccaagaatttagttgatttggatgtggataatgcttttgaatgtggtgacacactctctaagcagatgttagagtgtactgctttggatttagccattgaagatgctatttattccttggataagtcgtttcaagatggtgttgttccctttgatcagtatttgaggaatgtgaggttgttgtcgagagaacagttcttccaccgagccacgggttctaaagtcagggcggcacaaatggaggttcaggttgcagccatcgcaggtaggttacattcatgaatgaaattcagtgtttttgtttgcgggatactgtgtcacacaatgctggtttatatagtctgagattagcatctttgaggagtatttctgtggctatgcgtgtgatgatggttcctctttaagattgaattaaatgtctatagactatatatacacgtacactgttgtgcacatacatatttgaatggatcagggcctgagaatcgtctccttttgtgatctatgactacttttttacatgttggggatctttgtgataaacagtattattatctaatgaatcaatcaattggtttg

SEQ ID NO: 24465 - protein, 416 aa, Arabidopsis thaliana
  peptide (1)..(416): Ceres Seq. ID no. 13487152
  misc_feature (49)..(403): Pfam Name: Tumour susceptibility gene 101 protein (TSG101) Pfam Description: Tumour susceptibility gene 101 protein (TSG101)
  misc_feature (55)..(313): Homolog of NCBI NO: 11230780 NR Description: tumor susceptibility gene 101 protein [Mus
  misc_feature (24)..(214): Homolog of NCBI NO: 40745470 NR Description: hypothetical protein AN2521.2 [Aspergillus
  misc_feature (175)..(402): Homolog of NCBI NO: 40745470 NR Description: hypothetical protein AN2521.2 [Aspergillus
  misc_feature (56)..(212): Homolog of NCBI NO: 33285220 NR Description: Hypothetical protein C09G12.9 [Caenorhabditis
  misc_feature (186)..(399): Homolog of NCBI NO: 33285220 NR Description: Hypothetical protein C09G12.9 [Caenorhabditis
  misc_feature (60)..(399): Homolog of NCBI NO: 12803337 NR Description: tumor susceptibility gene 101 [Homo sapiens]
  misc_feature (60)..(399): Homolog of NCBI NO: 5454140 NR Description: tumor susceptibility gene 101; tumor
  misc_feature (19)..(200): Homolog of NCBI NO: 15240732 NR Description: hypothetical protein [Arabidopsis thaliana]
  misc_feature (195)..(416): Homolog of NCBI NO: 15240732 NR Description: hypothetical protein [Arabidopsis thaliana]
  misc_feature (19)..(416): Homolog of NCBI NO: 18399596 NR Description: expressed protein [Arabidopsis thaliana]
VVVVIFNLDFQRRHRLTPMVPPPSNPQQVQQFLSSALSQRGPSSVPYEESNKWLIRQHLLNLISSYPSLEPKTASFMHNDGRSVNLLQADGTIPMPFHGVTYNIPVIIWLLESYPRHPPCVYVNPTADMIIKRPHAHVTPSGLVSLPYLQNWVYPSSNLVDLVSDLSAAFARDPPLYSRRRPQPPPPSPPTVYDSSLSRPPSADQSLPRPFPPSPYGGGVSRVQVQHVHHQQQSDDAAEVFKRNAINKMVEMVHSDLVSMRRAREAEAEELLSLQAGLKRREDELNIGLKEMVEEKETLEQQLQIISMNTDILDSWVRENQGKTKNLVDLDVDNAFECGDTLSKQMLECTALDLAIEDAIYSLDKSFQDGVVPFDQYLRNVRLLSREQFFHRATGSKVRAAQMEVQVAAIAGRLHS

SEQ ID NO: 24466 - protein, 398 aa, Arabidopsis thaliana
  peptide (1)..(398): Ceres Seq. ID no. 13487153
  misc_feature (31)..(385): Pfam Name: Tumour susceptibility gene 101 protein (TSG101) Pfam Description: Tumour susceptibility gene 101 protein (TSG101)
  misc_feature (1)..(398): Homolog of NCBI NO: 18399596 NR Description: expressed protein [Arabidopsis thaliana]
  misc_feature (37)..(295): Homolog of NCBI NO: 11230780 NR Description: tumor susceptibility gene 101 protein [Mus
  misc_feature (6)..(196): Homolog of NCBI NO: 40745470 NR Description: hypothetical protein AN2521.2 [Aspergillus
  misc_feature (157)..(384): Homolog of NCBI NO: 40745470 NR Description: hypothetical protein AN2521.2 [Aspergillus
  misc_feature (38)..(194): Homolog of NCBI NO: 33285220 NR Description: Hypothetical protein C09G12.9 [Caenorhabditis
  misc_feature (168)..(381): Homolog of NCBI NO: 33285220 NR Description: Hypothetical protein C09G12.9 [Caenorhabditis
  misc_feature (42)..(381): Homolog of NCBI NO: 12803337 NR Description: tumor susceptibility gene 101 [Homo sapiens]
  misc_feature (42)..(381): Homolog of NCBI NO: 5454140 NR Description: tumor susceptibility gene 101; tumor
  misc_feature (1)..(182): Homolog of NCBI NO: 15240732 NR Description: hypothetical protein [Arabidopsis thaliana]
  misc_feature (177)..(398): Homolog of NCBI NO: 15240732 NR Description: hypothetical protein [Arabidopsis thaliana]
MVPPPSNPQQVQQFLSSALSQRGPSSVPYEESNKWLIRQHLLNLISSYPSLEPKTASFMHNDGRSVNLLQADGTIPMPFHGVTYNIPVIIWLLESYPRHPPCVYVNPTADMIIKRPHAHVTPSGLVSLPYLQNWVYPSSNLVDLVSDLSAAFARDPPLYSRRRPQPPPPSPPTVYDSSLSRPPSADQSLPRPFPPSPYGGGVSRVQVQHVHHQQQSDDAAEVFKRNAINKMVEMVHSDLVSMRRAREAEAEELLSLQAGLKRREDELNIGLKEMVEEKETLEQQLQIISMNTDILDSWVRENQGKTKNLVDLDVDNAFECGDTLSKQMLECTALDLAIEDAIYSLDKSFQDGVVPFDQYLRNVRLLSREQFFHRATGSKVRAAQMEVQVAAIAGRLHS

SEQ ID NO: 24467 - protein, 340 aa, Arabidopsis thaliana
  peptide (1)..(340): Ceres Seq. ID no. 13487154
  misc_feature (1)..(327): Pfam Name: Tumour susceptibility gene 101 protein (TSG101) Pfam Description: Tumour susceptibility gene 101 protein (TSG101)
  misc_feature (1)..(237): Homolog of NCBI NO: 11230780 NR Description: tumor susceptibility gene 101 protein [Mus
  misc_feature (1)..(138): Homolog of NCBI NO: 40745470 NR Description: hypothetical protein AN2521.2 [Aspergillus
  misc_feature (99)..(326): Homolog of NCBI NO: 40745470 NR Description: hypothetical protein AN2521.2 [Aspergillus
  misc_feature (1)..(136): Homolog of NCBI NO: 33285220 NR Description: Hypothetical protein C09G12.9 [Caenorhabditis
  misc_feature (110)..(323): Homolog of NCBI NO: 33285220 NR Description: Hypothetical protein C09G12.9 [Caenorhabditis
  misc_feature (1)..(323): Homolog of NCBI NO: 12803337 NR Description: tumor susceptibility gene 101 [Homo sapiens]
  misc_feature (1)..(323): Homolog of NCBI NO: 5454140 NR Description: tumor susceptibility gene 101; tumor
  misc_feature (1)..(124): Homolog of NCBI NO: 15240732 NR Description: hypothetical protein [Arabidopsis thaliana]
  misc_feature (119)..(340): Homolog of NCBI NO: 15240732 NR Description: hypothetical protein [Arabidopsis thaliana]
  misc_feature (1)..(340): Homolog of NCBI NO: 18399596 NR Description: expressed protein [Arabidopsis thaliana]
MHNDGRSVNLLQADGTIPMPFHGVTYNIPVIIWLLESYPRHPPCVYVNPTADMIIKRPHAHVTPSGLVSLPYLQNWVYPSSNLVDLVSDLSAAFARDPPLYSRRRPQPPPPSPPTVYDSSLSRPPSADQSLPRPFPPSPYGGGVSRVQVQHVHHQQQSDDAAEVFKRNAINKMVEMVHSDLVSMRRAREAEAEELLSLQAGLKRREDELNIGLKEMVEEKETLEQQLQIISMNTDILDSWVRENQGKTKNLVDLDVDNAFECGDTLSKQMLECTALDLAIEDAIYSLDKSFQDGVVPFDQYLRNVRLLSREQFFHRATGSKVRAAQMEVQVAAIAGRLHS

SEQ ID NO: 24468 - DNA, 1458 bp, Arabidopsis thaliana
  misc_feature (1)..(1458): Ceres Seq. ID no. 13487845
  misc_feature: MA Experiment ID: 108434 Result: Down-regulated in Transcription
  misc_feature: MA Experiment 108434 PARAMETER Experiment Name: At_Root_Tips_cDNA_P Parameter: Tissue Value: Root Tips
  misc_feature: MA Experiment ID: 108435 Result: Down-regulated in Transcription
  misc_feature: MA Experiment 108435 PARAMETER Experiment Name: At_stm_Mutants_cDNA_P Parameter: Plant Line Value: wt Landsburg vs stm
  misc_feature: MA Experiment 108435 PARAMETER Experiment Name: At_stm_Mutants_cDNA_P Parameter: Tissue Value: Shoot Apical Meristem Region
  misc_feature: MA Experiment ID: 108464 Result: Up-regulated in Transcription
  misc_feature: MA Experiment 108464 PARAMETER Experiment Name: At_Germinating_Seeds_cDNA_P Parameter: Age (day) Value: 4 vs. 0
  misc_feature: MA Experiment 108464 PARAMETER Experiment Name: At_Germinating_Seeds_cDNA_P Parameter: Tissue Value: Germinating Seeds
  misc_feature: MA Experiment ID: 108561 Result: Down-regulated in Transcription
  misc_feature: MA Experiment 108561 PARAMETER Experiment Name: At_100uM_ABA_cDNA_P Parameter: Timepoint (hr) Value: 6
  misc_feature: MA Experiment 108561 PARAMETER Experiment Name: At_100uM_ABA_cDNA_P Parameter: Tissue Value: Aerial
  misc_feature: MA Experiment 108561 PARAMETER Experiment Name: At_100uM_ABA_cDNA_P Parameter: Treatment Value: 100uM ABA vs. No Treatment
  misc_feature: MA Experiment ID: 108576 Result: Down-regulated in Transcription
  misc_feature: MA Experiment 108576 PARAMETER Experiment Name: At_42deg_Heat_cDNA_P Parameter: Temperature (deg C) Value: 42 vs. 22
  misc_feature: MA Experiment 108576 PARAMETER Experiment Name: At_42deg_Heat_cDNA_P Parameter: Timepoint (hr) Value: 1
  misc_feature: MA Experiment 108576 PARAMETER Experiment Name: At_42deg_Heat_cDNA_P Parameter: Tissue Value: Aerial
  misc_feature: MA Experiment ID: 108579 Result: Up-regulated in Transcription
  misc_feature: MA Experiment 108579 PARAMETER Experiment Name: At_4deg_Cold_cDNA_P Parameter: Temperature (deg C) Value: 4 vs. 22
  misc_feature: MA Experiment 108579 PARAMETER Experiment Name: At_4deg_Cold_cDNA_P Parameter: Timepoint (hr) Value: 6
  misc_feature: MA Experiment 108579 PARAMETER Experiment Name: At_4deg_Cold_cDNA_P Parameter: Tissue Value: Aerial
  misc_feature: MA Experiment ID: 108595 Result: Down-regulated in Transcription
  misc_feature: MA Experiment 108595 PARAMETER Experiment Name: At_Ler-pi_Ovule_cDNA_P Parameter: Plant Line Value: null
  misc_feature: MA Experiment ID: 108605 Result: Down-regulated in Transcription
  misc_feature: MA Experiment 108605 PARAMETER Experiment Name: At_100uM_ABA_cDNA_P Parameter: Timepoint (hr) Value: 6
  misc_feature: MA Experiment 108605 PARAMETER Experiment Name: At_100uM_ABA_cDNA_P Parameter: Tissue Value: Aerial
  misc_feature: MA Experiment 108605 PARAMETER Experiment Name: At_100uM_ABA_cDNA_P Parameter: Treatment Value: 100uM ABA vs. No Treatment
  misc_feature: MA Experiment ID: 108607 Result: Down-regulated in Transcription
  misc_feature: MA Experiment 108607 PARAMETER Experiment Name: At_100uM_ABA_cDNA_P Parameter: Timepoint (hr) Value: 4
  misc_feature: MA Experiment 108607 PARAMETER Experiment Name: At_100uM_ABA_cDNA_P Parameter: Tissue Value: Aerial
  misc_feature: MA Experiment 108607 PARAMETER Experiment Name: At_100uM_ABA_cDNA_P Parameter: Treatment Value: 100uM ABA vs. No Treatment
  misc_feature: MA Experiment ID: 108668 Result: Down-regulated in Transcription
  misc_feature: MA Experiment 108668 PARAMETER Experiment Name: At_2mM_SA_cDNA_P Parameter: Plant Line Value: WS
  misc_feature: MA Experiment 108668 PARAMETER Experiment Name: At_2mM_SA_cDNA_P Parameter: Timepoint (hr) Value: 6
  misc_feature: MA Experiment 108668 PARAMETER Experiment Name: At_2mM_SA_cDNA_P Parameter: Treatment Value: 2mM SA vs. No Treatment
  misc_feature: MA Experiment ID: 20000069 Result: Down-regulated in Transcription
  misc_feature: MA Experiment 20000069 PARAMETER Experiment Name: At_100uM_ABA_Mutants_cDNA_P Parameter: Plant Line Value: CS23
  misc_feature: MA Experiment 20000069 PARAMETER Experiment Name: At_100uM_ABA_Mutants_cDNA_P Parameter: Timepoint (hr) Value: 6
  misc_feature: MA Experiment 20000069 PARAMETER Experiment Name: At_100uM_ABA_Mutants_cDNA_P Parameter: Tissue Value: Aerial
  misc_feature: MA Experiment 20000069 PARAMETER Experiment Name: At_100uM_ABA_Mutants_cDNA_P Parameter: Treatment Value: 100uM ABA vs. No Treatment
  misc_feature: MA Experiment ID: 20000070 Result: Down-regulated in Transcription
  misc_feature: MA Experiment 20000070 PARAMETER Experiment Name: At_100uM_ABA_Mutants_cDNA_P Parameter: Plant Line Value: CS24
  misc_feature: MA Experiment 20000070 PARAMETER Experiment Name: At_100uM_ABA_Mutants_cDNA_P Parameter: Timepoint (hr) Value: 6
  misc_feature: MA Experiment 20000070 PARAMETER Experiment Name: At_100uM_ABA_Mutants_cDNA_P Parameter: Tissue Value: Aerial
  misc_feature: MA Experiment 20000070 PARAMETER Experiment Name: At_100uM_ABA_Mutants_cDNA_P Parameter: Treatment Value: 100uM ABA vs. No Treatment
  misc_feature: MA Experiment ID: 20000087 Result: Down-regulated in Transcription
  misc_feature: MA Experiment 20000087 PARAMETER Experiment Name: At_100uM_ABA_Mutants_cDNA_P Parameter: Plant Line Value: WS
  misc_feature: MA Experiment 20000087 PARAMETER Experiment Name: At_100uM_ABA_Mutants_cDNA_P Parameter: Timepoint (hr) Value: 6
  misc_feature: MA Experiment 20000087 PARAMETER Experiment Name: At_100uM_ABA_Mutants_cDNA_P Parameter: Tissue Value: Aerial
  misc_feature: MA Experiment 20000087 PARAMETER Experiment Name: At_100uM_ABA_Mutants_cDNA_P Parameter: Treatment Value: 100uM ABA vs. No Treatment
  misc_feature: MA Experiment ID: 20000112 Result: Down-regulated in Transcription
  misc_feature: MA Experiment 20000112 PARAMETER Experiment Name: At_42deg_Heat_cDNA_P Parameter: Temperature (deg C) Value: 42 vs. 22
  misc_feature: MA Experiment 20000112 PARAMETER Experiment Name: At_42deg_Heat_cDNA_P Parameter: Timepoint (hr) Value: 2
  misc_feature: MA Experiment 20000112 PARAMETER Experiment Name: At_42deg_Heat_cDNA_P Parameter: Tissue Value: Aerial
  misc_feature: MA Experiment ID: 20000113 Result: Down-regulated in Transcription
  misc_feature: MA Experiment 20000113 PARAMETER Experiment Name: At_42deg_Heat_cDNA_P Parameter: Temperature (deg C) Value: 42 vs. 22
  misc_feature: MA Experiment 20000113 PARAMETER Experiment Name: At_42deg_Heat_cDNA_P Parameter: Timepoint (hr) Value: 8
  misc_feature: MA Experiment 20000113 PARAMETER Experiment Name: At_42deg_Heat_cDNA_P Parameter: Tissue Value: Aerial
  misc_feature: MA Experiment ID: 20000117 Result: Down-regulated in Transcription
  misc_feature: MA Experiment 20000117 PARAMETER Experiment Name: At_100uM_ABA_Mutants_cDNA_P Parameter: Plant Line Value: Columbia
  misc_feature: MA Experiment 20000117 PARAMETER Experiment Name: At_100uM_ABA_Mutants_cDNA_P Parameter: Timepoint (hr) Value: 6
  misc_feature: MA Experiment 20000117 PARAMETER Experiment Name: At_100uM_ABA_Mutants_cDNA_P Parameter: Tissue Value: Aerial
  misc_feature: MA Experiment 20000117 PARAMETER Experiment Name: At_100uM_ABA_Mutants_cDNA_P Parameter: Treatment Value: 100uM ABA vs. No Treatment
  misc_feature: MA Experiment ID: 20000144 Result: Down-regulated in Transcription
  misc_feature: MA Experiment 20000144 PARAMETER Experiment Name: At_42deg_Heat_cDNA_P Parameter: Temperature (deg C) Value: 42 vs. 22
  misc_feature: MA Experiment 20000144 PARAMETER Experiment Name: At_42deg_Heat_cDNA_P Parameter: Timepoint (hr) Value: 1
  misc_feature: MA Experiment 20000144 PARAMETER Experiment Name: At_42deg_Heat_cDNA_P Parameter: Tissue Value: Aerial
  misc_feature: MA Experiment ID: 20000169 Result: Down-regulated in Transcription
  misc_feature: MA Experiment 20000169 PARAMETER Experiment Name: At_100uM_ABA_P Parameter: Age (day) Value: 14
  misc_feature: MA Experiment 20000169 PARAMETER Experiment Name: At_100uM_ABA_P Parameter: Organism Value: A. thaliana
  misc_feature: MA Experiment 20000169 PARAMETER Experiment Name: At_100uM_ABA_P Parameter: Plant Line Value: WS
  misc_feature: MA Experiment 20000169 PARAMETER Experiment Name: At_100uM_ABA_P Parameter: Timepoint (hr) Value: 6
  misc_feature: MA Experiment 20000169 PARAMETER Experiment Name: At_100uM_ABA_P Parameter: Tissue Value: Aerial
  misc_feature: MA Experiment 20000169 PARAMETER Experiment Name: At_100uM_ABA_P Parameter: Treatment Value: 100uM ABA vs. No Treatment
  misc_feature: MA Experiment ID: 20000171 Result: Down-regulated in Transcription
  misc_feature: MA Experiment 20000171 PARAMETER Experiment Name: At_42deg_Heat_P Parameter: Age (day) Value: 14
  misc_feature: MA Experiment 20000171 PARAMETER Experiment Name: At_42deg_Heat_P Parameter: Organism Value: A. thaliana
  misc_feature: MA Experiment 20000171 PARAMETER Experiment Name: At_42deg_Heat_P Parameter: Plant Line Value: WS
  misc_feature: MA Experiment 20000171 PARAMETER Experiment Name: At_42deg_Heat_P Parameter: Temperature (deg C) Value: 42 vs. 22
  misc_feature: MA Experiment 20000171 PARAMETER Experiment Name: At_42deg_Heat_P Parameter: Timepoint (hr) Value: 1
  misc_feature: MA Experiment 20000171 PARAMETER Experiment Name: At_42deg_Heat_P Parameter: Tissue Value: Aerial
  misc_feature: MA Experiment ID: 20000182 Result: Down-regulated in Transcription
  misc_feature: MA Experiment 20000182 PARAMETER Experiment Name: At_2mM_SA_P Parameter: Age (day) Value: 14
  misc_feature: MA Experiment 20000182 PARAMETER Experiment Name: At_2mM_SA_P Parameter: Organism Value: A. thaliana
  misc_feature: MA Experiment 20000182 PARAMETER Experiment Name: At_2mM_SA_P Parameter: Plant Line Value: WS
  misc_feature: MA Experiment 20000182 PARAMETER Experiment Name: At_2mM_SA_P Parameter: Timepoint (hr) Value: 6
  misc_feature: MA Experiment 20000182 PARAMETER Experiment Name: At_2mM_SA_P Parameter: Tissue Value: Aerial
  misc_feature: MA Experiment 20000182 PARAMETER Experiment Name: At_2mM_SA_P Parameter: Treatment Value: 2mM SA vs. No Treatment
  misc_feature: MA Experiment ID: 20000185 Result: Down-regulated in Transcription
  misc_feature: MA Experiment 20000185 PARAMETER Experiment Name: At_Roots__P Parameter: Age (day) Value: 7 vs. 21
  misc_feature: MA Experiment 20000185 PARAMETER Experiment Name: At_Roots__P Parameter: Organism Value: A. thaliana
  misc_feature: MA Experiment 20000185 PARAMETER Experiment Name: At_Roots__P Parameter: Tissue Value: Roots vs. Whole Plant
  misc_feature: MA Experiment ID: 20000213 Result: Up-regulated in Transcription
  misc_feature: MA Experiment 20000213 PARAMETER Experiment Name: At_4deg_Cold_P Parameter: Timepoint (hr) Value: 2
  misc_feature: MA Experiment ID: 20000234 Result: Down-regulated in Transcription
  misc_feature: MA Experiment 20000234 PARAMETER Experiment Name: At_Siliques_P Parameter: Age (day) Value: 21
  misc_feature: MA Experiment 20000234 PARAMETER Experiment Name: At_Siliques_P Parameter: Organism Value: A. thaliana
  misc_feature: MA Experiment 20000234 PARAMETER Experiment Name: At_Siliques_P Parameter: Plant Line Value: WS
  misc_feature: MA Experiment 20000234 PARAMETER Experiment Name: At_Siliques_P Parameter: Tissue Value: Less Than 5mm Siliques vs. Whole Plant
  misc_feature: MA Experiment ID: 20000235 Result: Down-regulated in Transcription
  misc_feature: MA Experiment 20000235 PARAMETER Experiment Name: At_Siliques_P Parameter: Age (day) Value: 21
  misc_feature: MA Experiment 20000235 PARAMETER Experiment Name: At_Siliques_P Parameter: Organism Value: A. thaliana
  misc_feature: MA Experiment 20000235 PARAMETER Experiment Name: At_Siliques_P Parameter: Plant Line Value: WS
  misc_feature: MA Experiment 20000235 PARAMETER Experiment Name: At_Siliques_P Parameter: Tissue Value: 5-10mm Siliques vs. Whole Plant
  misc_feature: MA Experiment ID: 20000264 Result: Down-regulated in Transcription
  misc_feature: MA Experiment 20000264 PARAMETER Experiment Name: At_Open_Flower_P Parameter: Age (day) Value: 21
  misc_feature: MA Experiment 20000264 PARAMETER Experiment Name: At_Open_Flower_P Parameter: Plant Line Value: WS
  misc_feature: MA Experiment 20000264 PARAMETER Experiment Name: At_Open_Flower_P Parameter: Tissue Value: Open Flower vs. Whole Plant
  misc_feature: MA Experiment ID: 20000265 Result: Down-regulated in Transcription
  misc_feature: MA Experiment 20000265 PARAMETER Experiment Name: At_Open_Flower_P Parameter: Age (day) Value: 21
  misc_feature: MA Experiment 20000265 PARAMETER Experiment Name: At_Open_Flower_P Parameter: Plant Line Value: WS
  misc_feature: MA Experiment 20000265 PARAMETER Experiment Name: At_Open_Flower_P Parameter: Tissue Value: Closed Flower vs. Whole Plant
  misc_feature: MA Experiment ID: 20000268 Result: Down-regulated in Transcription
  misc_feature: MA Experiment 20000268 PARAMETER Experiment Name: At_100mM_NaCl__P Parameter: Age (day) Value: 14
  misc_feature: MA Experiment 20000268 PARAMETER Experiment Name: At_100mM_NaCl__P Parameter: Organism Value: A. thaliana
  misc_feature: MA Experiment 20000268 PARAMETER Experiment Name: At_100mM_NaCl__P Parameter: Plant Line Value: WS
  misc_feature: MA Experiment 20000268 PARAMETER Experiment Name: At_100mM_NaCl__P Parameter: Timepoint (hr) Value: 6
  misc_feature: MA Experiment 20000268 PARAMETER Experiment Name: At_100mM_NaCl__P Parameter: Tissue Value: Whole Plant
  misc_feature: MA Experiment 20000268 PARAMETER Experiment Name: At_100mM_NaCl__P Parameter: Treatment Value: 100mM NaCl vs. No Treatment
  misc_feature: MA Experiment ID: 20000286 Result: Down-regulated in Transcription
  misc_feature: MA Experiment 20000286 PARAMETER Experiment Name: At_Open_Flower_P Parameter: Age (day) Value: 21
  misc_feature: MA Experiment 20000286 PARAMETER Experiment Name: At_Open_Flower_P Parameter: Plant Line Value: WS
  misc_feature: MA Experiment 20000286 PARAMETER Experiment Name: At_Open_Flower_P Parameter: Tissue Value: Half Open vs. Whole Plant
  misc_feature: MA Experiment ID: 20000436 Result: Down-regulated in Transcription
  misc_feature: MA Experiment 20000436 PARAMETER Experiment Name: At_Drought_P Parameter: Age (day) Value: 7
  misc_feature: MA Experiment 20000436 PARAMETER Experiment Name: At_Drought_P Parameter: Organism Value: A. thaliana
  misc_feature: MA Experiment 20000436 PARAMETER Experiment Name: At_Drought_P Parameter: Plant Line Value: WS
  misc_feature: MA Experiment 20000436 PARAMETER Experiment Name: At_Drought_P Parameter: Timepoint (hr) Value: 12
  misc_feature: MA Experiment 20000436 PARAMETER Experiment Name: At_Drought_P Parameter: Tissue Value: Whole Plant
  misc_feature: MA Experiment 20000436 PARAMETER Experiment Name: At_Drought_P Parameter: Treatment Value: Drought vs. No Drought
  misc_feature: MA Experiment ID: 20000437 Result: Down-regulated in Transcription
  misc_feature: MA Experiment 20000437 PARAMETER Experiment Name: At_Drought_P Parameter: Age (day) Value: 8
  misc_feature: MA Experiment 20000437 PARAMETER Experiment Name: At_Drought_P Parameter: Organism Value: A. thaliana
  misc_feature: MA Experiment 20000437 PARAMETER Experiment Name: At_Drought_P Parameter: Plant Line Value: WS
  misc_feature: MA Experiment 20000437 PARAMETER Experiment Name: At_Drought_P Parameter: Timepoint (hr) Value: 24
  misc_feature: MA Experiment 20000437 PARAMETER Experiment Name: At_Drought_P Parameter: Tissue Value: Whole Plant
  misc_feature: MA Experiment 20000437 PARAMETER Experiment Name: At_Drought_P Parameter: Treatment Value: Drought vs. No Drought
  misc_feature: MA Experiment ID: 20000439 Result: Down-regulated in Transcription
  misc_feature: MA Experiment 20000439 PARAMETER Experiment Name: At_Roots__P Parameter: Age (day) Value: 14 vs. 21
  misc_feature: MA Experiment 20000439 PARAMETER Experiment Name: At_Roots__P Parameter: Organism Value: A. thaliana
  misc_feature: MA Experiment 20000439 PARAMETER Experiment Name: At_Roots__P Parameter: Tissue Value: Roots vs. Whole Plant
  misc_feature: MA Experiment ID: 20000451 Result: Down-regulated in Transcription
  misc_feature: MA Experiment 20000451 PARAMETER Experiment Name: At_CS6879_Shoots-Roots_P Parameter: Age (day) Value: 14
  misc_feature: MA Experiment 20000451 PARAMETER Experiment Name: At_CS6879_Shoots-Roots_P Parameter: Organism Value: A. thaliana
  misc_feature: MA Experiment 20000451 PARAMETER Experiment Name: At_CS6879_Shoots-Roots_P Parameter: Plant Line Value: CS6879 vs. WS
  misc_feature: MA Experiment 20000451 PARAMETER Experiment Name: At_CS6879_Shoots-Roots_P Parameter: Tissue Value: Roots
  misc_feature: MA Experiment ID: 20000573 Result: Down-regulated in Transcription
  misc_feature: MA Experiment 20000573 PARAMETER Experiment Name: At_100uM_ABA_Mutants__P Parameter: Organism Value: A. thaliana
  misc_feature: MA Experiment 20000573 PARAMETER Experiment Name: At_100uM_ABA_Mutants__P Parameter: Plant Line Value: CS22 vs. Ler wt
  misc_feature: MA Experiment 20000573 PARAMETER Experiment Name: At_100uM_ABA_Mutants__P Parameter: Timepoint (hr) Value: N/A
  misc_feature: MA Experiment 20000573 PARAMETER Experiment Name: At_100uM_ABA_Mutants__P Parameter: Tissue Value: Whole Plant
  misc_feature: MA Experiment 20000573 PARAMETER Experiment Name: At_100uM_ABA_Mutants__P Parameter: Treatment Value: None
  misc_feature: MA Experiment ID: 20000574 Result: Down-regulated in Transcription
  misc_feature: MA Experiment 20000574 PARAMETER Experiment Name: At_100uM_ABA_Mutants__P Parameter: Organism Value: A. thaliana
  misc_feature: MA Experiment 20000574 PARAMETER Experiment Name: At_100uM_ABA_Mutants__P Parameter: Plant Line Value: CS23 vs. Ler wt
  misc_feature: MA Experiment 20000574 PARAMETER Experiment Name: At_100uM_ABA_Mutants__P Parameter: Timepoint (hr) Value: N/A
  misc_feature: MA Experiment 20000574 PARAMETER Experiment Name: At_100uM_ABA_Mutants__P Parameter: Tissue Value: Whole Plant
  misc_feature: MA Experiment 20000574 PARAMETER Experiment Name: At_100uM_ABA_Mutants__P Parameter: Treatment Value: None
  misc_feature: MA Experiment ID: 20000709 Result: Up-regulated in Transcription
  misc_feature: MA Experiment 20000709 PARAMETER Experiment Name: At_15mM_NH4NO3_L-to-H_P Parameter: Age (hr) Value: 14
  misc_feature: MA Experiment 20000709 PARAMETER Experiment Name: At_15mM_NH4NO3_L-to-H_P Parameter: Organism Value: A. thaliana
  misc_feature: MA Experiment 20000709 PARAMETER Experiment Name: At_15mM_NH4NO3_L-to-H_P Parameter: Plant Line Value: WS
  misc_feature: MA Experiment 20000709 PARAMETER Experiment Name: At_15mM_NH4NO3_L-to-H_P Parameter: Timepoint (hr) Value: 4
  misc_feature: MA Experiment 20000709 PARAMETER Experiment Name: At_15mM_NH4NO3_L-to-H_P Parameter: Tissue Value: Aerial
  misc_feature: MA Experiment 20000709 PARAMETER Experiment Name: At_15mM_NH4NO3_L-to-H_P Parameter: Treatment Value: 15mM NH4NO3 vs. 30mM Mannitol
  misc_feature: MA Experiment ID: 20000794 Result: Down-regulated in Transcription
  misc_feature: MA Experiment 20000794 PARAMETER Experiment Name: At_Petals_P Parameter: Age (day) Value: 23-25 days
  misc_feature: MA Experiment 20000794 PARAMETER Experiment Name: At_Petals_P Parameter: Plant Line Value: WS
  misc_feature: MA Experiment 20000794 PARAMETER Experiment Name: At_Petals_P Parameter: Tissue Value: Petals vs. Whole plant
  misc_feature: MA Experiment ID: 20001247 Result: Up-regulated in Transcription
  misc_feature: MA Experiment 20001247 PARAMETER Experiment Name: At_Far-red-induction_P Parameter: Age (day) Value: 7
  misc_feature: MA Experiment 20001247 PARAMETER Experiment Name: At_Far-red-induction_P Parameter: Light Value: Far-red vs. White
  misc_feature: MA Experiment 20001247 PARAMETER Experiment Name: At_Far-red-induction_P Parameter: Organism Value: A. thaliana
  misc_feature: MA Experiment 20001247 PARAMETER Experiment Name: At_Far-red-induction_P Parameter: Plant Line Value: Columbia
  misc_feature: MA Experiment 20001247 PARAMETER Experiment Name: At_Far-red-induction_P Parameter: Timepoint (hr) Value: 1
  misc_feature: MA Experiment 20001247 PARAMETER Experiment Name: At_Far-red-induction_P Parameter: Tissue Value: Whole Plant
  misc_feature: MA Experiment ID: 20001554 Result: Down-regulated in Transcription
  misc_feature: MA Experiment 20001554 PARAMETER Experiment Name: At_Drought_Soil_Dry_P Parameter: Age (day) Value: 21
  misc_feature: MA Experiment 20001554 PARAMETER Experiment Name: At_Drought_Soil_Dry_P Parameter: Organism Value: A. thaliana
  misc_feature: MA Experiment 20001554 PARAMETER Experiment Name: At_Drought_Soil_Dry_P Parameter: Plant Line Value: WS
  misc_feature: MA Experiment 20001554 PARAMETER Experiment Name: At_Drought_Soil_Dry_P Parameter: Post Timepoint (hr) Value: None
  misc_feature: MA Experiment 20001554 PARAMETER Experiment Name: At_Drought_Soil_Dry_P Parameter: Post-Treatment Value: None
  misc_feature: MA Experiment 20001554 PARAMETER Experiment Name: At_Drought_Soil_Dry_P Parameter: Timepoint (day) Value: 7
  misc_feature: MA Experiment 20001554 PARAMETER Experiment Name: At_Drought_Soil_Dry_P Parameter: Treatment Value: Drought vs. No Drought
  misc_feature: MA Experiment ID: 20001757 Result: Up-regulated in Transcription
  misc_feature: MA Experiment 20001757 PARAMETER Experiment Name: At_50mM_NH4NO3_L-to-H_P Parameter: Timepoint (hr) Value: 6
  misc_feature: MA Experiment 20001757 PARAMETER Experiment Name: At_50mM_NH4NO3_L-to-H_P Parameter: Tissue Value: Leaf
  misc_feature: MA Experiment 20001757 PARAMETER Experiment Name: At_50mM_NH4NO3_L-to-H_P Parameter: Treatment Value: 50mM NH4NO3 vs 100mM Mannitol
  misc_feature: MA Experiment ID: 20001904 Result: Down-regulated in Transcription
  misc_feature: MA Experiment 20001904 PARAMETER Experiment Name: At_Drought_Reproduction_P Parameter: Age (day) Value: 37
  misc_feature: MA Experiment 20001904 PARAMETER Experiment Name: At_Drought_Reproduction_P Parameter: Organism Value: A. thaliana
  misc_feature: MA Experiment 20001904 PARAMETER Experiment Name: At_Drought_Reproduction_P Parameter: Plant Line Value: WS
  misc_feature: MA Experiment 20001904 PARAMETER Experiment Name: At_Drought_Reproduction_P Parameter: Timepoint (day) Value: 7
  misc_feature: MA Experiment 20001904 PARAMETER Experiment Name: At_Drought_Reproduction_P Parameter: Tissue Value: Rosettes
  misc_feature: MA Experiment 20001904 PARAMETER Experiment Name: At_Drought_Reproduction_P Parameter: Treatment Value: Drought vs. No Drought
  misc_feature: MA Experiment ID: 20001905 Result: Down-regulated in Transcription
  misc_feature: MA Experiment 20001905 PARAMETER Experiment Name: At_Drought_Reproduction_P Parameter: Age (day) Value: 40
  misc_feature: MA Experiment 20001905 PARAMETER Experiment Name: At_Drought_Reproduction_P Parameter: Organism Value: A. thaliana
  misc_feature: MA Experiment 20001905 PARAMETER Experiment Name: At_Drought_Reproduction_P Parameter: Plant Line Value: WS
  misc_feature: MA Experiment 20001905 PARAMETER Experiment Name: At_Drought_Reproduction_P Parameter: Timepoint (day) Value: 10
  misc_feature: MA Experiment 20001905 PARAMETER Experiment Name: At_Drought_Reproduction_P Parameter: Tissue Value: Rosettes
  misc_feature: MA Experiment 20001905 PARAMETER Experiment Name: At_Drought_Reproduction_P Parameter: Treatment Value: Drought vs. No Drought
  misc_feature: MA Experiment ID: 20001906 Result: Down-regulated in Transcription
  misc_feature: MA Experiment 20001906 PARAMETER Experiment Name: At_Drought_Reproduction_P Parameter: Age (day) Value: 35
  misc_feature: MA Experiment 20001906 PARAMETER Experiment Name: At_Drought_Reproduction_P Parameter: Organism Value: A. thaliana
  misc_feature: MA Experiment 20001906 PARAMETER Experiment Name: At_Drought_Reproduction_P Parameter: Plant Line Value: WS
  misc_feature: MA Experiment 20001906 PARAMETER Experiment Name: At_Drought_Reproduction_P Parameter: Timepoint (day) Value: 5
  misc_feature: MA Experiment 20001906 PARAMETER Experiment Name: At_Drought_Reproduction_P Parameter: Tissue Value: Siliques
  misc_feature: MA Experiment 20001906 PARAMETER Experiment Name: At_Drought_Reproduction_P Parameter: Treatment Value: Drought vs. No Drought
  misc_feature: MA Experiment ID: 20001907 Result: Down-regulated in Transcription
  misc_feature: MA Experiment 20001907 PARAMETER Experiment Name: At_Drought_Reproduction_P Parameter: Age (day) Value: 37
  misc_feature: MA Experiment 20001907 PARAMETER Experiment Name: At_Drought_Reproduction_P Parameter: Organism Value: A. thaliana
  misc_feature: MA Experiment 20001907 PARAMETER Experiment Name: At_Drought_Reproduction_P Parameter: Plant Line Value: WS
  misc_feature: MA Experiment 20001907 PARAMETER Experiment Name: At_Drought_Reproduction_P Parameter: Timepoint (day) Value: 7
  misc_feature: MA Experiment 20001907 PARAMETER Experiment Name: At_Drought_Reproduction_P Parameter: Tissue Value: Siliques
  misc_feature: MA Experiment 20001907 PARAMETER Experiment Name: At_Drought_Reproduction_P Parameter: Treatment Value: Drought vs. No Drought
  misc_feature: MA Experiment ID: 20001908 Result: Down-regulated in Transcription
  misc_feature: MA Experiment 20001908 PARAMETER Experiment Name: At_Drought_Reproduction_P Parameter: Age (day) Value: 40
  misc_feature: MA Experiment 20001908 PARAMETER Experiment Name: At_Drought_Reproduction_P Parameter: Organism Value: A. thaliana
  misc_feature: MA Experiment 20001908 PARAMETER Experiment Name: At_Drought_Reproduction_P Parameter: Plant Line Value: WS
  misc_feature: MA Experiment 20001908 PARAMETER Experiment Name: At_Drought_Reproduction_P Parameter: Timepoint (day) Value: 10
  misc_feature: MA Experiment 20001908 PARAMETER Experiment Name: At_Drought_Reproduction_P Parameter: Tissue Value: Siliques
  misc_feature: MA Experiment 20001908 PARAMETER Experiment Name: At_Drought_Reproduction_P Parameter: Treatment Value: Drought vs. No Drought
aaagtattattccgaatgtaaatagtggaacaaaaagaacagctgggaggattttgtttaaaaggacactacacttcccagctttccctcactgcccgaaaagaacactgcagaaacactttcctctgttcacagagaaagagagagatgatgctttacagcaacaatagttggagatcgaattccattttaatacttctacttggtctctccattgtggccgccgcagactccgccggcaaaacttcaccggtcgaagacggcttggtggttaacggcgactttgagacaccgccgtcaaacggcttccctgatgacgcaatcatcgaggacacctccgagatcccgagctggcgatccgatggtacggtggagctaatcaagtccggtcaaaaacaaggcgggatgatcttgatcgtgcctgagggccgtcacgctgttagattaggaaacgatgcagagatcagccaagaacttacggtggagaaaggctctatctactccgtcacgttcagtgcagcccgcacatgtgcacaactcgagtcgctgaatgtttcggtagcttcttctgatgaacctatcgcatcgcaaaccattgacttgcaaacggtgtacagcgttcaaggatgggatccatatgcatgggcgtttgaagcggttgtggatcgcgtccggttggtttttaagaaccctggcatggaggatgatcctacttgtggacctatcattgacgacattgccgttaagaagctctttactcctgataaacccaaaggcaatgcagtgattaatggagattttgaagaaggtccatggatgtttaggaacactaccttaggtgttctgcttccaacaaacctcgatgaagaaatatcgtctcttcctggatggaccgtctaatcgaaccgagcagtacggtttattgactcagaccatttctcggtccccgaggggaagcgagctttggaacttttatcgggcaaagaaggcataatttctcaaatggttgagacaaaggcgaacattccgtacaagatgtctttctctttgggacacgcaggggacaagtgtaaggaacctttggctgtaatggcttttgctggagatcaagcacagaactttcattatatggcgcaagcaaactcgagtttcgaaagatcggagttgaacttcactgcgaaagctgaacgtacgaggatcgccttctacagcatttattacaatacgaggacggacgatatgacttcattgtgtggacctgtgattgatgacgttaaggtttggttctccgggtctagtagaattggatttagttttccgctttttattcttctttctttggttttcatctagattgttccggttcagaaattgtattggtagaccgggaattaagacgggattccacgttgtatgatgtatcgttgtatgatggatcggttcaaggtacaagaaatg

SEQ ID NO: 24469 - protein, 250 aa, Arabidopsis thaliana
  peptide (1)..(250): Ceres Seq. ID no. 13487846
  misc_feature (55)..(250): Pfam Name: Protein of unknown function, DUF642 Pfam Description: Protein of unknown function, DUF642
  misc_feature (38)..(250): Homolog of NCBI NO: 15239049 NR Description: expressed protein [Arabidopsis thaliana]
  misc_feature (38)..(250): Homolog of NCBI NO: 23397043 NR Description: unknown protein [Arabidopsis thaliana]
  misc_feature (14)..(250): Homolog of NCBI NO: 15809822 NR Description: AT5g25460/F18G18_200 [Arabidopsis thaliana]
  misc_feature (14)..(250): Homolog of NCBI NO: 15239438 NR Description: expressed protein [Arabidopsis thaliana]
  misc_feature (104)..(250): Homolog of NCBI NO: 34913458 NR Description: P0702H08.18 [Oryza sativa (japonica
  misc_feature (38)..(250): Homolog of NCBI NO: 18418018 NR Description: expressed protein [Arabidopsis thaliana]
  misc_feature (21)..(250): Homolog of NCBI NO: 7488898 NR Description: hypothetical protein - castor bean
  misc_feature (7)..(250): Homolog of NCBI NO: 34909656 NR Description: OJ1414_E05.5 [Oryza sativa (japonica
  misc_feature (2)..(250): Homolog of NCBI NO: 18397308 NR Description: expressed protein [Arabidopsis thaliana]
  misc_feature (1)..(250): Homolog of NCBI NO: 15226760 NR Description: expressed protein [Arabidopsis thaliana]
MMLYSNNSWRSNSILILLLGLSIVAAADSAGKTSPVEDGLVVNGDFETPPSNGFPDDAIIEDTSEIPSWRSDGTVELIKSGQKQGGMILIVPEGRHAVRLGNDAEISQELTVEKGSIYSVTFSAARTCAQLESLNVSVASSDEPIASQTIDLQTVYSVQGWDPYAWAFEAVVDRVRLVFKNPGMEDDPTCGPIIDDIAVKKLFTPDKPKGNAVINGDFEEGPWMFRNTTLGVLLPTNLDEEISSLPGWTV

SEQ ID NO: 24470 - protein, 249 aa, Arabidopsis thaliana
  peptide (1)..(249): Ceres Seq. ID no. 13487847
  misc_feature (54)..(249): Pfam Name: Protein of unknown function, DUF642 Pfam Description: Protein of unknown function, DUF642
  misc_feature (37)..(249): Homolog of NCBI NO: 15239049 NR Description: expressed protein [Arabidopsis thaliana]
  misc_feature (37)..(249): Homolog of NCBI NO: 23397043 NR Description: unknown protein [Arabidopsis thaliana]
  misc_feature (13)..(249): Homolog of NCBI NO: 15809822 NR Description: AT5g25460/F18G18_200 [Arabidopsis thaliana]
  misc_feature (13)..(249): Homolog of NCBI NO: 15239438 NR Description: expressed protein [Arabidopsis thaliana]
  misc_feature (103)..(249): Homolog of NCBI NO: 34913458 NR Description: P0702H08.18 [Oryza sativa (japonica
  misc_feature (37)..(249): Homolog of NCBI NO: 18418018 NR Description: expressed protein [Arabidopsis thaliana]
  misc_feature (20)..(249): Homolog of NCBI NO: 7488898 NR Description: hypothetical protein - castor bean
  misc_feature (6)..(249): Homolog of NCBI NO: 34909656 NR Description: OJ1414_E05.5 [Oryza sativa (japonica
  misc_feature (1)..(249): Homolog of NCBI NO: 18397308 NR Description: expressed protein [Arabidopsis thaliana]
  misc_feature (1)..(249): Homolog of NCBI NO: 15226760 NR Description: expressed protein [Arabidopsis thaliana]
MLYSNNSWRSNSILILLLGLSIVAAADSAGKTSPVEDGLVVNGDFETPPSNGFPDDAIIEDTSEIPSWRSDGTVELIKSGQKQGGMILIVPEGRHAVRLGNDAEISQELTVEKGSIYSVTFSAARTCAQLESLNVSVASSDEPIASQTIDLQTVYSVQGWDPYAWAFEAVVDRVRLVFKNPGMEDDPTCGPIIDDIAVKKLFTPDKPKGNAVINGDFEEGPWMFRNTTLGVLLPTNLDEEISSLPGWTV

SEQ ID NO: 24471 - protein, 164 aa, Arabidopsis thaliana
  peptide (1)..(164): Ceres Seq. ID no. 13487848
  misc_feature (1)..(164): Pfam Name: Protein of unknown function, DUF642 Pfam Description: Protein of unknown function, DUF642
  misc_feature (1)..(164): Homolog of NCBI NO: 15239049 NR Description: expressed protein [Arabidopsis thaliana]
  misc_feature (1)..(164): Homolog of NCBI NO: 23397043 NR Description: unknown protein [Arabidopsis thaliana]
  misc_feature (1)..(164): Homolog of NCBI NO: 15809822 NR Description: AT5g25460/F18G18_200 [Arabidopsis thaliana]
  misc_feature (1)..(164): Homolog of NCBI NO: 15239438 NR Description: expressed protein [Arabidopsis thaliana]
  misc_feature (18)..(164): Homolog of NCBI NO: 34913458 NR Description: P0702H08.18 [Oryza sativa (japonica
  misc_feature (1)..(164): Homolog of NCBI NO: 18418018 NR Description: expressed protein [Arabidopsis thaliana]
  misc_feature (1)..(164): Homolog of NCBI NO: 7488898 NR Description: hypothetical protein - castor bean
  misc_feature (1)..(164): Homolog of NCBI NO: 34909656 NR Description: OJ1414_E05.5 [Oryza sativa (japonica
  misc_feature (1)..(164): Homolog of NCBI NO: 18397308 NR Description: expressed protein [Arabidopsis thaliana]
  misc_feature (1)..(164): Homolog of NCBI NO: 15226760 NR Description: expressed protein [Arabidopsis thaliana]
MILIVPEGRHAVRLGNDAEISQELTVEKGSIYSVTFSAARTCAQLESLNVSVASSDEPIASQTIDLQTVYSVQGWDPYAWAFEAVVDRVRLVFKNPGMEDDPTCGPIIDDIAVKKLFTPDKPKGNAVINGDFEEGPWMFRNTTLGVLLPTNLDEEISSLPGWTV

SEQ ID NO: 24472 - DNA, 1323 bp, Arabidopsis thaliana
  misc_feature (1)..(1323): Ceres Seq. ID no. 12324839
  misc_feature: MA Experiment ID: 108433 Result: Up-regulated in Transcription
  misc_feature: MA Experiment 108433 PARAMETER Experiment Name: At_rhl_Mutant2_cDNA_P Parameter: Age (day) Value: 7
  misc_feature: MA Experiment 108433 PARAMETER Experiment Name: At_rhl_Mutant2_cDNA_P Parameter: Organism Value: A. thaliana
  misc_feature: MA Experiment 108433 PARAMETER Experiment Name: At_rhl_Mutant2_cDNA_P Parameter: Plant Line Value: rhl Mutant vs. wt landsburg
  misc_feature: MA Experiment 108433 PARAMETER Experiment Name: At_rhl_Mutant2_cDNA_P Parameter: Tissue Value: Roots
  misc_feature: MA Experiment ID: 108435 Result: Down-regulated in Transcription
  misc_feature: MA Experiment 108435 PARAMETER Experiment Name: At_stm_Mutants_cDNA_P Parameter: Plant Line Value: wt Landsburg vs stm
  misc_feature: MA Experiment 108435 PARAMETER Experiment Name: At_stm_Mutants_cDNA_P Parameter: Tissue Value: Shoot Apical Meristem Region
  misc_feature: MA Experiment ID: 108462 Result: Up-regulated in Transcription
  misc_feature: MA Experiment 108462 PARAMETER Experiment Name: At_Germinating_Seeds_cDNA_P Parameter: Age (day) Value: 2 vs. 0
  misc_feature: MA Experiment 108462 PARAMETER Experiment Name: At_Germinating_Seeds_cDNA_P Parameter: Tissue Value: Germinating Seeds
  misc_feature: MA Experiment ID: 108463 Result: Up-regulated in Transcription
  misc_feature: MA Experiment 108463 PARAMETER Experiment Name: At_Germinating_Seeds_cDNA_P Parameter: Age (day) Value: 3 vs. 0
  misc_feature: MA Experiment 108463 PARAMETER Experiment Name: At_Germinating_Seeds_cDNA_P Parameter: Tissue Value: Germinating Seeds
  misc_feature: MA Experiment ID: 108489 Result: Down-regulated in Transcription
  misc_feature: MA Experiment ID: 108501 Result: Down-regulated in Transcription
  misc_feature: MA Experiment 108501 PARAMETER Experiment Name: At_ap2_floral_buds_cDNA_P Parameter: Plant Line Value: ap2 (Ler.)
  misc_feature: MA Experiment 108501 PARAMETER Experiment Name: At_ap2_floral_buds_cDNA_P Parameter: Tissue Value: Closed Flower
  misc_feature: MA Experiment ID: 108572 Result: Up-regulated in Transcription
  misc_feature: MA Experiment 108572 PARAMETER Experiment Name: At_Drought_cDNA_P Parameter: Timepoint (hr) Value: 1
  misc_feature: MA Experiment 108572 PARAMETER Experiment Name: At_Drought_cDNA_P Parameter: Tissue Value: Aerial
  misc_feature: MA Experiment 108572 PARAMETER Experiment Name: At_Drought_cDNA_P Parameter: Treatment Value: Drought vs. No Drought
  misc_feature: MA Experiment ID: 108574 Result: Up-regulated in Transcription
  misc_feature: MA Experiment 108574 PARAMETER Experiment Name: At_Wounding__cDNA_P Parameter: Timepoint (hr) Value: 1
  misc_feature: MA Experiment 108574 PARAMETER Experiment Name: At_Wounding__cDNA_P Parameter: Tissue Value: Aerial
  misc_feature: MA Experiment 108574 PARAMETER Experiment Name: At_Wounding__cDNA_P Parameter: Treatment Value: Wounding vs. No Wounding
  misc_feature: MA Experiment ID: 108577 Result: Down-regulated in Transcription
  misc_feature: MA Experiment 108577 PARAMETER Experiment Name: At_42deg_Heat_cDNA_P Parameter: Temperature (deg C) Value: 42 vs. 22
  misc_feature: MA Experiment 108577 PARAMETER Experiment Name: At_42deg_Heat_cDNA_P Parameter: Timepoint (hr) Value: 6
  misc_feature: MA Experiment 108577 PARAMETER Experiment Name: At_42deg_Heat_cDNA_P Parameter: Tissue Value: Aerial
  misc_feature: MA Experiment ID: 108585 Result: Down-regulated in Transcription
  misc_feature: MA Experiment 108585 PARAMETER Experiment Name: At_5mM_NaNP_cDNA_P Parameter: Timepoint (hr) Value: 6
  misc_feature: MA Experiment 108585 PARAMETER Experiment Name: At_5mM_NaNP_cDNA_P Parameter: Tissue Value: Aerial
  misc_feature: MA Experiment 108585 PARAMETER Experiment Name: At_5mM_NaNP_cDNA_P Parameter: Treatment Value: null
  misc_feature: MA Experiment ID: 108594 Result: Up-regulated in Transcription
  misc_feature: MA Experiment 108594 PARAMETER Experiment Name: At_Ler-rhl_Root_cDNA_P Parameter: Plant Line Value: null
  misc_feature: MA Experiment ID: 108595 Result: Up-regulated in Transcription
  misc_feature: MA Experiment 108595 PARAMETER Experiment Name: At_Ler-pi_Ovule_cDNA_P Parameter: Plant Line Value: null
  misc_feature: MA Experiment ID: 108668 Result: Down-regulated in Transcription
  misc_feature: MA Experiment 108668 PARAMETER Experiment Name: At_2mM_SA_cDNA_P Parameter: Plant Line Value: WS
  misc_feature: MA Experiment 108668 PARAMETER Experiment Name: At_2mM_SA_cDNA_P Parameter: Timepoint (hr) Value: 6
  misc_feature: MA Experiment 108668 PARAMETER Experiment Name: At_2mM_SA_cDNA_P Parameter: Treatment Value: 2mM SA vs. No Treatment
  misc_feature: MA Experiment ID: 20000030 Result: Down-regulated in Transcription
  misc_feature: MA Experiment 20000030 PARAMETER Experiment Name: At_CS6630_Roots_cDNA_P Parameter: Plant Line Value: CS6630 vs. WS
  misc_feature: MA Experiment 20000030 PARAMETER Experiment Name: At_CS6630_Roots_cDNA_P Parameter: Tissue Value: Roots
  misc_feature: MA Experiment ID: 20000069 Result: Up-regulated in Transcription
  misc_feature: MA Experiment 20000069 PARAMETER Experiment Name: At_100uM_ABA_Mutants_cDNA_P Parameter: Plant Line Value: CS23
  misc_feature: MA Experiment 20000069 PARAMETER Experiment Name: At_100uM_ABA_Mutants_cDNA_P Parameter: Timepoint (hr) Value: 6
  misc_feature: MA Experiment 20000069 PARAMETER Experiment Name: At_100uM_ABA_Mutants_cDNA_P Parameter: Tissue Value: Aerial
  misc_feature: MA Experiment 20000069 PARAMETER Experiment Name: At_100uM_ABA_Mutants_cDNA_P Parameter: Treatment Value: 100uM ABA vs. No Treatment
  misc_feature: MA Experiment ID: 20000070 Result: Up-regulated in Transcription
  misc_feature: MA Experiment 20000070 PARAMETER Experiment Name: At_100uM_ABA_Mutants_cDNA_P Parameter: Plant Line Value: CS24
  misc_feature: MA Experiment 20000070 PARAMETER Experiment Name: At_100uM_ABA_Mutants_cDNA_P Parameter: Timepoint (hr) Value: 6
  misc_feature: MA Experiment 20000070 PARAMETER Experiment Name: At_100uM_ABA_Mutants_cDNA_P Parameter: Tissue Value: Aerial
  misc_feature: MA Experiment 20000070 PARAMETER Experiment Name: At_100uM_ABA_Mutants_cDNA_P Parameter: Treatment Value: 100uM ABA vs. No Treatment
  misc_feature: MA Experiment ID: 20000071 Result: Up-regulated in Transcription
  misc_feature: MA Experiment 20000071 PARAMETER Experiment Name: At_100uM_ABA_Mutants_cDNA_P Parameter: Plant Line Value: CS8104
  misc_feature: MA Experiment 20000071 PARAMETER Experiment Name: At_100uM_ABA_Mutants_cDNA_P Parameter: Timepoint (hr) Value: 6
  misc_feature: MA Experiment 20000071 PARAMETER Experiment Name: At_100uM_ABA_Mutants_cDNA_P Parameter: Tissue Value: Aerial
  misc_feature: MA Experiment 20000071 PARAMETER Experiment Name: At_100uM_ABA_Mutants_cDNA_P Parameter: Treatment Value: 100uM ABA vs. No Treatment
  misc_feature: MA Experiment ID: 20000072 Result: Up-regulated in Transcription
  misc_feature: MA Experiment 20000072 PARAMETER Experiment Name: At_100uM_ABA_Mutants_cDNA_P Parameter: Plant Line Value: CS8105
  misc_feature: MA Experiment 20000072 PARAMETER Experiment Name: At_100uM_ABA_Mutants_cDNA_P Parameter: Timepoint (hr) Value: 6
  misc_feature: MA Experiment 20000072 PARAMETER Experiment Name: At_100uM_ABA_Mutants_cDNA_P Parameter: Tissue Value: Aerial
  misc_feature: MA Experiment 20000072 PARAMETER Experiment Name: At_100uM_ABA_Mutants_cDNA_P Parameter: Treatment Value: 100uM ABA vs. No Treatment
  misc_feature: MA Experiment ID: 20000086 Result: Up-regulated in Transcription
  misc_feature: MA Experiment 20000086 PARAMETER Experiment Name: At_100uM_ABA_Mutants_cDNA_P Parameter: Plant Line Value: CS22
  misc_feature: MA Experiment 20000086 PARAMETER Experiment Name: At_100uM_ABA_Mutants_cDNA_P Parameter: Timepoint (hr) Value: 6
  misc_feature: MA Experiment 20000086 PARAMETER Experiment Name: At_100uM_ABA_Mutants_cDNA_P Parameter: Tissue Value: Aerial
  misc_feature: MA Experiment 20000086 PARAMETER Experiment Name: At_100uM_ABA_Mutants_cDNA_P Parameter: Treatment Value: 100uM ABA vs. No Treatment
  misc_feature: MA Experiment ID: 20000087 Result: Up-regulated in Transcription
  misc_feature: MA Experiment 20000087 PARAMETER Experiment Name: At_100uM_ABA_Mutants_cDNA_P Parameter: Plant Line Value: WS
  misc_feature: MA Experiment 20000087 PARAMETER Experiment Name: At_100uM_ABA_Mutants_cDNA_P Parameter: Timepoint (hr) Value: 6
  misc_feature: MA Experiment 20000087 PARAMETER Experiment Name: At_100uM_ABA_Mutants_cDNA_P Parameter: Tissue Value: Aerial
  misc_feature: MA Experiment 20000087 PARAMETER Experiment Name: At_100uM_ABA_Mutants_cDNA_P Parameter: Treatment Value: 100uM ABA vs. No Treatment
  misc_feature: MA Experiment ID: 20000088 Result: Up-regulated in Transcription
  misc_feature: MA Experiment 20000088 PARAMETER Experiment Name: At_100uM_ABA_Mutants_cDNA_P Parameter: Plant Line Value: Landsberg
  misc_feature: MA Experiment 20000088 PARAMETER Experiment Name: At_100uM_ABA_Mutants_cDNA_P Parameter: Timepoint (hr) Value: 6
  misc_feature: MA Experiment 20000088 PARAMETER Experiment Name: At_100uM_ABA_Mutants_cDNA_P Parameter: Tissue Value: Aerial
  misc_feature: MA Experiment 20000088 PARAMETER Experiment Name: At_100uM_ABA_Mutants_cDNA_P Parameter: Treatment Value: 100uM ABA vs. No Treatment
  misc_feature: MA Experiment ID: 20000089 Result: Up-regulated in Transcription
  misc_feature: MA Experiment ID: 20000090 Result: Up-regulated in Transcription
  misc_feature: MA Experiment ID: 20000111 Result: Down-regulated in Transcription
  misc_feature: MA Experiment 20000111 PARAMETER Experiment Name: At_42deg_Heat_cDNA_P Parameter: Temperature (deg C) Value: 42 vs. 22
  misc_feature: MA Experiment 20000111 PARAMETER Experiment Name: At_42deg_Heat_cDNA_P Parameter: Timepoint (hr) Value: 6
  misc_feature: MA Experiment 20000111 PARAMETER Experiment Name: At_42deg_Heat_cDNA_P Parameter: Tissue Value: Aerial
  misc_feature: MA Experiment ID: 20000112 Result: Down-regulated in Transcription
  misc_feature: MA Experiment 20000112 PARAMETER Experiment Name: At_42deg_Heat_cDNA_P Parameter: Temperature (deg C) Value: 42 vs. 22
  misc_feature: MA Experiment 20000112 PARAMETER Experiment Name: At_42deg_Heat_cDNA_P Parameter: Timepoint (hr) Value: 2
  misc_feature: MA Experiment 20000112 PARAMETER Experiment Name: At_42deg_Heat_cDNA_P Parameter: Tissue Value: Aerial
  misc_feature: MA Experiment ID: 20000113 Result: Down-regulated in Transcription
  misc_feature: MA Experiment 20000113 PARAMETER Experiment Name: At_42deg_Heat_cDNA_P Parameter: Temperature (deg C) Value: 42 vs. 22
  misc_feature: MA Experiment 20000113 PARAMETER Experiment Name: At_42deg_Heat_cDNA_P Parameter: Timepoint (hr) Value: 8
  misc_feature: MA Experiment 20000113 PARAMETER Experiment Name: At_42deg_Heat_cDNA_P Parameter: Tissue Value: Aerial
  misc_feature: MA Experiment ID: 20000117 Result: Up-regulated in Transcription
  misc_feature: MA Experiment 20000117 PARAMETER Experiment Name: At_100uM_ABA_Mutants_cDNA_P Parameter: Plant Line Value: Columbia
  misc_feature: MA Experiment 20000117 PARAMETER Experiment Name: At_100uM_ABA_Mutants_cDNA_P Parameter: Timepoint (hr) Value: 6
  misc_feature: MA Experiment 20000117 PARAMETER Experiment Name: At_100uM_ABA_Mutants_cDNA_P Parameter: Tissue Value: Aerial
  misc_feature: MA Experiment 20000117 PARAMETER Experiment Name: At_100uM_ABA_Mutants_cDNA_P Parameter: Treatment Value: 100uM ABA vs. No Treatment
  misc_feature: MA Experiment ID: 20000144 Result: Down-regulated in Transcription
  misc_feature: MA Experiment 20000144 PARAMETER Experiment Name: At_42deg_Heat_cDNA_P Parameter: Temperature (deg C) Value: 42 vs. 22
  misc_feature: MA Experiment 20000144 PARAMETER Experiment Name: At_42deg_Heat_cDNA_P Parameter: Timepoint (hr) Value: 1
  misc_feature: MA Experiment 20000144 PARAMETER Experiment Name: At_42deg_Heat_cDNA_P Parameter: Tissue Value: Aerial
  misc_feature: MA Experiment ID: 20000173 Result: Down-regulated in Transcription
  misc_feature: MA Experiment 20000173 PARAMETER Experiment Name: At_42deg_Heat_P Parameter: Age (day) Value: 14
  misc_feature: MA Experiment 20000173 PARAMETER Experiment Name: At_42deg_Heat_P Parameter: Organism Value: A. thaliana
  misc_feature: MA Experiment 20000173 PARAMETER Experiment Name: At_42deg_Heat_P Parameter: Plant Line Value: WS
  misc_feature: MA Experiment 20000173 PARAMETER Experiment Name: At_42deg_Heat_P Parameter: Temperature (deg C) Value: 42 vs. 22
  misc_feature: MA Experiment 20000173 PARAMETER Experiment Name: At_42deg_Heat_P Parameter: Timepoint (hr) Value: 6
  misc_feature: MA Experiment 20000173 PARAMETER Experiment Name: At_42deg_Heat_P Parameter: Tissue Value: Aerial
  misc_feature: MA Experiment ID: 20000184 Result: Down-regulated in Transcription
  misc_feature: MA Experiment 20000184 PARAMETER Experiment Name: At_Shoots__P Parameter: Age (day) Value: 7
  misc_feature: MA Experiment 20000184 PARAMETER Experiment Name: At_Shoots__P Parameter: Tissue Value: Shoots vs. Whole Plant
  misc_feature: MA Experiment ID: 20000185 Result: Down-regulated in Transcription
  misc_feature: MA Experiment 20000185 PARAMETER Experiment Name: At_Roots__P Parameter: Age (day) Value: 7 vs. 21
  misc_feature: MA Experiment 20000185 PARAMETER Experiment Name: At_Roots__P Parameter: Organism Value: A. thaliana
  misc_feature: MA Experiment 20000185 PARAMETER Experiment Name: At_Roots__P Parameter: Tissue Value: Roots vs. Whole Plant
  misc_feature: MA Experiment ID: 20000211 Result: Up-regulated in Transcription
  misc_feature: MA Experiment 20000211 PARAMETER Experiment Name: At_0.001percent_MeJA__P Parameter: Age (day) Value: 14
  misc_feature: MA Experiment 20000211 PARAMETER Experiment Name: At_0.001percent_MeJA__P Parameter: Organism Value: A. thaliana
  misc_feature: MA Experiment 20000211 PARAMETER Experiment Name: At_0.001percent_MeJA__P Parameter: Plant Line Value: WS
  misc_feature: MA Experiment 20000211 PARAMETER Experiment Name: At_0.001percent_MeJA__P Parameter: Timepoint (hr) Value: 1
  misc_feature: MA Experiment 20000211 PARAMETER Experiment Name: At_0.001percent_MeJA__P Parameter: Tissue Value: Aerial
  misc_feature: MA Experiment 20000211 PARAMETER Experiment Name: At_0.001percent_MeJA__P Parameter: Treatment Value: 0.001percent MeJA vs. No Treatment
  misc_feature: MA Experiment ID: 20000213 Result: Up-regulated in Transcription
  misc_feature: MA Experiment 20000213 PARAMETER Experiment Name: At_4deg_Cold_P Parameter: Timepoint (hr) Value: 2
  misc_feature: MA Experiment ID: 20000227 Result: Down-regulated in Transcription
  misc_feature: MA Experiment 20000227 PARAMETER Experiment Name: At_Root-Tips-vs-Tops_P Parameter: Tissue Value: Root Tips vs. Root Tops
  misc_feature: MA Experiment ID: 20000234 Result: Down-regulated in Transcription
  misc_feature: MA Experiment 20000234 PARAMETER Experiment Name: At_Siliques_P Parameter: Age (day) Value: 21
  misc_feature: MA Experiment 20000234 PARAMETER Experiment Name: At_Siliques_P Parameter: Organism Value: A. thaliana
  misc_feature: MA Experiment 20000234 PARAMETER Experiment Name: At_Siliques_P Parameter: Plant Line Value: WS
  misc_feature: MA Experiment 20000234 PARAMETER Experiment Name: At_Siliques_P Parameter: Tissue Value: Less Than 5mm Siliques vs. Whole Plant
  misc_feature: MA Experiment ID: 20000235 Result: Down-regulated in Transcription
  misc_feature: MA Experiment 20000235 PARAMETER Experiment Name: At_Siliques_P Parameter: Age (day) Value: 21
  misc_feature: MA Experiment 20000235 PARAMETER Experiment Name: At_Siliques_P Parameter: Organism Value: A. thaliana
  misc_feature: MA Experiment 20000235 PARAMETER Experiment Name: At_Siliques_P Parameter: Plant Line Value: WS
  misc_feature: MA Experiment 20000235 PARAMETER Experiment Name: At_Siliques_P Parameter: Tissue Value: 5-10mm Siliques vs. Whole Plant
  misc_feature: MA Experiment ID: 20000269 Result: Up-regulated in Transcription
  misc_feature: MA Experiment 20000269 PARAMETER Experiment Name: At_1mM_KNO3_L-vs-H_Roots_P Parameter: Age (day) Value: 7,10,12
  misc_feature: MA Experiment 20000269 PARAMETER Experiment Name: At_1mM_KNO3_L-vs-H_Roots_P Parameter: Organism Value: A. thaliana
  misc_feature: MA Experiment 20000269 PARAMETER Experiment Name: At_1mM_KNO3_L-vs-H_Roots_P Parameter: Plant Line Value: WS
  misc_feature: MA Experiment 20000269 PARAMETER Experiment Name: At_1mM_KNO3_L-vs-H_Roots_P Parameter: Timepoint (day) Value: 7,10,12
  misc_feature: MA Experiment 20000269 PARAMETER Experiment Name: At_1mM_KNO3_L-vs-H_Roots_P Parameter: Tissue Value: Roots
  misc_feature: MA Experiment 20000269 PARAMETER Experiment Name: At_1mM_KNO3_L-vs-H_Roots_P Parameter: Treatment Value: 1mM KNO3 vs. 50mM KNO3
  misc_feature: MA Experiment ID: 20000436 Result: Up-regulated in Transcription
  misc_feature: MA Experiment 20000436 PARAMETER Experiment Name: At_Drought_P Parameter: Age (day) Value: 7
  misc_feature: MA Experiment 20000436 PARAMETER Experiment Name: At_Drought_P Parameter: Organism Value: A. thaliana
  misc_feature: MA Experiment 20000436 PARAMETER Experiment Name: At_Drought_P Parameter: Plant Line Value: WS
  misc_feature: MA Experiment 20000436 PARAMETER Experiment Name: At_Drought_P Parameter: Timepoint (hr) Value: 12
  misc_feature: MA Experiment 20000436 PARAMETER Experiment Name: At_Drought_P Parameter: Tissue Value: Whole Plant
  misc_feature: MA Experiment 20000436 PARAMETER Experiment Name: At_Drought_P Parameter: Treatment Value: Drought vs. No Drought
  misc_feature: MA Experiment ID: 20000437 Result: Up-regulated in Transcription
  misc_feature: MA Experiment 20000437 PARAMETER Experiment Name: At_Drought_P Parameter: Age (day) Value: 8
  misc_feature: MA Experiment 20000437 PARAMETER Experiment Name: At_Drought_P Parameter: Organism Value: A. thaliana
  misc_feature: MA Experiment 20000437 PARAMETER Experiment Name: At_Drought_P Parameter: Plant Line Value: WS
  misc_feature: MA Experiment 20000437 PARAMETER Experiment Name: At_Drought_P Parameter: Timepoint (hr) Value: 24
  misc_feature: MA Experiment 20000437 PARAMETER Experiment Name: At_Drought_P Parameter: Tissue Value: Whole Plant
  misc_feature: MA Experiment 20000437 PARAMETER Experiment Name: At_Drought_P Parameter: Treatment Value: Drought vs. No Drought
  misc_feature: MA Experiment ID: 20000438 Result: Down-regulated in Transcription
  misc_feature: MA Experiment 20000438 PARAMETER Experiment Name: At_Shoots__P Parameter: Age (day) Value: 14
  misc_feature: MA Experiment 20000438 PARAMETER Experiment Name: At_Shoots__P Parameter: Tissue Value: Shoots vs. Whole Plant
  misc_feature: MA Experiment ID: 20000451 Result: Down-regulated in Transcription
  misc_feature: MA Experiment 20000451 PARAMETER Experiment Name: At_CS6879_Shoots-Roots_P Parameter: Age (day) Value: 14
  misc_feature: MA Experiment 20000451 PARAMETER Experiment Name: At_CS6879_Shoots-Roots_P Parameter: Organism Value: A. thaliana
  misc_feature: MA Experiment 20000451 PARAMETER Experiment Name: At_CS6879_Shoots-Roots_P Parameter: Plant Line Value: CS6879 vs. WS
  misc_feature: MA Experiment 20000451 PARAMETER Experiment Name: At_CS6879_Shoots-Roots_P Parameter: Tissue Value: Roots
  misc_feature: MA Experiment ID: 20000495 Result: Down-regulated in Transcription
  misc_feature: MA Experiment 20000495 PARAMETER Experiment Name: At_Guard_Cells_P Parameter: Harvest Date Value: 8/2/2002
  misc_feature: MA Experiment 20000495 PARAMETER Experiment Name: At_Guard_Cells_P Parameter: Organism Value: A. thaliana
  misc_feature: MA Experiment 20000495 PARAMETER Experiment Name: At_Guard_Cells_P Parameter: Tissue Value: Guard Cells vs. Leaves
  misc_feature: MA Experiment ID: 20001247 Result: Down-regulated in Transcription
  misc_feature: MA Experiment 20001247 PARAMETER Experiment Name: At_Far-red-induction_P Parameter: Age (day) Value: 7
  misc_feature: MA Experiment 20001247 PARAMETER Experiment Name: At_Far-red-induction_P Parameter: Light Value: Far-red vs. White
  misc_feature: MA Experiment 20001247 PARAMETER Experiment Name: At_Far-red-induction_P Parameter: Organism Value: A. thaliana
  misc_feature: MA Experiment 20001247 PARAMETER Experiment Name: At_Far-red-induction_P Parameter: Plant Line Value: Columbia
  misc_feature: MA Experiment 20001247 PARAMETER Experiment Name: At_Far-red-induction_P Parameter: Timepoint (hr) Value: 1
  misc_feature: MA Experiment 20001247 PARAMETER Experiment Name: At_Far-red-induction_P Parameter: Tissue Value: Whole Plant
  misc_feature: MA Experiment ID: 20001451 Result: Down-regulated in Transcription
  misc_feature: MA Experiment 20001451 PARAMETER Experiment Name: At_Far-red-induction_P Parameter: Age (day) Value: 7
  misc_feature: MA Experiment 20001451 PARAMETER Experiment Name: At_Far-red-induction_P Parameter: Light Value: Far-red vs. White
  misc_feature: MA Experiment 20001451 PARAMETER Experiment Name: At_Far-red-induction_P Parameter: Organism Value: A. thaliana
  misc_feature: MA Experiment 20001451 PARAMETER Experiment Name: At_Far-red-induction_P Parameter: Plant Line Value: Columbia
  misc_feature: MA Experiment 20001451 PARAMETER Experiment Name: At_Far-red-induction_P Parameter: Timepoint (hr) Value: 24
  misc_feature: MA Experiment 20001451 PARAMETER Experiment Name: At_Far-red-induction_P Parameter: Tissue Value: Whole Plant
  misc_feature: MA Experiment ID: 20001558 Result: Down-regulated in Transcription
  misc_feature: MA Experiment 20001558 PARAMETER Experiment Name: At_Drought_Soil_Dry_P Parameter: Age (day) Value: 27
  misc_feature: MA Experiment 20001558 PARAMETER Experiment Name: At_Drought_Soil_Dry_P Parameter: Organism Value: A. thaliana
  misc_feature: MA Experiment 20001558 PARAMETER Experiment Name: At_Drought_Soil_Dry_P Parameter: Plant Line Value: WS
  misc_feature: MA Experiment 20001558 PARAMETER Experiment Name: At_Drought_Soil_Dry_P Parameter: Post Timepoint (hr) Value: 6
  misc_feature: MA Experiment 20001558 PARAMETER Experiment Name: At_Drought_Soil_Dry_P Parameter: Post-Treatment Value: Re-Water vs. No Drought
  misc_feature: MA Experiment 20001558 PARAMETER Experiment Name: At_Drought_Soil_Dry_P Parameter: Timepoint (day) Value: 13
  misc_feature: MA Experiment 20001558 PARAMETER Experiment Name: At_Drought_Soil_Dry_P Parameter: Treatment Value: Drought vs. No Drought
  misc_feature: MA Experiment ID: 20001905 Result: Down-regulated in Transcription
  misc_feature: MA Experiment 20001905 PARAMETER Experiment Name: At_Drought_Reproduction_P Parameter: Age (day) Value: 40
  misc_feature: MA Experiment 20001905 PARAMETER Experiment Name: At_Drought_Reproduction_P Parameter: Organism Value: A. thaliana
  misc_feature: MA Experiment 20001905 PARAMETER Experiment Name: At_Drought_Reproduction_P Parameter: Plant Line Value: WS
  misc_feature: MA Experiment 20001905 PARAMETER Experiment Name: At_Drought_Reproduction_P Parameter: Timepoint (day) Value: 10
  misc_feature: MA Experiment 20001905 PARAMETER Experiment Name: At_Drought_Reproduction_P Parameter: Tissue Value: Rosettes
  misc_feature: MA Experiment 20001905 PARAMETER Experiment Name: At_Drought_Reproduction_P Parameter: Treatment Value: Drought vs. No Drought
  misc_feature: MA Experiment ID: 20001906 Result: Down-regulated in Transcription
  misc_feature: MA Experiment 20001906 PARAMETER Experiment Name: At_Drought_Reproduction_P Parameter: Age (day) Value: 35
  misc_feature: MA Experiment 20001906 PARAMETER Experiment Name: At_Drought_Reproduction_P Parameter: Organism Value: A. thaliana
  misc_feature: MA Experiment 20001906 PARAMETER Experiment Name: At_Drought_Reproduction_P Parameter: Plant Line Value: WS
  misc_feature: MA Experiment 20001906 PARAMETER Experiment Name: At_Drought_Reproduction_P Parameter: Timepoint (day) Value: 5
  misc_feature: MA Experiment 20001906 PARAMETER Experiment Name: At_Drought_Reproduction_P Parameter: Tissue Value: Siliques
  misc_feature: MA Experiment 20001906 PARAMETER Experiment Name: At_Drought_Reproduction_P Parameter: Treatment Value: Drought vs. No Drought
  misc_feature: MA Experiment ID: 20001911 Result: Down-regulated in Transcription
  misc_feature: MA Experiment 20001911 PARAMETER Experiment Name: At_Drought_Reproduction_P Parameter: Age (day) Value: 40
  misc_feature: MA Experiment 20001911 PARAMETER Experiment Name: At_Drought_Reproduction_P Parameter: Organism Value: A. thaliana
  misc_feature: MA Experiment 20001911 PARAMETER Experiment Name: At_Drought_Reproduction_P Parameter: Plant Line Value: WS
  misc_feature: MA Experiment 20001911 PARAMETER Experiment Name: At_Drought_Reproduction_P Parameter: Timepoint (day) Value: 10
  misc_feature: MA Experiment 20001911 PARAMETER Experiment Name: At_Drought_Reproduction_P Parameter: Tissue Value: Flowers
  misc_feature: MA Experiment 20001911 PARAMETER Experiment Name: At_Drought_Reproduction_P Parameter: Treatment Value: Drought vs. No Drought
aaacaaatttcaagttctttaaacgatttccttttcaagaaaaacccttctccttcttctttttaccacatagatcttcttgatctacaatggattctgtttctctttctgaggttactgtcattagagaaacaacacatttggggtttatgcacagtttcagactcagacagccattttgtggtgtcaaaatatctccaaagttctatttatccaaagttgatggaccaaaggcaatatcttcgagcagcaacacaaagagtcaatttgtttatggaggaggaagcatagctgcaacttcagattcaggttataagatgaatggagtaaacctaaaaagcagaacattgatgagttctgcagttaaagaaagatcattacttgatgcttatgatgatgagtatggtggagtaatagtagatcatggaaaattaccatcaaacccttatgctttcgcttctatgcttcgagcttctctatccgattggagaagaaagggaaagaaaggagtttggttaaagttacctgtggaacaatcagaattagtcccaatagctataaaggaaggttttgagtatcatcatgcagagaaaggatatgtaatgttaacatattggataccaaaggaggaacctagtatgcttcctgcaaatgcttcacatcaagttggtgttggaggttttgtattaaatcaacataaagaggtgcttgtggtacaagaaaagtattgtgctccttcgattactggtctatggaaattaccaacagggtttatcaatgaatctgaagagattttctctggtgctgtaagagaagtcaaggaagaaactggggtagatacagagttctcagaggttatagctttcagacatgctcacaacgttgcatttgagaaatctgatctgttcttcatctgtatgttgagaccactctctgataagataatcatcgatgctcttgagatcaaagccgcaaagtggatgccattggctgaatttgtggagcaaccgatgataagaggggacaaaatgtttaagagagtgattgaaatctgcgaggcaagattaagccatcggtactgcggtctttctcctcatcgacttgtctctacttttgatggcaaaccttcttctctctattacaacgttgttgatgatgatcatgatccttcccactccaattgtagcactgagttttatagatagacgggtaaaacagaaccaaatcaagtggttcgattctgtatatacttattctcatgtaatgtatgttgttatttgatactctctcttcagtatagtaaatagtaatagatcctctgcg

SEQ ID NO: 24473 - protein, 371 aa, Arabidopsis thaliana
  peptide (1)..(371): Ceres Seq. ID no. 12324840
  misc_feature (191)..(324): Pfam Name: NUDIX domain Pfam Description: NUDIX domain
  misc_feature (249)..(360): Homolog of NCBI NO: 30686884 NR Description: MutT/nudix family protein [Arabidopsis thaliana]
  misc_feature (97)..(249): Homolog of NCBI NO: 30686884 NR Description: MutT/nudix family protein [Arabidopsis thaliana]
  misc_feature (97)..(360): Homolog of NCBI NO: 38564312 NR Description: At4g25434 [Arabidopsis thaliana]
  misc_feature (96)..(355): Homolog of NCBI NO: 9758793 NR Description: MutT domain protein-like [Arabidopsis thaliana]
  misc_feature (96)..(355): Homolog of NCBI NO: 18422823 NR Description: MutT domain protein-like
  misc_feature (90)..(366): Homolog of NCBI NO: 38346172 NR Description: OSJNBa0079A21.19 [Oryza sativa (japonica
  misc_feature (77)..(371): Homolog of NCBI NO: 8809607 NR Description: mutT domain protein-like [Arabidopsis thaliana]
  misc_feature (1)..(371): Homolog of NCBI NO: 21928133 NR Description: AT5g47240/MQL5_10 [Arabidopsis thaliana]
  misc_feature (1)..(371): Homolog of NCBI NO: 18422772 NR Description: mutT domain protein-like
  misc_feature (1)..(371): Homolog of NCBI NO: 21593371 NR Description: mutT domain protein-like [Arabidopsis thaliana]
MDSVSLSEVTVIRETTHLGFMHSFRLRQPFCGVKISPKFYLSKVDGPKAISSSSNTKSQFVYGGGSIAATSDSGYKMNGVNLKSRTLMSSAVKERSLLDAYDDEYGGVIVDHGKLPSNPYAFASMLRASLSDWRRKGKKGVWLKLPVEQSELVPIAIKEGFEYHHAEKGYVMLTYWIPKEEPSMLPANASHQVGVGGFVLNQHKEVLVVQEKYCAPSITGLWKLPTGFINESEEIFSGAVREVKEETGVDTEFSEVIAFRHAHNVAFEKSDLFFICMLRPLSDKIIIDALEIKAAKWMPLAEFVEQPMIRGDKMFKRVIEICEARLSHRYCGLSPHRLVSTFDGKPSSLYYNVVDDDHDPSHSNCSTEFYR

SEQ ID NO: 24474 - protein, 351 aa, Arabidopsis thaliana
  peptide (1)..(351): Ceres Seq. ID no. 12324841
  misc_feature (171)..(304): Pfam Name: NUDIX domain Pfam Description: NUDIX domain
  misc_feature (229)..(340): Homolog of NCBI NO: 30686884 NR Description: MutT/nudix family protein [Arabidopsis thaliana]
  misc_feature (77)..(229): Homolog of NCBI NO: 30686884 NR Description: MutT/nudix family protein [Arabidopsis thaliana]
  misc_feature (77)..(340): Homolog of NCBI NO: 38564312 NR Description: At4g25434 [Arabidopsis thaliana]
  misc_feature (76)..(335): Homolog of NCBI NO: 9758793 NR Description: MutT domain protein-like [Arabidopsis thaliana]
  misc_feature (76)..(335): Homolog of NCBI NO: 18422823 NR Description: MutT domain protein-like
  misc_feature (70)..(346): Homolog of NCBI NO: 38346172 NR Description: OSJNBa0079A21.19 [Oryza sativa (japonica
  misc_feature (57)..(351): Homolog of NCBI NO: 8809607 NR Description: mutT domain protein-like [Arabidopsis thaliana]
  misc_feature (1)..(351): Homolog of NCBI NO: 21928133 NR Description: AT5g47240/MQL5_10 [Arabidopsis thaliana]
  misc_feature (1)..(351): Homolog of NCBI NO: 18422772 NR Description: mutT domain protein-like
  misc_feature (1)..(351): Homolog of NCBI NO: 21593371 NR Description: mutT domain protein-like [Arabidopsis thaliana]
MHSFRLRQPFCGVKISPKFYLSKVDGPKAISSSSNTKSQFVYGGGSIAATSDSGYKMNGVNLKSRTLMSSAVKERSLLDAYDDEYGGVIVDHGKLPSNPYAFASMLRASLSDWRRKGKKGVWLKLPVEQSELVPIAIKEGFEYHHAEKGYVMLTYWIPKEEPSMLPANASHQVGVGGFVLNQHKEVLVVQEKYCAPSITGLWKLPTGFINESEEIFSGAVREVKEETGVDTEFSEVIAFRHAHNVAFEKSDLFFICMLRPLSDKIIIDALEIKAAKWMPLAEFVEQPMIRGDKMFKRVIEICEARLSHRYCGLSPHRLVSTFDGKPSSLYYNVVDDDHDPSHSNCSTEFYR

SEQ ID NO: 24475 - protein, 295 aa, Arabidopsis thaliana
  peptide (1)..(295): Ceres Seq. ID no. 12324842
  misc_feature (115)..(248): Pfam Name: NUDIX domain Pfam Description: NUDIX domain
  misc_feature (173)..(284): Homolog of NCBI NO: 30686884 NR Description: MutT/nudix family protein [Arabidopsis thaliana]
  misc_feature (21)..(173): Homolog of NCBI NO: 30686884 NR Description: MutT/nudix family protein [Arabidopsis thaliana]
  misc_feature (21)..(284): Homolog of NCBI NO: 38564312 NR Description: At4g25434 [Arabidopsis thaliana]
  misc_feature (20)..(279): Homolog of NCBI NO: 9758793 NR Description: MutT domain protein-like [Arabidopsis thaliana]
  misc_feature (20)..(279): Homolog of NCBI NO: 18422823 NR Description: MutT domain protein-like
  misc_feature (14)..(290): Homolog of NCBI NO: 38346172 NR Description: OSJNBa0079A21.19 [Oryza sativa (japonica
  misc_feature (1)..(295): Homolog of NCBI NO: 8809607 NR Description: mutT domain protein-like [Arabidopsis thaliana]
  misc_feature (1)..(295): Homolog of NCBI NO: 21928133 NR Description: AT5g47240/MQL5_10 [Arabidopsis thaliana]
  misc_feature (1)..(295): Homolog of NCBI NO: 18422772 NR Description: mutT domain protein-like
  misc_feature (1)..(295): Homolog of NCBI NO: 21593371 NR Description: mutT domain protein-like [Arabidopsis thaliana]
MNGVNLKSRTLMSSAVKERSLLDAYDDEYGGVIVDHGKLPSNPYAFASMLRASLSDWRRKGKKGVWLKLPVEQSELVPIAIKEGFEYHHAEKGYVMLTYWIPKEEPSMLPANASHQVGVGGFVLNQHKEVLVVQEKYCAPSITGLWKLPTGFINESEEIFSGAVREVKEETGVDTEFSEVIAFRHAHNVAFEKSDLFFICMLRPLSDKIIIDALEIKAAKWMPLAEFVEQPMIRGDKMFKRVIEICEARLSHRYCGLSPHRLVSTFDGKPSSLYYNVVDDDHDPSHSNCSTEFYR

SEQ ID NO: 24476 - DNA, 1582 bp, Arabidopsis thaliana
  misc_feature (1)..(1582): Ceres Seq. ID no. 12739242
  misc_feature: MA Experiment ID: 108434 Result: Up-regulated in Transcription
  misc_feature: MA Experiment 108434 PARAMETER Experiment Name: At_Root_Tips_cDNA_P Parameter: Tissue Value: Root Tips
  misc_feature: MA Experiment ID: 108462 Result: Down-regulated in Transcription
  misc_feature: MA Experiment 108462 PARAMETER Experiment Name: At_Germinating_Seeds_cDNA_P Parameter: Age (day) Value: 2 vs. 0
  misc_feature: MA Experiment 108462 PARAMETER Experiment Name: At_Germinating_Seeds_cDNA_P Parameter: Tissue Value: Germinating Seeds
  misc_feature: MA Experiment ID: 108463 Result: Down-regulated in Transcription
  misc_feature: MA Experiment 108463 PARAMETER Experiment Name: At_Germinating_Seeds_cDNA_P Parameter: Age (day) Value: 3 vs. 0
  misc_feature: MA Experiment 108463 PARAMETER Experiment Name: At_Germinating_Seeds_cDNA_P Parameter: Tissue Value: Germinating Seeds
  misc_feature: MA Experiment ID: 108464 Result: Down-regulated in Transcription
  misc_feature: MA Experiment 108464 PARAMETER Experiment Name: At_Germinating_Seeds_cDNA_P Parameter: Age (day) Value: 4 vs. 0
  misc_feature: MA Experiment 108464 PARAMETER Experiment Name: At_Germinating_Seeds_cDNA_P Parameter: Tissue Value: Germinating Seeds
  misc_feature: MA Experiment ID: 108595 Result: Down-regulated in Transcription
  misc_feature: MA Experiment 108595 PARAMETER Experiment Name: At_Ler-pi_Ovule_cDNA_P Parameter: Plant Line Value: null
  misc_feature: MA Experiment ID: 20000087 Result: Down-regulated in Transcription
  misc_feature: MA Experiment 20000087 PARAMETER Experiment Name: At_100uM_ABA_Mutants_cDNA_P Parameter: Plant Line Value: WS
  misc_feature: MA Experiment 20000087 PARAMETER Experiment Name: At_100uM_ABA_Mutants_cDNA_P Parameter: Timepoint (hr) Value: 6
  misc_feature: MA Experiment 20000087 PARAMETER Experiment Name: At_100uM_ABA_Mutants_cDNA_P Parameter: Tissue Value: Aerial
  misc_feature: MA Experiment 20000087 PARAMETER Experiment Name: At_100uM_ABA_Mutants_cDNA_P Parameter: Treatment Value: 100uM ABA vs. No Treatment
  misc_feature: MA Experiment ID: 20000227 Result: Up-regulated in Transcription
  misc_feature: MA Experiment 20000227 PARAMETER Experiment Name: At_Root-Tips-vs-Tops_P Parameter: Tissue Value: Root Tips vs. Root Tops
  misc_feature: MA Experiment ID: 20000234 Result: Up-regulated in Transcription
  misc_feature: MA Experiment 20000234 PARAMETER Experiment Name: At_Siliques_P Parameter: Age (day) Value: 21
  misc_feature: MA Experiment 20000234 PARAMETER Experiment Name: At_Siliques_P Parameter: Organism Value: A. thaliana
  misc_feature: MA Experiment 20000234 PARAMETER Experiment Name: At_Siliques_P Parameter: Plant Line Value: WS
  misc_feature: MA Experiment 20000234 PARAMETER Experiment Name: At_Siliques_P Parameter: Tissue Value: Less Than 5mm Siliques vs. Whole Plant
  misc_feature: MA Experiment ID: 20000437 Result: Down-regulated in Transcription
  misc_feature: MA Experiment 20000437 PARAMETER Experiment Name: At_Drought_P Parameter: Age (day) Value: 8
  misc_feature: MA Experiment 20000437 PARAMETER Experiment Name: At_Drought_P Parameter: Organism Value: A. thaliana
  misc_feature: MA Experiment 20000437 PARAMETER Experiment Name: At_Drought_P Parameter: Plant Line Value: WS
  misc_feature: MA Experiment 20000437 PARAMETER Experiment Name: At_Drought_P Parameter: Timepoint (hr) Value: 24
  misc_feature: MA Experiment 20000437 PARAMETER Experiment Name: At_Drought_P Parameter: Tissue Value: Whole Plant
  misc_feature: MA Experiment 20000437 PARAMETER Experiment Name: At_Drought_P Parameter: Treatment Value: Drought vs. No Drought
aggttcatttgctctgcaaatttgtctgaaaaaatctttgtgcgaatcaggaaaaatgtcgtcgacccatcagttagtttcttcgatgatctcttcttcctcatccactttcttagccccttcaaattttaatctcagaactcgaaatgcttgcttacccatggcaaaacgggtcaatacttgcaaatgtgttgctacgccgcaagagaagatcgagtataagaccaaagtgtcacggaattcaaacatgtccaaacttcaggctggatacctattcccggagattgcaagaagaaggtctgcacacttgttgaaatatccagatgcacaagttataagtcttggaataggcgacacaactgagccaattcctgaagtgatcacttctgctatggcaaagaaagctcatgagttgtcaacaatagagggatatagtggttatggtgctgaacaaggtgcaaagccactgagagctgctattgcgaaaacattctacggtggccttggcataggggatgatgacgtttttgtttctgatggagctaaatgtgatatctcacgtctccaggttatgtttggttccaatgttacaattgctgttcaggatccttcatatccggcttatgtggactccagtgttattatgggtcagactgggcaatttaacactgatgtgcaaaagtatggaaacatcgagtacatgagatgcactccagagaatggcttctttcccgacttgtccaccgttggcgggacagatataattttcttctgttccccaaataaccctacgggtgctgctgccacgagagagcaactaacgcagttagttgagtttgcaaagaagaacggttctataatagtgtatgattccgcctatgcaatgtacatgtctgatgataacccacgatccatcttcgaaatccctggagcagaggaggtcgctatggagacagcttcgttcagcaaatatgctggtttcactggagttcgacttggttggactgtcatcccgaaaaagctactctattcagacggtttccctgttgccaaagacttcaatcggattatctgcacttgtttcaatggtgcatctaatatctctcaagctggtgctcttgcttgccttacacccgaaggacttgaggcaatgcataaggtgattggattctataaagaaaacacaaacataatcattgacacattcacatctctcgggtatgatgtatatggaggaaagaatgcgccttacgtatgggttcacttcccgaaccaaagctcatgggatgtgtttgctgagattctggagaagactcatgtggttacaactccaggaagtgggtttggaccagggggtgaagggttcgttcgtgtcagtgcctttggtcacagagagaacatcttagaggcatgtcgaagattcaagcagctttacaaatgaagaaccttgtttgtaatcgttcctcatcatcatcaccctctttaatgacatgatttgagttaaaataatgtcgtttccattgttttctggaatttgtagaagacacttttgacaccagtgtttcaagcaatttggcaaagc

SEQ ID NO: 24477 - protein, 479 aa, Arabidopsis thaliana
  peptide (1)..(479): Ceres Seq. ID no. 12739243
  misc_feature (166)..(478): Pfam Name: Aminotransferase class I and II Pfam Description: Aminotransferase class I and II
  misc_feature (80)..(479): Homolog of NCBI NO: 17232595 NR Description: aminotransferase [Nostoc sp. PCC 7120]
  misc_feature (80)..(479): Homolog of NCBI NO: 23124300 NR Description: hypothetical protein [Nostoc punctiforme]
  misc_feature (80)..(477): Homolog of NCBI NO: 24213476 NR Description: aminotransferase [Leptospira interrogans serovar
  misc_feature (75)..(479): Homolog of NCBI NO: 25315768 NR Description: probable aspartate aminotransferase
  misc_feature (69)..(479): Homolog of NCBI NO: 18397344 NR Description: putative aspartate aminotransferase
  misc_feature (74)..(475): Homolog of NCBI NO: 24414269 NR Description: Putative transaminase [Oryza sativa (japonica
  misc_feature (74)..(475): Homolog of NCBI NO: 37703722 NR Description: putative aminotransferase ALD1
  misc_feature (31)..(479): Homolog of NCBI NO: 37703720 NR Description: putative aminotransferase AGD2
  misc_feature (54)..(479): Homolog of NCBI NO: 7447845 NR Description: probable transaminase (EC 2.6.1.-) T16L1.170
  misc_feature (19)..(479): Homolog of NCBI NO: 18418270 NR Description: putative protein
GSFALQICLKKSLCESGKMSSTHQLVSSMISSSSSTFLAPSNFNLRTRNACLPMAKRVNTCKCVATPQEKIEYKTKVSRNSNMSKLQAGYLFPEIARRRSAHLLKYPDAQVISLGIGDTTEPIPEVITSAMAKKAHELSTIEGYSGYGAEQGAKPLRAAIAKTFYGGLGIGDDDVFVSDGAKCDISRLQVMFGSNVTIAVQDPSYPAYVDSSVIMGQTGQFNTDVQKYGNIEYMRCTPENGFFPDLSTVGGTDIIFFCSPNNPTGAAATREQLTQLVEFAKKNGSIIVYDSAYAMYMSDDNPRSIFEIPGAEEVAMETASFSKYAGFTGVRLGWTVIPKKLLYSDGFPVAKDFNRIICTCFNGASNISQAGALACLTPEGLEAMHKVIGFYKENTNIIIDTFTSLGYDVYGGKNAPYVWVHFPNQSSWDVFAEILEKTHVVTTPGSGFGPGGEGFVRVSAFGHRENILEACRRFKQLYK

SEQ ID NO: 24478 - protein, 461 aa, Arabidopsis thaliana
  peptide (1)..(461): Ceres Seq. ID no. 12739244
  misc_feature (148)..(460): Pfam Name: Aminotransferase class I and II Pfam Description: Aminotransferase class I and II
  misc_feature (62)..(461): Homolog of NCBI NO: 17232595 NR Description: aminotransferase [Nostoc sp. PCC 7120]
  misc_feature (62)..(461): Homolog of NCBI NO: 23124300 NR Description: hypothetical protein [Nostoc punctiforme]
  misc_feature (62)..(459): Homolog of NCBI NO: 24213476 NR Description: aminotransferase [Leptospira interrogans serovar
  misc_feature (57)..(461): Homolog of NCBI NO: 25315768 NR Description: probable aspartate aminotransferase
  misc_feature (51)..(461): Homolog of NCBI NO: 18397344 NR Description: putative aspartate aminotransferase
  misc_feature (56)..(457): Homolog of NCBI NO: 24414269 NR Description: Putative transaminase [Oryza sativa (japonica
  misc_feature (56)..(457): Homolog of NCBI NO: 37703722 NR Description: putative aminotransferase ALD1
  misc_feature (13)..(461): Homolog of NCBI NO: 37703720 NR Description: putative aminotransferase AGD2
  misc_feature (36)..(461): Homolog of NCBI NO: 7447845 NR Description: probable transaminase (EC 2.6.1.-) T16L1.170
  misc_feature (1)..(461): Homolog of NCBI NO: 18418270 NR Description: putative protein
MSSTHQLVSSMISSSSSTFLAPSNFNLRTRNACLPMAKRVNTCKCVATPQEKIEYKTKVSRNSNMSKLQAGYLFPEIARRRSAHLLKYPDAQVISLGIGDTTEPIPEVITSAMAKKAHELSTIEGYSGYGAEQGAKPLRAAIAKTFYGGLGIGDDDVFVSDGAKCDISRLQVMFGSNVTIAVQDPSYPAYVDSSVIMGQTGQFNTDVQKYGNIEYMRCTPENGFFPDLSTVGGTDIIFFCSPNNPTGAAATREQLTQLVEFAKKNGSIIVYDSAYAMYMSDDNPRSIFEIPGAEEVAMETASFSKYAGFTGVRLGWTVIPKKLLYSDGFPVAKDFNRIICTCFNGASNISQAGALACLTPEGLEAMHKVIGFYKENTNIIIDTFTSLGYDVYGGKNAPYVWVHFPNQSSWDVFAEILEKTHVVTTPGSGFGPGGEGFVRVSAFGHRENILEACRRFKQLYK

SEQ ID NO: 24479 - protein, 451 aa, Arabidopsis thaliana
  peptide (1)..(451): Ceres Seq. ID no. 12739245
  misc_feature (138)..(450): Pfam Name: Aminotransferase class I and II Pfam Description: Aminotransferase class I and II
  misc_feature (52)..(451): Homolog of NCBI NO: 17232595 NR Description: aminotransferase [Nostoc sp. PCC 7120]
  misc_feature (52)..(451): Homolog of NCBI NO: 23124300 NR Description: hypothetical protein [Nostoc punctiforme]
  misc_feature (52)..(449): Homolog of NCBI NO: 24213476 NR Description: aminotransferase [Leptospira interrogans serovar
  misc_feature (47)..(451): Homolog of NCBI NO: 25315768 NR Description: probable aspartate aminotransferase
  misc_feature (41)..(451): Homolog of NCBI NO: 18397344 NR Description: putative aspartate aminotransferase
  misc_feature (46)..(447): Homolog of NCBI NO: 24414269 NR Description: Putative transaminase [Oryza sativa (japonica
  misc_feature (46)..(447): Homolog of NCBI NO: 37703722 NR Description: putative aminotransferase ALD1
  misc_feature (3)..(451): Homolog of NCBI NO: 37703720 NR Description: putative aminotransferase AGD2
  misc_feature (26)..(451): Homolog of NCBI NO: 7447845 NR Description: probable transaminase (EC 2.6.1.-) T16L1.170
  misc_feature (1)..(451): Homolog of NCBI NO: 18418270 NR Description: putative protein
MISSSSSTFLAPSNFNLRTRNACLPMAKRVNTCKCVATPQEKIEYKTKVSRNSNMSKLQAGYLFPEIARRRSAHLLKYPDAQVISLGIGDTTEPIPEVITSAMAKKAHELSTIEGYSGYGAEQGAKPLRAAIAKTFYGGLGIGDDDVFVSDGAKCDISRLQVMFGSNVTIAVQDPSYPAYVDSSVIMGQTGQFNTDVQKYGNIEYMRCTPENGFFPDLSTVGGTDIIFFCSPNNPTGAAATREQLTQLVEFAKKNGSIIVYDSAYAMYMSDDNPRSIFEIPGAEEVAMETASFSKYAGFTGVRLGWTVIPKKLLYSDGFPVAKDFNRIICTCFNGASNISQAGALACLTPEGLEAMHKVIGFYKENTNIIIDTFTSLGYDVYGGKNAPYVWVHFPNQSSWDVFAEILEKTHVVTTPGSGFGPGGEGFVRVSAFGHRENILEACRRFKQLYK

SEQ ID NO: 24480 - DNA, 1517 bp, Arabidopsis thaliana
  misc_feature (1)..(1517): Ceres Seq. ID no. 12343508
  misc_feature: MA Experiment ID: 108461 Result: Up-regulated in Transcription
  misc_feature: MA Experiment 108461 PARAMETER Experiment Name: At_Germinating_Seeds_cDNA_P Parameter: Age (day) Value: 1 vs. 0
  misc_feature: MA Experiment 108461 PARAMETER Experiment Name: At_Germinating_Seeds_cDNA_P Parameter: Tissue Value: Germinating Seeds
  misc_feature: MA Experiment ID: 20000306 Result: Up-regulated in Transcription
  misc_feature: MA Experiment 20000306 PARAMETER Experiment Name: At_Germinating_Seeds_Sub_P Parameter: Age (hr) Value: 6 vs. 0
  misc_feature: MA Experiment 20000306 PARAMETER Experiment Name: At_Germinating_Seeds_Sub_P Parameter: Organism Value: A. thaliana
  misc_feature: MA Experiment 20000306 PARAMETER Experiment Name: At_Germinating_Seeds_Sub_P Parameter: Plant Line Value: WS
  misc_feature: MA Experiment 20000306 PARAMETER Experiment Name: At_Germinating_Seeds_Sub_P Parameter: Tissue Value: Germinating Seeds
  misc_feature: MA Experiment ID: 20000307 Result: Up-regulated in Transcription
  misc_feature: MA Experiment 20000307 PARAMETER Experiment Name: At_Germinating_Seeds_Sub_P Parameter: Age (hr) Value: 24 vs. 0
  misc_feature: MA Experiment 20000307 PARAMETER Experiment Name: At_Germinating_Seeds_Sub_P Parameter: Organism Value: A. thaliana
  misc_feature: MA Experiment 20000307 PARAMETER Experiment Name: At_Germinating_Seeds_Sub_P Parameter: Plant Line Value: WS
  misc_feature: MA Experiment 20000307 PARAMETER Experiment Name: At_Germinating_Seeds_Sub_P Parameter: Tissue Value: Germinating Seeds
  misc_feature: MA Experiment ID: 20000314 Result: Down-regulated in Transcription
  misc_feature: MA Experiment 20000314 PARAMETER Experiment Name: At_14day_Shoots-Roots_Sub_P Parameter: Age (day) Value: 14
  misc_feature: MA Experiment 20000314 PARAMETER Experiment Name: At_14day_Shoots-Roots_Sub_P Parameter: Organism Value: A. thaliana
  misc_feature: MA Experiment 20000314 PARAMETER Experiment Name: At_14day_Shoots-Roots_Sub_P Parameter: Plant Line Value: WS
  misc_feature: MA Experiment 20000314 PARAMETER Experiment Name: At_14day_Shoots-Roots_Sub_P Parameter: Tissue Value: Roots vs. Whole Plant
  misc_feature: MA Experiment ID: 20000327 Result: Down-regulated in Transcription
  misc_feature: MA Experiment 20000327 PARAMETER Experiment Name: At_42deg_Heat_Sub_P Parameter: Age (day) Value: 14
  misc_feature: MA Experiment 20000327 PARAMETER Experiment Name: At_42deg_Heat_Sub_P Parameter: Organism Value: A. thaliana
  misc_feature: MA Experiment 20000327 PARAMETER Experiment Name: At_42deg_Heat_Sub_P Parameter: Plant Line Value: WS
  misc_feature: MA Experiment 20000327 PARAMETER Experiment Name: At_42deg_Heat_Sub_P Parameter: Temperature (deg C) Value: 42 vs. 22
  misc_feature: MA Experiment 20000327 PARAMETER Experiment Name: At_42deg_Heat_Sub_P Parameter: Timepoint (hr) Value: 1
  misc_feature: MA Experiment 20000327 PARAMETER Experiment Name: At_42deg_Heat_Sub_P Parameter: Tissue Value: Aerial
atcattcactcacgacactaaccatgaccaaattctccgagccaatcagagactcccacgtggcagttctcgcgtttttccccgttggcgctcatgccggtcctctcttagccgtcactcgccgtctcgccgccgcttctccctccaccatcttttctttcttcaacaccgcaagatcaaacgcgtcgttgttctcctctgatcatcccgagaacatcaaggtccacgacgtctctgacggtgttccggagggaaccatgctcgggaatccactggagatggtcgagctgtttctcgaagcggctccacgtattttccggagcgaaatcgcggcggcagagatagaagttggaaagaaagtgacatgcatgctaacagatgccttcttctggttcgcagcggacatagcggctgagctgaacgcgacttgggttgccttctgggccggcggagcaaactcactctgtgctcatctctacactgatctcatcagagaaaccatcggtctcaaagatgtgagtatggaagagacattagggtttataccaggaatggagaattacagagttaaagatataccagaggaagttgtatttgaagatttggactctgttttcccaaaggctttataccaaatgagtcttgctttacctcgtgcctctgctgttttcatcagttcctttgaagagttagaacctacattgaactataacctaagatccaaacttaaacgtttcttgaacatcgcccctctcacgttattatcttctacatcggagaaagagatgcgtgatcctcatggctgctttgcttggatggggaagagatcagctgcttctgtagcgtacattagcttcggcaccgtcatggaacctcctcctgaagagcttgtggcgatagcacaagggttggaatcaagcaaagtgccgtttgtttggtcgctgaaggagaagaacatggttcatctaccaaaagggtttttggatcggacaagagagcaagggatagtggttccttgggctccacaagtggaactgctgaaacacgaggcaatgggtgtgaatgtgacacattgtggatggaactcagtgttggagagtgtgtcggcaggtgtaccgatgatcggcagaccgattttggcggataataggctcaacggaagagcagtggaggttgtgtggaaggttggagtgatgatggataatggagtcttcacgaaagaaggatttgagaagtgtttgaatgatgtttttgttcatgatgatggtaagacgatgaaggctaatgccaagaagcttaaagaaaaactccaagaagatttctccatgaaaggaagctctttagagaatttcaaaatattgttggacgaaattgtgaaagtttaggttgtttacaacataattgaagactataaatgtgatttcaaaattaacaaaatcatagtcaaataagtgtgtgcctattctattttgtcaaagtaagagtgtatggatctattctatttcaaagggttgttg

SEQ ID NO: 24481 - protein, 460 aa, Arabidopsis thaliana
  peptide (1)..(460): Ceres Seq. ID no. 12343509
  misc_feature (33)..(459): Pfam Name: UDP-glucoronosyl and UDP-glucosyl transferase Pfam Description: UDP-glucoronosyl and UDP-glucosyl transferase
  misc_feature (12)..(459): Homolog of NCBI NO: 13620857 NR Description: UDP-glucose:flavonoid 3-O-glucosyltransferase
  misc_feature (12)..(459): Homolog of NCBI NO: 13620855 NR Description: UDP-glucose:flavonoid 3-O-glucosyltransferase
  misc_feature (12)..(459): Homolog of NCBI NO: 13620869 NR Description: UDP-glucose:flavonoid 3-O-glucosyltransferase
  misc_feature (12)..(459): Homolog of NCBI NO: 13620861 NR Description: UDP-glucose:flavonoid 3-O-glucosyltransferase
  misc_feature (35)..(460): Homolog of NCBI NO: 11358642 NR Description: probable flavonol 3-O-glucosyltransferase (EC
  misc_feature (17)..(460): Homolog of NCBI NO: 30686181 NR Description: glycosyltransferase family [Arabidopsis thaliana]
  misc_feature (8)..(458): Homolog of NCBI NO: 15237895 NR Description: UDP glucose:flavonoid 3-o-glucosyltransferase
  misc_feature (8)..(460): Homolog of NCBI NO: 15237899 NR Description: UDP glucose:flavonoid 3-o-glucosyltransferase
  misc_feature (8)..(460): Homolog of NCBI NO: 21593372 NR Description: UDP glucose:flavonoid 3-o-glucosyltransferase,
  misc_feature (8)..(460): Homolog of NCBI NO: 18397552 NR Description: UDP glucose:flavonoid 3-o-glucosyltransferase,
HSLTTLTMTKFSEPIRDSHVAVLAFFPVGAHAGPLLAVTRRLAAASPSTIFSFFNTARSNASLFSSDHPENIKVHDVSDGVPEGTMLGNPLEMVELFLEAAPRIFRSEIAAAEIEVGKKVTCMLTDAFFWFAADIAAELNATWVAFWAGGANSLCAHLYTDLIRETIGLKDVSMEETLGFIPGMENYRVKDIPEEVVFEDLDSVFPKALYQMSLALPRASAVFISSFEELEPTLNYNLRSKLKRFLNIAPLTLLSSTSEKEMRDPHGCFAWMGKRSAASVAYISFGTVMEPPPEELVAIAQGLESSKVPFVWSLKEKNMVHLPKGFLDRTREQGIVVPWAPQVELLKHEAMGVNVTHCGWNSVLESVSAGVPMIGRPILADNRLNGRAVEVVWKVGVMMDNGVFTKEGFEKCLNDVFVHDDGKTMKANAKKLKEKLQEDFSMKGSSLENFKILLDEIVKV

SEQ ID NO: 24482 - protein, 453 aa, Arabidopsis thaliana
  peptide (1)..(453): Ceres Seq. ID no. 12343510
  misc_feature (26)..(452): Pfam Name: UDP-glucoronosyl and UDP-glucosyl transferase Pfam Description: UDP-glucoronosyl and UDP-glucosyl transferase
  misc_feature (5)..(452): Homolog of NCBI NO: 13620857 NR Description: UDP-glucose:flavonoid 3-O-glucosyltransferase
  misc_feature (5)..(452): Homolog of NCBI NO: 13620855 NR Description: UDP-glucose:flavonoid 3-O-glucosyltransferase
  misc_feature (5)..(452): Homolog of NCBI NO: 13620869 NR Description: UDP-glucose:flavonoid 3-O-glucosyltransferase
  misc_feature (5)..(452): Homolog of NCBI NO: 13620861 NR Description: UDP-glucose:flavonoid 3-O-glucosyltransferase
  misc_feature (28)..(453): Homolog of NCBI NO: 11358642 NR Description: probable flavonol 3-O-glucosyltransferase (EC
  misc_feature (10)..(453): Homolog of NCBI NO: 30686181 NR Description: glycosyltransferase family [Arabidopsis thaliana]
  misc_feature (1)..(451): Homolog of NCBI NO: 15237895 NR Description: UDP glucose:flavonoid 3-o-glucosyltransferase
  misc_feature (1)..(453): Homolog of NCBI NO: 15237899 NR Description: UDP glucose:flavonoid 3-o-glucosyltransferase
  misc_feature (1)..(453): Homolog of NCBI NO: 21593372 NR Description: UDP glucose:flavonoid 3-o-glucosyltransferase,
  misc_feature (1)..(453): Homolog of NCBI NO: 18397552 NR Description: UDP glucose:flavonoid 3-o-glucosyltransferase,
MTKFSEPIRDSHVAVLAFFPVGAHAGPLLAVTRRLAAASPSTIFSFFNTARSNASLFSSDHPENIKVHDVSDGVPEGTMLGNPLEMVELFLEAAPRIFRSEIAAAEIEVGKKVTCMLTDAFFWFAADIAAELNATWVAFWAGGANSLCAHLYTDLIRETIGLKDVSMEETLGFIPGMENYRVKDIPEEVVFEDLDSVFPKALYQMSLALPRASAVFISSFEELEPTLNYNLRSKLKRFLNIAPLTLLSSTSEKEMRDPHGCFAWMGKRSAASVAYISFGTVMEPPPEELVAIAQGLESSKVPFVWSLKEKNMVHLPKGFLDRTREQGIVVPWAPQVELLKHEAMGVNVTHCGWNSVLESVSAGVPMIGRPILADNRLNGRAVEVVWKVGVMMDNGVFTKEGFEKCLNDVFVHDDGKTMKANAKKLKEKLQEDFSMKGSSLENFKILLDEIVKV

SEQ ID NO: 24483 - protein, 375 aa, Arabidopsis thaliana
  peptide (1)..(375): Ceres Seq. ID no. 12343511
  misc_feature (1)..(374): Pfam Name: UDP-glucoronosyl and UDP-glucosyl transferase Pfam Description: UDP-glucoronosyl and UDP-glucosyl transferase
  misc_feature (1)..(374): Homolog of NCBI NO: 13620857 NR Description: UDP-glucose:flavonoid 3-O-glucosyltransferase
  misc_feature (1)..(374): Homolog of NCBI NO: 13620855 NR Description: UDP-glucose:flavonoid 3-O-glucosyltransferase
  misc_feature (1)..(374): Homolog of NCBI NO: 13620869 NR Description: UDP-glucose:flavonoid 3-O-glucosyltransferase
  misc_feature (1)..(374): Homolog of NCBI NO: 13620861 NR Description: UDP-glucose:flavonoid 3-O-glucosyltransferase
  misc_feature (1)..(375): Homolog of NCBI NO: 11358642 NR Description: probable flavonol 3-O-glucosyltransferase (EC
  misc_feature (1)..(375): Homolog of NCBI NO: 30686181 NR Description: glycosyltransferase family [Arabidopsis thaliana]
  misc_feature (1)..(373): Homolog of NCBI NO: 15237895 NR Description: UDP glucose:flavonoid 3-o-glucosyltransferase
  misc_feature (1)..(375): Homolog of NCBI NO: 15237899 NR Description: UDP glucose:flavonoid 3-o-glucosyltransferase
  misc_feature (1)..(375): Homolog of NCBI NO: 21593372 NR Description: UDP glucose:flavonoid 3-o-glucosyltransferase,
  misc_feature (1)..(375): Homolog of NCBI NO: 18397552 NR Description: UDP glucose:flavonoid 3-o-glucosyltransferase,
MLGNPLEMVELFLEAAPRIFRSEIAAAEIEVGKKVTCMLTDAFFWFAADIAAELNATWVAFWAGGANSLCAHLYTDLIRETIGLKDVSMEETLGFIPGMENYRVKDIPEEVVFEDLDSVFPKALYQMSLALPRASAVFISSFEELEPTLNYNLRSKLKRFLNIAPLTLLSSTSEKEMRDPHGCFAWMGKRSAASVAYISFGTVMEPPPEELVAIAQGLESSKVPFVWSLKEKNMVHLPKGFLDRTREQGIVVPWAPQVELLKHEAMGVNVTHCGWNSVLESVSAGVPMIGRPILADNRLNGRAVEVVWKVGVMMDNGVFTKEGFEKCLNDVFVHDDGKTMKANAKKLKEKLQEDFSMKGSSLENFKILLDEIVKV

SEQ ID NO: 24484 - DNA, 3109 bp, Arabidopsis thaliana
  misc_feature (1)..(3109): Ceres Seq. ID no. 13486900
  misc_feature: MA Experiment ID: 108434 Result: Down-regulated in Transcription
  misc_feature: MA Experiment 108434 PARAMETER Experiment Name: At_Root_Tips_cDNA_P Parameter: Tissue Value: Root Tips
  misc_feature: MA Experiment ID: 108462 Result: Up-regulated in Transcription
  misc_feature: MA Experiment 108462 PARAMETER Experiment Name: At_Germinating_Seeds_cDNA_P Parameter: Age (day) Value: 2 vs. 0
  misc_feature: MA Experiment 108462 PARAMETER Experiment Name: At_Germinating_Seeds_cDNA_P Parameter: Tissue Value: Germinating Seeds
  misc_feature: MA Experiment ID: 108463 Result: Up-regulated in Transcription
  misc_feature: MA Experiment 108463 PARAMETER Experiment Name: At_Germinating_Seeds_cDNA_P Parameter: Age (day) Value: 3 vs. 0
  misc_feature: MA Experiment 108463 PARAMETER Experiment Name: At_Germinating_Seeds_cDNA_P Parameter: Tissue Value: Germinating Seeds
  misc_feature: MA Experiment ID: 108464 Result: Up-regulated in Transcription
  misc_feature: MA Experiment 108464 PARAMETER Experiment Name: At_Germinating_Seeds_cDNA_P Parameter: Age (day) Value: 4 vs. 0
  misc_feature: MA Experiment 108464 PARAMETER Experiment Name: At_Germinating_Seeds_cDNA_P Parameter: Tissue Value: Germinating Seeds
  misc_feature: MA Experiment ID: 108594 Result: Down-regulated in Transcription
  misc_feature: MA Experiment 108594 PARAMETER Experiment Name: At_Ler-rhl_Root_cDNA_P Parameter: Plant Line Value: null
  misc_feature: MA Experiment ID: 108595 Result: Up-regulated in Transcription
  misc_feature: MA Experiment 108595 PARAMETER Experiment Name: At_Ler-pi_Ovule_cDNA_P Parameter: Plant Line Value: null
  misc_feature: MA Experiment ID: 20000086 Result: Up-regulated in Transcription
  misc_feature: MA Experiment 20000086 PARAMETER Experiment Name: At_100uM_ABA_Mutants_cDNA_P Parameter: Plant Line Value: CS22
  misc_feature: MA Experiment 20000086 PARAMETER Experiment Name: At_100uM_ABA_Mutants_cDNA_P Parameter: Timepoint (hr) Value: 6
  misc_feature: MA Experiment 20000086 PARAMETER Experiment Name: At_100uM_ABA_Mutants_cDNA_P Parameter: Tissue Value: Aerial
  misc_feature: MA Experiment 20000086 PARAMETER Experiment Name: At_100uM_ABA_Mutants_cDNA_P Parameter: Treatment Value: 100uM ABA vs. No Treatment
  misc_feature: MA Experiment ID: 20000184 Result: Down-regulated in Transcription
  misc_feature: MA Experiment 20000184 PARAMETER Experiment Name: At_Shoots__P Parameter: Age (day) Value: 7
  misc_feature: MA Experiment 20000184 PARAMETER Experiment Name: At_Shoots__P Parameter: Tissue Value: Shoots vs. Whole Plant
  misc_feature: MA Experiment ID: 20000185 Result: Down-regulated in Transcription
  misc_feature: MA Experiment 20000185 PARAMETER Experiment Name: At_Roots__P Parameter: Age (day) Value: 7 vs. 21
  misc_feature: MA Experiment 20000185 PARAMETER Experiment Name: At_Roots__P Parameter: Organism Value: A. thaliana
  misc_feature: MA Experiment 20000185 PARAMETER Experiment Name: At_Roots__P Parameter: Tissue Value: Roots vs. Whole Plant
  misc_feature: MA Experiment ID: 20000234 Result: Down-regulated in Transcription
  misc_feature: MA Experiment 20000234 PARAMETER Experiment Name: At_Siliques_P Parameter: Age (day) Value: 21
  misc_feature: MA Experiment 20000234 PARAMETER Experiment Name: At_Siliques_P Parameter: Organism Value: A. thaliana
  misc_feature: MA Experiment 20000234 PARAMETER Experiment Name: At_Siliques_P Parameter: Plant Line Value: WS
  misc_feature: MA Experiment 20000234 PARAMETER Experiment Name: At_Siliques_P Parameter: Tissue Value: Less Than 5mm Siliques vs. Whole Plant
  misc_feature: MA Experiment ID: 20000264 Result: Down-regulated in Transcription
  misc_feature: MA Experiment 20000264 PARAMETER Experiment Name: At_Open_Flower_P Parameter: Age (day) Value: 21
  misc_feature: MA Experiment 20000264 PARAMETER Experiment Name: At_Open_Flower_P Parameter: Plant Line Value: WS
  misc_feature: MA Experiment 20000264 PARAMETER Experiment Name: At_Open_Flower_P Parameter: Tissue Value: Open Flower vs. Whole Plant
  misc_feature: MA Experiment ID: 20000265 Result: Down-regulated in Transcription
  misc_feature: MA Experiment 20000265 PARAMETER Experiment Name: At_Open_Flower_P Parameter: Age (day) Value: 21
  misc_feature: MA Experiment 20000265 PARAMETER Experiment Name: At_Open_Flower_P Parameter: Plant Line Value: WS
  misc_feature: MA Experiment 20000265 PARAMETER Experiment Name: At_Open_Flower_P Parameter: Tissue Value: Closed Flower vs. Whole Plant
  misc_feature: MA Experiment ID: 20000286 Result: Down-regulated in Transcription
  misc_feature: MA Experiment 20000286 PARAMETER Experiment Name: At_Open_Flower_P Parameter: Age (day) Value: 21
  misc_feature: MA Experiment 20000286 PARAMETER Experiment Name: At_Open_Flower_P Parameter: Plant Line Value: WS
  misc_feature: MA Experiment 20000286 PARAMETER Experiment Name: At_Open_Flower_P Parameter: Tissue Value: Half Open vs. Whole Plant
  misc_feature: MA Experiment ID: 20000438 Result: Down-regulated in Transcription
  misc_feature: MA Experiment 20000438 PARAMETER Experiment Name: At_Shoots__P Parameter: Age (day) Value: 14
  misc_feature: MA Experiment 20000438 PARAMETER Experiment Name: At_Shoots__P Parameter: Tissue Value: Shoots vs. Whole Plant
  misc_feature: MA Experiment ID: 20000439 Result: Down-regulated in Transcription
  misc_feature: MA Experiment 20000439 PARAMETER Experiment Name: At_Roots__P Parameter: Age (day) Value: 14 vs. 21
  misc_feature: MA Experiment 20000439 PARAMETER Experiment Name: At_Roots__P Parameter: Organism Value: A. thaliana
  misc_feature: MA Experiment 20000439 PARAMETER Experiment Name: At_Roots__P Parameter: Tissue Value: Roots vs. Whole Plant
  misc_feature: MA Experiment ID: 20000794 Result: Down-regulated in Transcription
  misc_feature: MA Experiment 20000794 PARAMETER Experiment Name: At_Petals_P Parameter: Age (day) Value: 23-25 days
  misc_feature: MA Experiment 20000794 PARAMETER Experiment Name: At_Petals_P Parameter: Plant Line Value: WS
  misc_feature: MA Experiment 20000794 PARAMETER Experiment Name: At_Petals_P Parameter: Tissue Value: Petals vs. Whole plant
  misc_feature: MA Experiment ID: 20001556 Result: Down-regulated in Transcription
  misc_feature: MA Experiment 20001556 PARAMETER Experiment Name: At_Drought_Soil_Dry_P Parameter: Age (day) Value: 26
  misc_feature: MA Experiment 20001556 PARAMETER Experiment Name: At_Drought_Soil_Dry_P Parameter: Organism Value: A. thaliana
  misc_feature: MA Experiment 20001556 PARAMETER Experiment Name: At_Drought_Soil_Dry_P Parameter: Plant Line Value: WS
  misc_feature: MA Experiment 20001556 PARAMETER Experiment Name: At_Drought_Soil_Dry_P Parameter: Post Timepoint (hr) Value: None
  misc_feature: MA Experiment 20001556 PARAMETER Experiment Name: At_Drought_Soil_Dry_P Parameter: Post-Treatment Value: None
  misc_feature: MA Experiment 20001556 PARAMETER Experiment Name: At_Drought_Soil_Dry_P Parameter: Timepoint (day) Value: 12
  misc_feature: MA Experiment 20001556 PARAMETER Experiment Name: At_Drought_Soil_Dry_P Parameter: Treatment Value: Drought vs. No Drought
  misc_feature: MA Experiment ID: 20001557 Result: Down-regulated in Transcription
  misc_feature: MA Experiment 20001557 PARAMETER Experiment Name: At_Drought_Soil_Dry_P Parameter: Age (day) Value: 27
  misc_feature: MA Experiment 20001557 PARAMETER Experiment Name: At_Drought_Soil_Dry_P Parameter: Organism Value: A. thaliana
  misc_feature: MA Experiment 20001557 PARAMETER Experiment Name: At_Drought_Soil_Dry_P Parameter: Plant Line Value: WS
  misc_feature: MA Experiment 20001557 PARAMETER Experiment Name: At_Drought_Soil_Dry_P Parameter: Post Timepoint (hr) Value: 3
  misc_feature: MA Experiment 20001557 PARAMETER Experiment Name: At_Drought_Soil_Dry_P Parameter: Post-Treatment Value: Re-Water vs. No Drought
  misc_feature: MA Experiment 20001557 PARAMETER Experiment Name: At_Drought_Soil_Dry_P Parameter: Timepoint (day) Value: 13
  misc_feature: MA Experiment 20001557 PARAMETER Experiment Name: At_Drought_Soil_Dry_P Parameter: Treatment Value: Drought vs. No Drought
  misc_feature: MA Experiment ID: 20001558 Result: Down-regulated in Transcription
  misc_feature: MA Experiment 20001558 PARAMETER Experiment Name: At_Drought_Soil_Dry_P Parameter: Age (day) Value: 27
  misc_feature: MA Experiment 20001558 PARAMETER Experiment Name: At_Drought_Soil_Dry_P Parameter: Organism Value: A. thaliana
  misc_feature: MA Experiment 20001558 PARAMETER Experiment Name: At_Drought_Soil_Dry_P Parameter: Plant Line Value: WS
  misc_feature: MA Experiment 20001558 PARAMETER Experiment Name: At_Drought_Soil_Dry_P Parameter: Post Timepoint (hr) Value: 6
  misc_feature: MA Experiment 20001558 PARAMETER Experiment Name: At_Drought_Soil_Dry_P Parameter: Post-Treatment Value: Re-Water vs. No Drought
  misc_feature: MA Experiment 20001558 PARAMETER Experiment Name: At_Drought_Soil_Dry_P Parameter: Timepoint (day) Value: 13
  misc_feature: MA Experiment 20001558 PARAMETER Experiment Name: At_Drought_Soil_Dry_P Parameter: Treatment Value: Drought vs. No Drought
  misc_feature: MA Experiment ID: 20001560 Result: Down-regulated in Transcription
  misc_feature: MA Experiment 20001560 PARAMETER Experiment Name: At_Drought_Soil_Dry_P Parameter: Age (day) Value: 28
  misc_feature: MA Experiment 20001560 PARAMETER Experiment Name: At_Drought_Soil_Dry_P Parameter: Organism Value: A. thaliana
  misc_feature: MA Experiment 20001560 PARAMETER Experiment Name: At_Drought_Soil_Dry_P Parameter: Plant Line Value: WS
  misc_feature: MA Experiment 20001560 PARAMETER Experiment Name: At_Drought_Soil_Dry_P Parameter: Post Timepoint (hr) Value: None
  misc_feature: MA Experiment 20001560 PARAMETER Experiment Name: At_Drought_Soil_Dry_P Parameter: Post-Treatment Value: None
  misc_feature: MA Experiment 20001560 PARAMETER Experiment Name: At_Drought_Soil_Dry_P Parameter: Timepoint (day) Value: 14
  misc_feature: MA Experiment 20001560 PARAMETER Experiment Name: At_Drought_Soil_Dry_P Parameter: Treatment Value: Drought vs. No Drought
  misc_feature: MA Experiment ID: 20001773 Result: Up-regulated in Transcription
  misc_feature: MA Experiment 20001773 PARAMETER Experiment Name: At_Far-red-enriched-adult_P Parameter: Age (day) Value: 30
  misc_feature: MA Experiment 20001773 PARAMETER Experiment Name: At_Far-red-enriched-adult_P Parameter: Light Value: Far-red enriched vs. White
  misc_feature: MA Experiment 20001773 PARAMETER Experiment Name: At_Far-red-enriched-adult_P Parameter: Organism Value: A. thaliana
  misc_feature: MA Experiment 20001773 PARAMETER Experiment Name: At_Far-red-enriched-adult_P Parameter: Plant Line Value: Columbia
  misc_feature: MA Experiment 20001773 PARAMETER Experiment Name: At_Far-red-enriched-adult_P Parameter: Timepoint (hr) Value: 48
  misc_feature: MA Experiment 20001773 PARAMETER Experiment Name: At_Far-red-enriched-adult_P Parameter: Tissue Value: Aerial
  misc_feature: MA Experiment ID: 20001906 Result: Down-regulated in Transcription
  misc_feature: MA Experiment 20001906 PARAMETER Experiment Name: At_Drought_Reproduction_P Parameter: Age (day) Value: 35
  misc_feature: MA Experiment 20001906 PARAMETER Experiment Name: At_Drought_Reproduction_P Parameter: Organism Value: A. thaliana
  misc_feature: MA Experiment 20001906 PARAMETER Experiment Name: At_Drought_Reproduction_P Parameter: Plant Line Value: WS
  misc_feature: MA Experiment 20001906 PARAMETER Experiment Name: At_Drought_Reproduction_P Parameter: Timepoint (day) Value: 5
  misc_feature: MA Experiment 20001906 PARAMETER Experiment Name: At_Drought_Reproduction_P Parameter: Tissue Value: Siliques
  misc_feature: MA Experiment 20001906 PARAMETER Experiment Name: At_Drought_Reproduction_P Parameter: Treatment Value: Drought vs. No Drought
  misc_feature: MA Experiment ID: 20001908 Result: Down-regulated in Transcription
  misc_feature: MA Experiment 20001908 PARAMETER Experiment Name: At_Drought_Reproduction_P Parameter: Age (day) Value: 40
  misc_feature: MA Experiment 20001908 PARAMETER Experiment Name: At_Drought_Reproduction_P Parameter: Organism Value: A. thaliana
  misc_feature: MA Experiment 20001908 PARAMETER Experiment Name: At_Drought_Reproduction_P Parameter: Plant Line Value: WS
  misc_feature: MA Experiment 20001908 PARAMETER Experiment Name: At_Drought_Reproduction_P Parameter: Timepoint (day) Value: 10
  misc_feature: MA Experiment 20001908 PARAMETER Experiment Name: At_Drought_Reproduction_P Parameter: Tissue Value: Siliques
  misc_feature: MA Experiment 20001908 PARAMETER Experiment Name: At_Drought_Reproduction_P Parameter: Treatment Value: Drought vs. No Drought
  misc_feature: MA Experiment ID: 20001911 Result: Down-regulated in Transcription
  misc_feature: MA Experiment 20001911 PARAMETER Experiment Name: At_Drought_Reproduction_P Parameter: Age (day) Value: 40
  misc_feature: MA Experiment 20001911 PARAMETER Experiment Name: At_Drought_Reproduction_P Parameter: Organism Value: A. thaliana
  misc_feature: MA Experiment 20001911 PARAMETER Experiment Name: At_Drought_Reproduction_P Parameter: Plant Line Value: WS
  misc_feature: MA Experiment 20001911 PARAMETER Experiment Name: At_Drought_Reproduction_P Parameter: Timepoint (day) Value: 10
  misc_feature: MA Experiment 20001911 PARAMETER Experiment Name: At_Drought_Reproduction_P Parameter: Tissue Value: Flowers
  misc_feature: MA Experiment 20001911 PARAMETER Experiment Name: At_Drought_Reproduction_P Parameter: Treatment Value: Drought vs. No Drought
atccatccaaatctcaatccctaattagggttcatttctctgtttctccaaacaggggaattcgaagatgatggagtctaggtctcccatctgcaacacttgtggtgaagagattggtgtaaaatcaaacggagagttctttgtggcttgtcatgagtgtagtttcccaatctgcaaagcttgtcttgagtatgaattcaaagaaggtcgaagaatttgcttgcgttgcggcaatccttacgatgagaatgtgtttgatgatgttgagacaaagacatctaaaactcaatccattgttccaacacagaccaataacacttctcaggattcagggattcatgctagacatataagtacagtctcaacaatagacagtgaactgaatgatgaatatggcaatccaatttggaagaacagagtggagagctggaaagacaagaaagacaagaagagcaagaagaagaagaaagatccaaaagcaacaaaagctgaacaacatgaggctcagattcctacccaacagcacatggaagatacgccaccgaacacagaatctggtgctacagatgtgctttcggttgtgattcctatcccaaggacaaaaatcacttcatataggattgtcatcatcatgcggttgatcatcttggctctgttttttaactaccgtatcacgcatcctgtcgatagcgcttacggtttatggctaacatctgtgatatgtgagatttggtttgctgtttcttgggtgttggatcagttccctaaatggtctcctattaaccgagaaacttacatcgaccggttatccgcaagattcgaaagagaaggcgagcaatcacagcttgcagctgtagatttctttgttagtacggtagatccattaaaggagccacctttgataactgcaaacacggttctttcgatcctcgcgcttgattatccggtggataaagtctcttgctatgtatctgatgatggtgctgcaatgctttcgtttgagtctttggttgagacagcagattttgctaggaaatgggtacctttctgcaaaaagtactccatcgagccacgagctcccgagttttacttctcgcttaaaatcgattacttgagggataaagttcaaccttcttttgtgaaagaacgtagagccatgaaaagagattatgaagagtttaaaataagaatgaatgctttagtcgccaaggctcaaaagacaccagaagaaggatggacaatgcaagatggaacatcttggcccgggaacaacactcgtgaccatcccgggatgattcaggtttttcttggatatagcggtgctcgcgacattgaaggaaatgaacttccaagattagtttacgtctctagagagaagagacctggttatcagcatcacaaaaaggccggggcagagaacgcattggtgagggtgtctgcggttttaacgaatgctccattcattcttaaccttgattgtgatcactacgtcaacaatagcaaagccgtgcgtgaagcaatgtgctttttaatggatcctgttgttggtcaagacgtttgctttgttcagttcccacagagatttgatggaatcgacaagagtgatcgatatgctaaccgcaacattgttttcttcgatgttaatatgagagggcttgatgggattcaaggtccagtttatgttggtacaggtactgtctttagaagacaagcactttacggatacagtccaccttcaaaaccgaggattttaccgcaatcttcatcatcgtcgtgttgctgtctaaccaagaagaaacaacctcaagatccttccgagatttacaaagatgcaaagcgagaagaacttgatgctgcaatctttaatcttggggacctagacaactacgatgagtacgacagatcgatgctgatttcacaaacaagctttgagaaaacgtttggtctctctacggttttcatcgagtctactcttatggagaatggcggtgttcccgactctgtaaacccgtcaacgctcatcaaagaagctattcatgtcattagctgtggatacgaagagaaaactgaatggggaaaagaaataggatggatttacgggtcgatcaccgaagacattttgacgggtttcaagatgcattgtcgtggatggaggtcgatttactgtatgccattaagaccagcatttaaaggatctgctccaatcaatctatcagataggcttcaccaggttctacgttgggctcttggctcggttgagatcttccttagccgacattgtcctttgtggtacggttgcagcggaggccgcctcaagttgctccagagattagcttatataaacactattgtctacccattcacttctttgcctcttgttgcttactgtactcttccagctatttgccttcttaccggcaaatttatcatcccaacgctatcaaacctagcaagcatgctgtttctaggtctctttatatcaatcatcttaacgagtgtcctcgagcttcgatggagcggagtcagtatcgaagacttatggagaaacgaacagttttgggttattggaggtgtctcagctcatctctttgccgttttccaaggattcctcaaaatgctcgctggtctcgacacaaatttcacagtcacatcgaaaaccgcagatgatttagaattcggtgagctttacattgtcaaatggacaactctcttgatccctccgacgtcacttcttataatcaacttggtcggagttgttgctggattctctgacgctcttaacaaaggttatgaagcttggggacctttgtttgggaaggtatttttcgccttttgggtgattcttcatctttatccattcctcaaaggtcttatgggaagacaaaacagaacacctactattgttattctctggtctatcttgcttgcttctgtgttttcacttgtttgggttcgtatcaatcctttcgtctccaaaaccgatacgacttccctttctctgaactgtcttttgatcgattgctaagagaagatacgttatgtttgtattttgaaagattgatcatatgtgttttggttgttttataaattttcatatggttgcttgagc

SEQ ID NO: 24485 - protein, 985 aa, Arabidopsis thaliana
  peptide (1)..(985): Ceres Seq. ID no. 13486901
  misc_feature (384)..(966): Homolog of NCBI NO: 28973666 NR Description: unknown protein [Arabidopsis thaliana]
  misc_feature (384)..(966): Homolog of NCBI NO: 15233733 NR Description: cellulose synthase family [Arabidopsis thaliana]
  misc_feature (173)..(378): Homolog of NCBI NO: 15228448 NR Description: cellulose synthase family [Arabidopsis thaliana]
  misc_feature (397)..(971): Homolog of NCBI NO: 15228448 NR Description: cellulose synthase family [Arabidopsis thaliana]
  misc_feature (1)..(81): Homolog of NCBI NO: 27372782 NR Description: cellulose synthase-like protein D4 [Populus
  misc_feature (173)..(378): Homolog of NCBI NO: 27372782 NR Description: cellulose synthase-like protein D4 [Populus
  misc_feature (399)..(966): Homolog of NCBI NO: 27372782 NR Description: cellulose synthase-like protein D4 [Populus
  misc_feature (1)..(78): Homolog of NCBI NO: 15237873 NR Description: cellulose synthase family [Arabidopsis thaliana]
  misc_feature (173)..(378): Homolog of NCBI NO: 15237873 NR Description: cellulose synthase family [Arabidopsis thaliana]
  misc_feature (405)..(972): Homolog of NCBI NO: 15237873 NR Description: cellulose synthase family [Arabidopsis thaliana]
MMESRSPICNTCGEEIGVKSNGEFFVACHECSFPICKACLEYEFKEGRRICLRCGNPYDENVFDDVETKTSKTQSIVPTQTNNTSQDSGIHARHISTVSTIDSELNDEYGNPIWKNRVESWKDKKDKKSKKKKKDPKATKAEQHEAQIPTQQHMEDTPPNTESGATDVLSVVIPIPRTKITSYRIVIIMRLIILALFFNYRITHPVDSAYGLWLTSVICEIWFAVSWVLDQFPKWSPINRETYIDRLSARFEREGEQSQLAAVDFFVSTVDPLKEPPLITANTVLSILALDYPVDKVSCYVSDDGAAMLSFESLVETADFARKWVPFCKKYSIEPRAPEFYFSLKIDYLRDKVQPSFVKERRAMKRDYEEFKIRMNALVAKAQKTPEEGWTMQDGTSWPGNNTRDHPGMIQVFLGYSGARDIEGNELPRLVYVSREKRPGYQHHKKAGAENALVRVSAVLTNAPFILNLDCDHYVNNSKAVREAMCFLMDPVVGQDVCFVQFPQRFDGIDKSDRYANRNIVFFDVNMRGLDGIQGPVYVGTGTVFRRQALYGYSPPSKPRILPQSSSSSCCCLTKKKQPQDPSEIYKDAKREELDAAIFNLGDLDNYDEYDRSMLISQTSFEKTFGLSTVFIESTLMENGGVPDSVNPSTLIKEAIHVISCGYEEKTEWGKEIGWIYGSITEDILTGFKMHCRGWRSIYCMPLRPAFKGSAPINLSDRLHQVLRWALGSVEIFLSRHCPLWYGCSGGRLKLLQRLAYINTIVYPFTSLPLVAYCTLPAICLLTGKFIIPTLSNLASMLFLGLFISIILTSVLELRWSGVSIEDLWRNEQFWVIGGVSAHLFAVFQGFLKMLAGLDTNFTVTSKTADDLEFGELYIVKWTTLLIPPTSLLIINLVGVVAGFSDALNKGYEAWGPLFGKVFFAFWVILHLYPFLKGLMGRQNRTPTIVILWSILLASVFSLVWVRINPFVSKTDTTSLSLNCLLIDC

SEQ ID NO: 24486 - protein, 984 aa, Arabidopsis thaliana
  peptide (1)..(984): Ceres Seq. ID no. 13486902
  misc_feature (383)..(965): Homolog of NCBI NO: 28973666 NR Description: unknown protein [Arabidopsis thaliana]
  misc_feature (383)..(965): Homolog of NCBI NO: 15233733 NR Description: cellulose synthase family [Arabidopsis thaliana]
  misc_feature (172)..(377): Homolog of NCBI NO: 15228448 NR Description: cellulose synthase family [Arabidopsis thaliana]
  misc_feature (396)..(970): Homolog of NCBI NO: 15228448 NR Description: cellulose synthase family [Arabidopsis thaliana]
  misc_feature (1)..(80): Homolog of NCBI NO: 27372782 NR Description: cellulose synthase-like protein D4 [Populus
  misc_feature (172)..(377): Homolog of NCBI NO: 27372782 NR Description: cellulose synthase-like protein D4 [Populus
  misc_feature (398)..(965): Homolog of NCBI NO: 27372782 NR Description: cellulose synthase-like protein D4 [Populus
  misc_feature (1)..(77): Homolog of NCBI NO: 15237873 NR Description: cellulose synthase family [Arabidopsis thaliana]
  misc_feature (172)..(377): Homolog of NCBI NO: 15237873 NR Description: cellulose synthase family [Arabidopsis thaliana]
  misc_feature (404)..(971): Homolog of NCBI NO: 15237873 NR Description: cellulose synthase family [Arabidopsis thaliana]
MESRSPICNTCGEEIGVKSNGEFFVACHECSFPICKACLEYEFKEGRRICLRCGNPYDENVFDDVETKTSKTQSIVPTQTNNTSQDSGIHARHISTVSTIDSELNDEYGNPIWKNRVESWKDKKDKKSKKKKKDPKATKAEQHEAQIPTQQHMEDTPPNTESGATDVLSVVIPIPRTKITSYRIVIIMRLIILALFFNYRITHPVDSAYGLWLTSVICEIWFAVSWVLDQFPKWSPINRETYIDRLSARFEREGEQSQLAAVDFFVSTVDPLKEPPLITANTVLSILALDYPVDKVSCYVSDDGAAMLSFESLVETADFARKWVPFCKKYSIEPRAPEFYFSLKIDYLRDKVQPSFVKERRAMKRDYEEFKIRMNALVAKAQKTPEEGWTMQDGTSWPGNNTRDHPGMIQVFLGYSGARDIEGNELPRLVYVSREKRPGYQHHKKAGAENALVRVSAVLTNAPFILNLDCDHYVNNSKAVREAMCFLMDPVVGQDVCFVQFPQRFDGIDKSDRYANRNIVFFDVNMRGLDGIQGPVYVGTGTVFRRQALYGYSPPSKPRILPQSSSSSCCCLTKKKQPQDPSEIYKDAKREELDAAIFNLGDLDNYDEYDRSMLISQTSFEKTFGLSTVFIESTLMENGGVPDSVNPSTLIKEAIHVISCGYEEKTEWGKEIGWIYGSITEDILTGFKMHCRGWRSIYCMPLRPAFKGSAPINLSDRLHQVLRWALGSVEIFLSRHCPLWYGCSGGRLKLLQRLAYINTIVYPFTSLPLVAYCTLPAICLLTGKFIIPTLSNLASMLFLGLFISIILTSVLELRWSGVSIEDLWRNEQFWVIGGVSAHLFAVFQGFLKMLAGLDTNFTVTSKTADDLEFGELYIVKWTTLLIPPTSLLIINLVGVVAGFSDALNKGYEAWGPLFGKVFFAFWVILHLYPFLKGLMGRQNRTPTIVILWSILLASVFSLVWVRINPFVSKTDTTSLSLNCLLIDC

SEQ ID NO: 24487 - protein, 832 aa, Arabidopsis thaliana
  peptide (1)..(832): Ceres Seq. ID no. 13486903
  misc_feature (244)..(818): Homolog of NCBI NO: 15228448 NR Description: cellulose synthase family [Arabidopsis thaliana]
  misc_feature (20)..(225): Homolog of NCBI NO: 27372782 NR Description: cellulose synthase-like protein D4 [Populus
  misc_feature (246)..(813): Homolog of NCBI NO: 27372782 NR Description: cellulose synthase-like protein D4 [Populus
  misc_feature (20)..(225): Homolog of NCBI NO: 15237873 NR Description: cellulose synthase family [Arabidopsis thaliana]
  misc_feature (252)..(819): Homolog of NCBI NO: 15237873 NR Description: cellulose synthase family [Arabidopsis thaliana]
  misc_feature (16)..(225): Homolog of NCBI NO: 28973666 NR Description: unknown protein [Arabidopsis thaliana]
  misc_feature (16)..(225): Homolog of NCBI NO: 15233733 NR Description: cellulose synthase family [Arabidopsis thaliana]
  misc_feature (231)..(813): Homolog of NCBI NO: 28973666 NR Description: unknown protein [Arabidopsis thaliana]
  misc_feature (231)..(813): Homolog of NCBI NO: 15233733 NR Description: cellulose synthase family [Arabidopsis thaliana]
  misc_feature (20)..(225): Homolog of NCBI NO: 15228448 NR Description: cellulose synthase family [Arabidopsis thaliana]
MEDTPPNTESGATDVLSVVIPIPRTKITSYRIVIIMRLIILALFFNYRITHPVDSAYGLWLTSVICEIWFAVSWVLDQFPKWSPINRETYIDRLSARFEREGEQSQLAAVDFFVSTVDPLKEPPLITANTVLSILALDYPVDKVSCYVSDDGAAMLSFESLVETADFARKWVPFCKKYSIEPRAPEFYFSLKIDYLRDKVQPSFVKERRAMKRDYEEFKIRMNALVAKAQKTPEEGWTMQDGTSWPGNNTRDHPGMIQVFLGYSGARDIEGNELPRLVYVSREKRPGYQHHKKAGAENALVRVSAVLTNAPFILNLDCDHYVNNSKAVREAMCFLMDPVVGQDVCFVQFPQRFDGIDKSDRYANRNIVFFDVNMRGLDGIQGPVYVGTGTVFRRQALYGYSPPSKPRILPQSSSSSCCCLTKKKQPQDPSEIYKDAKREELDAAIFNLGDLDNYDEYDRSMLISQTSFEKTFGLSTVFIESTLMENGGVPDSVNPSTLIKEAIHVISCGYEEKTEWGKEIGWIYGSITEDILTGFKMHCRGWRSIYCMPLRPAFKGSAPINLSDRLHQVLRWALGSVEIFLSRHCPLWYGCSGGRLKLLQRLAYINTIVYPFTSLPLVAYCTLPAICLLTGKFIIPTLSNLASMLFLGLFISIILTSVLELRWSGVSIEDLWRNEQFWVIGGVSAHLFAVFQGFLKMLAGLDTNFTVTSKTADDLEFGELYIVKWTTLLIPPTSLLIINLVGVVAGFSDALNKGYEAWGPLFGKVFFAFWVILHLYPFLKGLMGRQNRTPTIVILWSILLASVFSLVWVRINPFVSKTDTTSLSLNCLLIDC

SEQ ID NO: 24488 - DNA, 1692 bp, Arabidopsis thaliana
  misc_feature (1)..(1692): Ceres Seq. ID no. 13580675
  misc_feature: MA Experiment ID: 108576 Result: Down-regulated in Transcription
  misc_feature: MA Experiment 108576 PARAMETER Experiment Name: At_42deg_Heat_cDNA_P Parameter: Temperature (deg C) Value: 42 vs. 22
  misc_feature: MA Experiment 108576 PARAMETER Experiment Name: At_42deg_Heat_cDNA_P Parameter: Timepoint (hr) Value: 1
  misc_feature: MA Experiment 108576 PARAMETER Experiment Name: At_42deg_Heat_cDNA_P Parameter: Tissue Value: Aerial
  misc_feature: MA Experiment ID: 20000179 Result: Up-regulated in Transcription
  misc_feature: MA Experiment 20000179 PARAMETER Experiment Name: At_Germinating_Seeds_P Parameter: Age (hr) Value: 6 vs. 0
  misc_feature: MA Experiment 20000179 PARAMETER Experiment Name: At_Germinating_Seeds_P Parameter: Tissue Value: Germinating Seeds
  misc_feature: MA Experiment ID: 20000180 Result: Up-regulated in Transcription
  misc_feature: MA Experiment 20000180 PARAMETER Experiment Name: At_Germinating_Seeds_P Parameter: Age (hr) Value: 24 vs. 0
  misc_feature: MA Experiment 20000180 PARAMETER Experiment Name: At_Germinating_Seeds_P Parameter: Tissue Value: Germinating Seeds
  misc_feature: MA Experiment ID: 20000794 Result: Down-regulated in Transcription
  misc_feature: MA Experiment 20000794 PARAMETER Experiment Name: At_Petals_P Parameter: Age (day) Value: 23-25 days
  misc_feature: MA Experiment 20000794 PARAMETER Experiment Name: At_Petals_P Parameter: Plant Line Value: WS
  misc_feature: MA Experiment 20000794 PARAMETER Experiment Name: At_Petals_P Parameter: Tissue Value: Petals vs. Whole plant
  misc_feature: MA Experiment ID: 20001554 Result: Down-regulated in Transcription
  misc_feature: MA Experiment 20001554 PARAMETER Experiment Name: At_Drought_Soil_Dry_P Parameter: Age (day) Value: 21
  misc_feature: MA Experiment 20001554 PARAMETER Experiment Name: At_Drought_Soil_Dry_P Parameter: Organism Value: A. thaliana
  misc_feature: MA Experiment 20001554 PARAMETER Experiment Name: At_Drought_Soil_Dry_P Parameter: Plant Line Value: WS
  misc_feature: MA Experiment 20001554 PARAMETER Experiment Name: At_Drought_Soil_Dry_P Parameter: Post Timepoint (hr) Value: None
  misc_feature: MA Experiment 20001554 PARAMETER Experiment Name: At_Drought_Soil_Dry_P Parameter: Post-Treatment Value: None
  misc_feature: MA Experiment 20001554 PARAMETER Experiment Name: At_Drought_Soil_Dry_P Parameter: Timepoint (day) Value: 7
  misc_feature: MA Experiment 20001554 PARAMETER Experiment Name: At_Drought_Soil_Dry_P Parameter: Treatment Value: Drought vs. No Drought
  misc_feature: MA Experiment ID: 20001555 Result: Down-regulated in Transcription
  misc_feature: MA Experiment 20001555 PARAMETER Experiment Name: At_Drought_Soil_Dry_P Parameter: Age (day) Value: 24
  misc_feature: MA Experiment 20001555 PARAMETER Experiment Name: At_Drought_Soil_Dry_P Parameter: Organism Value: A. thaliana
  misc_feature: MA Experiment 20001555 PARAMETER Experiment Name: At_Drought_Soil_Dry_P Parameter: Plant Line Value: WS
  misc_feature: MA Experiment 20001555 PARAMETER Experiment Name: At_Drought_Soil_Dry_P Parameter: Post Timepoint (hr) Value: None
  misc_feature: MA Experiment 20001555 PARAMETER Experiment Name: At_Drought_Soil_Dry_P Parameter: Post-Treatment Value: None
  misc_feature: MA Experiment 20001555 PARAMETER Experiment Name: At_Drought_Soil_Dry_P Parameter: Timepoint (day) Value: 10
  misc_feature: MA Experiment 20001555 PARAMETER Experiment Name: At_Drought_Soil_Dry_P Parameter: Treatment Value: Drought vs. No Drought
  misc_feature: MA Experiment ID: 20001556 Result: Down-regulated in Transcription
  misc_feature: MA Experiment 20001556 PARAMETER Experiment Name: At_Drought_Soil_Dry_P Parameter: Age (day) Value: 26
  misc_feature: MA Experiment 20001556 PARAMETER Experiment Name: At_Drought_Soil_Dry_P Parameter: Organism Value: A. thaliana
  misc_feature: MA Experiment 20001556 PARAMETER Experiment Name: At_Drought_Soil_Dry_P Parameter: Plant Line Value: WS
  misc_feature: MA Experiment 20001556 PARAMETER Experiment Name: At_Drought_Soil_Dry_P Parameter: Post Timepoint (hr) Value: None
  misc_feature: MA Experiment 20001556 PARAMETER Experiment Name: At_Drought_Soil_Dry_P Parameter: Post-Treatment Value: None
  misc_feature: MA Experiment 20001556 PARAMETER Experiment Name: At_Drought_Soil_Dry_P Parameter: Timepoint (day) Value: 12
  misc_feature: MA Experiment 20001556 PARAMETER Experiment Name: At_Drought_Soil_Dry_P Parameter: Treatment Value: Drought vs. No Drought
  misc_feature: MA Experiment ID: 20001559 Result: Down-regulated in Transcription
  misc_feature: MA Experiment 20001559 PARAMETER Experiment Name: At_Drought_Soil_Dry_P Parameter: Age (day) Value: 28
  misc_feature: MA Experiment 20001559 PARAMETER Experiment Name: At_Drought_Soil_Dry_P Parameter: Organism Value: A. thaliana
  misc_feature: MA Experiment 20001559 PARAMETER Experiment Name: At_Drought_Soil_Dry_P Parameter: Plant Line Value: WS
  misc_feature: MA Experiment 20001559 PARAMETER Experiment Name: At_Drought_Soil_Dry_P Parameter: Post Timepoint (hr) Value: 29
  misc_feature: MA Experiment 20001559 PARAMETER Experiment Name: At_Drought_Soil_Dry_P Parameter: Post-Treatment Value: Re-Water vs. No Drought
  misc_feature: MA Experiment 20001559 PARAMETER Experiment Name: At_Drought_Soil_Dry_P Parameter: Timepoint (day) Value: 14
  misc_feature: MA Experiment 20001559 PARAMETER Experiment Name: At_Drought_Soil_Dry_P Parameter: Treatment Value: Drought vs. No Drought
  misc_feature: MA Experiment ID: 20001560 Result: Up-regulated in Transcription
  misc_feature: MA Experiment 20001560 PARAMETER Experiment Name: At_Drought_Soil_Dry_P Parameter: Age (day) Value: 28
  misc_feature: MA Experiment 20001560 PARAMETER Experiment Name: At_Drought_Soil_Dry_P Parameter: Organism Value: A. thaliana
  misc_feature: MA Experiment 20001560 PARAMETER Experiment Name: At_Drought_Soil_Dry_P Parameter: Plant Line Value: WS
  misc_feature: MA Experiment 20001560 PARAMETER Experiment Name: At_Drought_Soil_Dry_P Parameter: Post Timepoint (hr) Value: None
  misc_feature: MA Experiment 20001560 PARAMETER Experiment Name: At_Drought_Soil_Dry_P Parameter: Post-Treatment Value: None
  misc_feature: MA Experiment 20001560 PARAMETER Experiment Name: At_Drought_Soil_Dry_P Parameter: Timepoint (day) Value: 14
  misc_feature: MA Experiment 20001560 PARAMETER Experiment Name: At_Drought_Soil_Dry_P Parameter: Treatment Value: Drought vs. No Drought
  misc_feature: MA Experiment ID: 20001911 Result: Down-regulated in Transcription
  misc_feature: MA Experiment 20001911 PARAMETER Experiment Name: At_Drought_Reproduction_P Parameter: Age (day) Value: 40
  misc_feature: MA Experiment 20001911 PARAMETER Experiment Name: At_Drought_Reproduction_P Parameter: Organism Value: A. thaliana
  misc_feature: MA Experiment 20001911 PARAMETER Experiment Name: At_Drought_Reproduction_P Parameter: Plant Line Value: WS
  misc_feature: MA Experiment 20001911 PARAMETER Experiment Name: At_Drought_Reproduction_P Parameter: Timepoint (day) Value: 10
  misc_feature: MA Experiment 20001911 PARAMETER Experiment Name: At_Drought_Reproduction_P Parameter: Tissue Value: Flowers
  misc_feature: MA Experiment 20001911 PARAMETER Experiment Name: At_Drought_Reproduction_P Parameter: Treatment Value: Drought vs. No Drought
agaaatcgaaaaaatcagatctagatctaaaagaagagcgtcttcataaacgcccttcttcttcttcgtcttcttccctgcaaatctagtttctagatcttttctttcttccgcgaaacgaaaatgagagagtgcatttcgatccacattggtcaggccggtatccaggtcggaaatgcttgctgggagctttactgtcttgaacatggcattcagcctgatggccagatgccgagtgacaagactgttggcggaggtgacgatgctttcaacaccttcttcagtgagaccggtgcagggaagcacgtcccacgtgctgtctttgttgatcttgagccaactgtgatcgatgaggtcaggactggtacttaccgtcagcttttccaccctgagcaactcatcagcggtaaagaagacgcagctaacaatttcgcccgtgggcattacaccattgggaaagagattgttgatctgtgcttggaccgtatcagaaagctcgctgataactgtactggtctccaaggattcctcgtcttcaacgctgttggtggagggactggatctggtcttggatctctcctccttgagagactttctgttgactacgggaaaaagtccaagttgggtttcacagtttacccatctccacaggtctccacctctgttgttgagccttacaacagtgtcctctccactcactcactcttggaacacactgatgtctctatcctcctcgacaatgaagctatctatgacatctgcagacgttccctaagcattgagagacccacctacaccaacctcaaccgtctcgtctctcaggttatctcatccttgactgcttctctgaggttcgatggtgccttgaatgttgatgtgactgagttccaaaccaacttggtcccatacccaagaatccacttcatgctttcctcctatgccccagtcatctccgcagagaaggccttccatgagcagctctcggttgctgagatcacaaacagtgcttttgagccagcatccatgatggcaaagtgtgaccctcgtcacggaaagtacatggcttgctgtttgatgtaccgtggtgatgtcgtccccaaggatgtgaacgcagctgttggcaccatcaagaccaagcgtactattcagtttgtggactggtgtcctactggattcaagtgtggaatcaactaccagccaccaactgttgttccaggaggtgatcttgctaaagtccagagagctgtgtgtatgatctcaaactccaccagtgttgctgaggtgttctcccgtattgatcacaagtttgatcttatgtacgcaaaacgtgctttcgttcactggtatgtgggtgagggtatggaagaaggagaattttcagaggctcgtgaggatcttgcagcattggagaaggattacgaagaggttggtgctgaaggtggtgacgatgaggatgatgaaggagaggagtactaagaaggttgtcggttttatgtgggatttctattatctcgtgtttgtgtgaataggctcgaaactcttacgagtcgtacttgtgttttcaaaaaccatatttctatctcttgcttgtggcggtagccatttgttctagttcgtttgtttctgataatattttcatctccaagaactgaatttaagctgggtttggtttaaatcgattgtccaaaatct

SEQ ID NO: 24489 - protein, 450 aa, Arabidopsis thaliana
  peptide (1)..(450): Ceres Seq. ID no. 13580676
  misc_feature (49)..(246): Pfam Name: Tubulin/FtsZ family, GTPase domain Pfam Description: Tubulin/FtsZ family, GTPase domain
  misc_feature (49)..(246): Pfam Name: Tubulin/FtsZ family, GTPase domain Pfam Description: Tubulin/FtsZ family, GTPase domain
  misc_feature (1)..(450): Homolog of NCBI NO: 25396550 NR Description: alpha tubulin [Physcomitrella patens]
  misc_feature (1)..(450): Homolog of NCBI NO: 6723478 NR Description: alpha-tubulin [Betula pendula]
  misc_feature (1)..(450): Homolog of NCBI NO: 464840 NR Description: Tubulin alpha-1 chain
  misc_feature (1)..(449): Homolog of NCBI NO: 1174592 NR Description: TUBULIN ALPHA-1 CHAIN
  misc_feature (1)..(450): Homolog of NCBI NO: 15029368 NR Description: alpha tubulin subunit [Rosa hybrid cultivar]
  misc_feature (1)..(450): Homolog of NCBI NO: 25396550 NR Description: alpha tubulin [Physcomitrella patens]
  misc_feature (1)..(450): Homolog of NCBI NO: 464840 NR Description: Tubulin alpha-1 chain
  misc_feature (1)..(450): Homolog of NCBI NO: 15029368 NR Description: alpha tubulin subunit [Rosa hybrid cultivar]
  misc_feature (1)..(450): Homolog of NCBI NO: 15220329 NR Description: tubulin alpha-2/alpha-4 chain (TUA4) [Arabidopsis
  misc_feature (1)..(450): Homolog of NCBI NO: 15233627 NR Description: tubulin alpha-6 chain (TUA6) [Arabidopsis
  misc_feature (1)..(450): Homolog of NCBI NO: 16226462 NR Description: AT4g14960/dl3520c [Arabidopsis thaliana]
  misc_feature (1)..(450): Homolog of NCBI NO: 464849 NR Description: TUBULIN ALPHA CHAIN
  misc_feature (1)..(450): Homolog of NCBI NO: 29124983 NR Description: alpha-tubulin 1 [Populus tremuloides]
  misc_feature (1)..(449): Homolog of NCBI NO: 1174592 NR Description: TUBULIN ALPHA-1 CHAIN
  misc_feature (1)..(450): Homolog of NCBI NO: 6723478 NR Description: alpha-tubulin [Betula pendula]
  misc_feature (1)..(450): Homolog of NCBI NO: 29124983 NR Description: alpha-tubulin 1 [Populus tremuloides]
  misc_feature (1)..(450): Homolog of NCBI NO: 464849 NR Description: TUBULIN ALPHA CHAIN
  misc_feature (1)..(450): Homolog of NCBI NO: 16226462 NR Description: AT4g14960/dl3520c [Arabidopsis thaliana]
  misc_feature (1)..(450): Homolog of NCBI NO: 15233627 NR Description: tubulin alpha-6 chain (TUA6) [Arabidopsis
  misc_feature (1)..(450): Homolog of NCBI NO: 15220329 NR Description: tubulin alpha-2/alpha-4 chain (TUA4) [Arabidopsis
MRECISIHIGQAGIQVGNACWELYCLEHGIQPDGQMPSDKTVGGGDDAFNTFFSETGAGKHVPRAVFVDLEPTVIDEVRTGTYRQLFHPEQLISGKEDAANNFARGHYTIGKEIVDLCLDRIRKLADNCTGLQGFLVFNAVGGGTGSGLGSLLLERLSVDYGKKSKLGFTVYPSPQVSTSVVEPYNSVLSTHSLLEHTDVSILLDNEAIYDICRRSLSIERPTYTNLNRLVSQVISSLTASLRFDGALNVDVTEFQTNLVPYPRIHFMLSSYAPVISAEKAFHEQLSVAEITNSAFEPASMMAKCDPRHGKYMACCLMYRGDVVPKDVNAAVGTIKTKRTIQFVDWCPTGFKCGINYQPPTVVPGGDLAKVQRAVCMISNSTSVAEVFSRIDHKFDLMYAKRAFVHWYVGEGMEEGEFSEAREDLAALEKDYEEVGAEGGDDEDDEGEEY

SEQ ID NO: 24490 - protein, 415 aa, Arabidopsis thaliana
  peptide (1)..(415): Ceres Seq. ID no. 13580677
  misc_feature (14)..(211): Pfam Name: Tubulin/FtsZ family, GTPase domain Pfam Description: Tubulin/FtsZ family, GTPase domain
  misc_feature (14)..(211): Pfam Name: Tubulin/FtsZ family, GTPase domain Pfam Description: Tubulin/FtsZ family, GTPase domain
  misc_feature (1)..(415): Homolog of NCBI NO: 25396550 NR Description: alpha tubulin [Physcomitrella patens]
  misc_feature (1)..(415): Homolog of NCBI NO: 6723478 NR Description: alpha-tubulin [Betula pendula]
  misc_feature (1)..(415): Homolog of NCBI NO: 464840 NR Description: Tubulin alpha-1 chain
  misc_feature (1)..(414): Homolog of NCBI NO: 1174592 NR Description: TUBULIN ALPHA-1 CHAIN
  misc_feature (1)..(415): Homolog of NCBI NO: 15029368 NR Description: alpha tubulin subunit [Rosa hybrid cultivar]
  misc_feature (1)..(415): Homolog of NCBI NO: 25396550 NR Description: alpha tubulin [Physcomitrella patens]
  misc_feature (1)..(415): Homolog of NCBI NO: 464840 NR Description: Tubulin alpha-1 chain
  misc_feature (1)..(415): Homolog of NCBI NO: 15029368 NR Description: alpha tubulin subunit [Rosa hybrid cultivar]
  misc_feature (1)..(415): Homolog of NCBI NO: 15220329 NR Description: tubulin alpha-2/alpha-4 chain (TUA4) [Arabidopsis
  misc_feature (1)..(415): Homolog of NCBI NO: 15233627 NR Description: tubulin alpha-6 chain (TUA6) [Arabidopsis
  misc_feature (1)..(415): Homolog of NCBI NO: 16226462 NR Description: AT4g14960/dl3520c [Arabidopsis thaliana]
  misc_feature (1)..(415): Homolog of NCBI NO: 464849 NR Description: TUBULIN ALPHA CHAIN
  misc_feature (1)..(415): Homolog of NCBI NO: 29124983 NR Description: alpha-tubulin 1 [Populus tremuloides]
  misc_feature (1)..(414): Homolog of NCBI NO: 1174592 NR Description: TUBULIN ALPHA-1 CHAIN
  misc_feature (1)..(415): Homolog of NCBI NO: 6723478 NR Description: alpha-tubulin [Betula pendula]
  misc_feature (1)..(415): Homolog of NCBI NO: 29124983 NR Description: alpha-tubulin 1 [Populus tremuloides]
  misc_feature (1)..(415): Homolog of NCBI NO: 464849 NR Description: TUBULIN ALPHA CHAIN
  misc_feature (1)..(415): Homolog of NCBI NO: 16226462 NR Description: AT4g14960/dl3520c [Arabidopsis thaliana]
  misc_feature (1)..(415): Homolog of NCBI NO: 15233627 NR Description: tubulin alpha-6 chain (TUA6) [Arabidopsis
  misc_feature (1)..(415): Homolog of NCBI NO: 15220329 NR Description: tubulin alpha-2/alpha-4 chain (TUA4) [Arabidopsis
MPSDKTVGGGDDAFNTFFSETGAGKHVPRAVFVDLEPTVIDEVRTGTYRQLFHPEQLISGKEDAANNFARGHYTIGKEIVDLCLDRIRKLADNCTGLQGFLVFNAVGGGTGSGLGSLLLERLSVDYGKKSKLGFTVYPSPQVSTSVVEPYNSVLSTHSLLEHTDVSILLDNEAIYDICRRSLSIERPTYTNLNRLVSQVISSLTASLRFDGALNVDVTEFQTNLVPYPRIHFMLSSYAPVISAEKAFHEQLSVAEITNSAFEPASMMAKCDPRHGKYMACCLMYRGDVVPKDVNAAVGTIKTKRTIQFVDWCPTGFKCGINYQPPTVVPGGDLAKVQRAVCMISNSTSVAEVFSRIDHKFDLMYAKRAFVHWYVGEGMEEGEFSEAREDLAALEKDYEEVGAEGGDDEDDEGEEY

SEQ ID NO: 24491 - DNA, 1862 bp, Arabidopsis thaliana
  misc_feature (1)..(1862): Ceres Seq. ID no. 13500134
  misc_feature: MA Experiment ID: 108461 Result: Down-regulated in Transcription
  misc_feature: MA Experiment 108461 PARAMETER Experiment Name: At_Germinating_Seeds_cDNA_P Parameter: Age (day) Value: 1 vs. 0
  misc_feature: MA Experiment 108461 PARAMETER Experiment Name: At_Germinating_Seeds_cDNA_P Parameter: Tissue Value: Germinating Seeds
  misc_feature: MA Experiment ID: 108462 Result: Down-regulated in Transcription
  misc_feature: MA Experiment 108462 PARAMETER Experiment Name: At_Germinating_Seeds_cDNA_P Parameter: Age (day) Value: 2 vs. 0
  misc_feature: MA Experiment 108462 PARAMETER Experiment Name: At_Germinating_Seeds_cDNA_P Parameter: Tissue Value: Germinating Seeds
  misc_feature: MA Experiment ID: 108463 Result: Down-regulated in Transcription
  misc_feature: MA Experiment 108463 PARAMETER Experiment Name: At_Germinating_Seeds_cDNA_P Parameter: Age (day) Value: 3 vs. 0
  misc_feature: MA Experiment 108463 PARAMETER Experiment Name: At_Germinating_Seeds_cDNA_P Parameter: Tissue Value: Germinating Seeds
  misc_feature: MA Experiment ID: 108464 Result: Down-regulated in Transcription
  misc_feature: MA Experiment 108464 PARAMETER Experiment Name: At_Germinating_Seeds_cDNA_P Parameter: Age (day) Value: 4 vs. 0
  misc_feature: MA Experiment 108464 PARAMETER Experiment Name: At_Germinating_Seeds_cDNA_P Parameter: Tissue Value: Germinating Seeds
  misc_feature: MA Experiment ID: 108579 Result: Up-regulated in Transcription
  misc_feature: MA Experiment 108579 PARAMETER Experiment Name: At_4deg_Cold_cDNA_P Parameter: Temperature (deg C) Value: 4 vs. 22
  misc_feature: MA Experiment 108579 PARAMETER Experiment Name: At_4deg_Cold_cDNA_P Parameter: Timepoint (hr) Value: 6
  misc_feature: MA Experiment 108579 PARAMETER Experiment Name: At_4deg_Cold_cDNA_P Parameter: Tissue Value: Aerial
  misc_feature: MA Experiment ID: 108585 Result: Down-regulated in Transcription
  misc_feature: MA Experiment 108585 PARAMETER Experiment Name: At_5mM_NaNP_cDNA_P Parameter: Timepoint (hr) Value: 6
  misc_feature: MA Experiment 108585 PARAMETER Experiment Name: At_5mM_NaNP_cDNA_P Parameter: Tissue Value: Aerial
  misc_feature: MA Experiment 108585 PARAMETER Experiment Name: At_5mM_NaNP_cDNA_P Parameter: Treatment Value: null
  misc_feature: MA Experiment ID: 20000069 Result: Up-regulated in Transcription
  misc_feature: MA Experiment 20000069 PARAMETER Experiment Name: At_100uM_ABA_Mutants_cDNA_P Parameter: Plant Line Value: CS23
  misc_feature: MA Experiment 20000069 PARAMETER Experiment Name: At_100uM_ABA_Mutants_cDNA_P Parameter: Timepoint (hr) Value: 6
  misc_feature: MA Experiment 20000069 PARAMETER Experiment Name: At_100uM_ABA_Mutants_cDNA_P Parameter: Tissue Value: Aerial
  misc_feature: MA Experiment 20000069 PARAMETER Experiment Name: At_100uM_ABA_Mutants_cDNA_P Parameter: Treatment Value: 100uM ABA vs. No Treatment
  misc_feature: MA Experiment ID: 20000070 Result: Up-regulated in Transcription
  misc_feature: MA Experiment 20000070 PARAMETER Experiment Name: At_100uM_ABA_Mutants_cDNA_P Parameter: Plant Line Value: CS24
  misc_feature: MA Experiment 20000070 PARAMETER Experiment Name: At_100uM_ABA_Mutants_cDNA_P Parameter: Timepoint (hr) Value: 6
  misc_feature: MA Experiment 20000070 PARAMETER Experiment Name: At_100uM_ABA_Mutants_cDNA_P Parameter: Tissue Value: Aerial
  misc_feature: MA Experiment 20000070 PARAMETER Experiment Name: At_100uM_ABA_Mutants_cDNA_P Parameter: Treatment Value: 100uM ABA vs. No Treatment
  misc_feature: MA Experiment ID: 20000090 Result: Up-regulated in Transcription
  misc_feature: MA Experiment ID: 20000117 Result: Up-regulated in Transcription
  misc_feature: MA Experiment 20000117 PARAMETER Experiment Name: At_100uM_ABA_Mutants_cDNA_P Parameter: Plant Line Value: Columbia
  misc_feature: MA Experiment 20000117 PARAMETER Experiment Name: At_100uM_ABA_Mutants_cDNA_P Parameter: Timepoint (hr) Value: 6
  misc_feature: MA Experiment 20000117 PARAMETER Experiment Name: At_100uM_ABA_Mutants_cDNA_P Parameter: Tissue Value: Aerial
  misc_feature: MA Experiment 20000117 PARAMETER Experiment Name: At_100uM_ABA_Mutants_cDNA_P Parameter: Treatment Value: 100uM ABA vs. No Treatment
  misc_feature: MA Experiment ID: 20000173 Result: Down-regulated in Transcription
  misc_feature: MA Experiment 20000173 PARAMETER Experiment Name: At_42deg_Heat_P Parameter: Age (day) Value: 14
  misc_feature: MA Experiment 20000173 PARAMETER Experiment Name: At_42deg_Heat_P Parameter: Organism Value: A. thaliana
  misc_feature: MA Experiment 20000173 PARAMETER Experiment Name: At_42deg_Heat_P Parameter: Plant Line Value: WS
  misc_feature: MA Experiment 20000173 PARAMETER Experiment Name: At_42deg_Heat_P Parameter: Temperature (deg C) Value: 42 vs. 22
  misc_feature: MA Experiment 20000173 PARAMETER Experiment Name: At_42deg_Heat_P Parameter: Timepoint (hr) Value: 6
  misc_feature: MA Experiment 20000173 PARAMETER Experiment Name: At_42deg_Heat_P Parameter: Tissue Value: Aerial
  misc_feature: MA Experiment ID: 20000180 Result: Down-regulated in Transcription
  misc_feature: MA Experiment 20000180 PARAMETER Experiment Name: At_Germinating_Seeds_P Parameter: Age (hr) Value: 24 vs. 0
  misc_feature: MA Experiment 20000180 PARAMETER Experiment Name: At_Germinating_Seeds_P Parameter: Tissue Value: Germinating Seeds
  misc_feature: MA Experiment ID: 20000185 Result: Down-regulated in Transcription
  misc_feature: MA Experiment 20000185 PARAMETER Experiment Name: At_Roots__P Parameter: Age (day) Value: 7 vs. 21
  misc_feature: MA Experiment 20000185 PARAMETER Experiment Name: At_Roots__P Parameter: Organism Value: A. thaliana
  misc_feature: MA Experiment 20000185 PARAMETER Experiment Name: At_Roots__P Parameter: Tissue Value: Roots vs. Whole Plant
  misc_feature: MA Experiment ID: 20000438 Result: Down-regulated in Transcription
  misc_feature: MA Experiment 20000438 PARAMETER Experiment Name: At_Shoots__P Parameter: Age (day) Value: 14
  misc_feature: MA Experiment 20000438 PARAMETER Experiment Name: At_Shoots__P Parameter: Tissue Value: Shoots vs. Whole Plant
  misc_feature: MA Experiment ID: 20000439 Result: Down-regulated in Transcription
  misc_feature: MA Experiment 20000439 PARAMETER Experiment Name: At_Roots__P Parameter: Age (day) Value: 14 vs. 21
  misc_feature: MA Experiment 20000439 PARAMETER Experiment Name: At_Roots__P Parameter: Organism Value: A. thaliana
  misc_feature: MA Experiment 20000439 PARAMETER Experiment Name: At_Roots__P Parameter: Tissue Value: Roots vs. Whole Plant
  misc_feature: MA Experiment ID: 20001247 Result: Down-regulated in Transcription
  misc_feature: MA Experiment 20001247 PARAMETER Experiment Name: At_Far-red-induction_P Parameter: Age (day) Value: 7
  misc_feature: MA Experiment 20001247 PARAMETER Experiment Name: At_Far-red-induction_P Parameter: Light Value: Far-red vs. White
  misc_feature: MA Experiment 20001247 PARAMETER Experiment Name: At_Far-red-induction_P Parameter: Organism Value: A. thaliana
  misc_feature: MA Experiment 20001247 PARAMETER Experiment Name: At_Far-red-induction_P Parameter: Plant Line Value: Columbia
  misc_feature: MA Experiment 20001247 PARAMETER Experiment Name: At_Far-red-induction_P Parameter: Timepoint (hr) Value: 1
  misc_feature: MA Experiment 20001247 PARAMETER Experiment Name: At_Far-red-induction_P Parameter: Tissue Value: Whole Plant
  misc_feature: MA Experiment ID: 20001248 Result: Up-regulated in Transcription
  misc_feature: MA Experiment 20001248 PARAMETER Experiment Name: At_Far-red-induction_P Parameter: Age (day) Value: 7
  misc_feature: MA Experiment 20001248 PARAMETER Experiment Name: At_Far-red-induction_P Parameter: Light Value: Far-red vs. White
  misc_feature: MA Experiment 20001248 PARAMETER Experiment Name: At_Far-red-induction_P Parameter: Organism Value: A. thaliana
  misc_feature: MA Experiment 20001248 PARAMETER Experiment Name: At_Far-red-induction_P Parameter: Plant Line Value: Columbia
  misc_feature: MA Experiment 20001248 PARAMETER Experiment Name: At_Far-red-induction_P Parameter: Timepoint (hr) Value: 4
  misc_feature: MA Experiment 20001248 PARAMETER Experiment Name: At_Far-red-induction_P Parameter: Tissue Value: Whole Plant
  misc_feature: MA Experiment ID: 20001904 Result: Up-regulated in Transcription
  misc_feature: MA Experiment 20001904 PARAMETER Experiment Name: At_Drought_Reproduction_P Parameter: Age (day) Value: 37
  misc_feature: MA Experiment 20001904 PARAMETER Experiment Name: At_Drought_Reproduction_P Parameter: Organism Value: A. thaliana
  misc_feature: MA Experiment 20001904 PARAMETER Experiment Name: At_Drought_Reproduction_P Parameter: Plant Line Value: WS
  misc_feature: MA Experiment 20001904 PARAMETER Experiment Name: At_Drought_Reproduction_P Parameter: Timepoint (day) Value: 7
  misc_feature: MA Experiment 20001904 PARAMETER Experiment Name: At_Drought_Reproduction_P Parameter: Tissue Value: Rosettes
  misc_feature: MA Experiment 20001904 PARAMETER Experiment Name: At_Drought_Reproduction_P Parameter: Treatment Value: Drought vs. No Drought
  misc_feature: MA Experiment ID: 20001905 Result: Up-regulated in Transcription
  misc_feature: MA Experiment 20001905 PARAMETER Experiment Name: At_Drought_Reproduction_P Parameter: Age (day) Value: 40
  misc_feature: MA Experiment 20001905 PARAMETER Experiment Name: At_Drought_Reproduction_P Parameter: Organism Value: A. thaliana
  misc_feature: MA Experiment 20001905 PARAMETER Experiment Name: At_Drought_Reproduction_P Parameter: Plant Line Value: WS
  misc_feature: MA Experiment 20001905 PARAMETER Experiment Name: At_Drought_Reproduction_P Parameter: Timepoint (day) Value: 10
  misc_feature: MA Experiment 20001905 PARAMETER Experiment Name: At_Drought_Reproduction_P Parameter: Tissue Value: Rosettes
  misc_feature: MA Experiment 20001905 PARAMETER Experiment Name: At_Drought_Reproduction_P Parameter: Treatment Value: Drought vs. No Drought
  misc_feature: MA Experiment ID: 20001906 Result: Up-regulated in Transcription
  misc_feature: MA Experiment 20001906 PARAMETER Experiment Name: At_Drought_Reproduction_P Parameter: Age (day) Value: 35
  misc_feature: MA Experiment 20001906 PARAMETER Experiment Name: At_Drought_Reproduction_P Parameter: Organism Value: A. thaliana
  misc_feature: MA Experiment 20001906 PARAMETER Experiment Name: At_Drought_Reproduction_P Parameter: Plant Line Value: WS
  misc_feature: MA Experiment 20001906 PARAMETER Experiment Name: At_Drought_Reproduction_P Parameter: Timepoint (day) Value: 5
  misc_feature: MA Experiment 20001906 PARAMETER Experiment Name: At_Drought_Reproduction_P Parameter: Tissue Value: Siliques
  misc_feature: MA Experiment 20001906 PARAMETER Experiment Name: At_Drought_Reproduction_P Parameter: Treatment Value: Drought vs. No Drought
atgaaatctgcaaatttaggtcttttaatagaaatctgaatttcatgttgctgaaagaatttacaacgaagttgtaaatactctgagaaacatgtaagtcaggagagagtcccttctatggtttatatttggcggcttttaagaagcatacgcatatcaagtgtttgatgaaattcctcagagaagatgatgtccaccacagtcagattaaacaggtttacgtatctaacgagtactgcaaaactgacacgttacttttgctctcaccatttagttgaccgatcggaaacggcgttgcatgaagttattcggatagtttcttctccagttggtggtctagatgaccttgaagaaaacttgaaccaggtttctgtttctccatcatcaaaccttgttacccaagtgattgagtcttgcaagaacgagacttcaccgagaaggctgttgaggtttttctcctggtcgtgtaaaagcttgggatctagtttacacgacaaggaattcaactatgtcctaagagttttggctgagaagaaggatcacacagctatgcagatactcttatcagatctcaggaaggagaatcgggcgatggacaagcaaacgtttagcattgtcgctgaaactctggttaaggttggtaaggaagaagatgcaataggtatcttcaagatcttggacaaattttcttgcccacaagatggtttcactgtgacggctattataagcgctctttgttccagaggacatgtgaagagagcattgggagttatgcatcatcacaaggatgtaatatccgggaatgaattgtctgtgtatagaagtcttttattcgggtggtcggtacaaagaaacgtgaaggaagcaagaagagttatacaagatatgaaatcagcagggattacaccggatttgttctgtttcaactcgttgctgacctgcctttgcgaaagaaacgtgaatcgaaacccgtctgggcttgttcctgaagctttgaatattatgttggagatgaggtcttacaaaatccaacctacgtctatgagttacaacattttgctctcttgtttgggaaggactaggagggtgagagagtcctgccagattttagaacagatgaaaagatcgggatgtgatccggatacagggagctattacttcgttgtgagggtcctgtatttgacaggaaggtttggtaaaggcaaccaaattgtggatgagatgatcgagagaggatttagacccgaacgcaaattctattatgatctgatcggggttctttgtggggtcgagcgggttaactttgctcttcaattgtttgagaagatgaagagaagctcagtgggtggttatggtcaggtttatgatctgctcataccaaaactatgtaaaggaggaaactttgagaaaggaagagagctttgggaagaggcattgtcaattgatgttacacttagttgctccattagtttgcttgatccatctgtcacagaggttttcaaacctatgaagatgaaagaagaagctgcaatggtggatcgtcgtgctcttaacttgaagattcacgctagaatgaacaaaacaaagccaaaactgaaactaaaaccgaaacgcaggagcaagacaaagaagaagaatctgcaacattgattgatttcttctacccattgttaagaacatctgatatagcaggcaatgtatcacaagaaactcaagtaagatgttctgctttttatgtattagtagtaatgcagaagcaaaggacatgagattcttttgttgttctctttgtcccattgattcttattacgaaaaatatgggttctgaagaatacaaaacaagagacaagaatattgtgatc

SEQ ID NO: 24492 - protein, 487 aa, Arabidopsis thaliana
  peptide (1)..(487): Ceres Seq. ID no. 13500135
  misc_feature (391)..(425): Pfam Name: PPR repeat Pfam Description: PPR repeat
  misc_feature (5)..(414): Homolog of NCBI NO: 15223926 NR Description: pentatricopeptide (PPR) repeat-containing protein
  misc_feature (54)..(415): Homolog of NCBI NO: 15239161 NR Description: pentatricopeptide (PPR) repeat-containing protein
  misc_feature (4)..(414): Homolog of NCBI NO: 15219049 NR Description: hypothetical protein [Arabidopsis thaliana]
  misc_feature (9)..(415): Homolog of NCBI NO: 15229604 NR Description: expressed protein [Arabidopsis thaliana]
  misc_feature (57)..(477): Homolog of NCBI NO: 34394565 NR Description: unknown protein [Oryza sativa (japonica
  misc_feature (30)..(483): Homolog of NCBI NO: 21554346 NR Description: unknown [Arabidopsis thaliana]
  misc_feature (30)..(483): Homolog of NCBI NO: 15239488 NR Description: pentatricopeptide (PPR) repeat-containing protein
  misc_feature (34)..(436): Homolog of NCBI NO: 37534458 NR Description: putative endopeptidase [Oryza sativa (japonica
  misc_feature (1)..(487): Homolog of NCBI NO: 21593376 NR Description: unknown [Arabidopsis thaliana]
  misc_feature (1)..(487): Homolog of NCBI NO: 15240232 NR Description: pentatricopeptide (PPR) repeat-containing protein
MMSTTVRLNRFTYLTSTAKLTRYFCSHHLVDRSETALHEVIRIVSSPVGGLDDLEENLNQVSVSPSSNLVTQVIESCKNETSPRRLLRFFSWSCKSLGSSLHDKEFNYVLRVLAEKKDHTAMQILLSDLRKENRAMDKQTFSIVAETLVKVGKEEDAIGIFKILDKFSCPQDGFTVTAIISALCSRGHVKRALGVMHHHKDVISGNELSVYRSLLFGWSVQRNVKEARRVIQDMKSAGITPDLFCFNSLLTCLCERNVNRNPSGLVPEALNIMLEMRSYKIQPTSMSYNILLSCLGRTRRVRESCQILEQMKRSGCDPDTGSYYFVVRVLYLTGRFGKGNQIVDEMIERGFRPERKFYYDLIGVLCGVERVNFALQLFEKMKRSSVGGYGQVYDLLIPKLCKGGNFEKGRELWEEALSIDVTLSCSISLLDPSVTEVFKPMKMKEEAAMVDRRALNLKIHARMNKTKPKLKLKPKRRSKTKKKNLQH

SEQ ID NO: 24493 - protein, 486 aa, Arabidopsis thaliana
  peptide (1)..(486): Ceres Seq. ID no. 13500136
  misc_feature (390)..(424): Pfam Name: PPR repeat Pfam Description: PPR repeat
  misc_feature (4)..(413): Homolog of NCBI NO: 15223926 NR Description: pentatricopeptide (PPR) repeat-containing protein
  misc_feature (53)..(414): Homolog of NCBI NO: 15239161 NR Description: pentatricopeptide (PPR) repeat-containing protein
  misc_feature (3)..(413): Homolog of NCBI NO: 15219049 NR Description: hypothetical protein [Arabidopsis thaliana]
  misc_feature (8)..(414): Homolog of NCBI NO: 15229604 NR Description: expressed protein [Arabidopsis thaliana]
  misc_feature (56)..(476): Homolog of NCBI NO: 34394565 NR Description: unknown protein [Oryza sativa (japonica
  misc_feature (29)..(482): Homolog of NCBI NO: 21554346 NR Description: unknown [Arabidopsis thaliana]
  misc_feature (29)..(482): Homolog of NCBI NO: 15239488 NR Description: pentatricopeptide (PPR) repeat-containing protein
  misc_feature (33)..(435): Homolog of NCBI NO: 37534458 NR Description: putative endopeptidase [Oryza sativa (japonica
  misc_feature (1)..(486): Homolog of NCBI NO: 21593376 NR Description: unknown [Arabidopsis thaliana]
  misc_feature (1)..(486): Homolog of NCBI NO: 15240232 NR Description: pentatricopeptide (PPR) repeat-containing protein
MSTTVRLNRFTYLTSTAKLTRYFCSHHLVDRSETALHEVIRIVSSPVGGLDDLEENLNQVSVSPSSNLVTQVIESCKNETSPRRLLRFFSWSCKSLGSSLHDKEFNYVLRVLAEKKDHTAMQILLSDLRKENRAMDKQTFSIVAETLVKVGKEEDAIGIFKILDKFSCPQDGFTVTAIISALCSRGHVKRALGVMHHHKDVISGNELSVYRSLLFGWSVQRNVKEARRVIQDMKSAGITPDLFCFNSLLTCLCERNVNRNPSGLVPEALNIMLEMRSYKIQPTSMSYNILLSCLGRTRRVRESCQILEQMKRSGCDPDTGSYYFVVRVLYLTGRFGKGNQIVDEMIERGFRPERKFYYDLIGVLCGVERVNFALQLFEKMKRSSVGGYGQVYDLLIPKLCKGGNFEKGRELWEEALSIDVTLSCSISLLDPSVTEVFKPMKMKEEAAMVDRRALNLKIHARMNKTKPKLKLKPKRRSKTKKKNLQH

SEQ ID NO: 24494 - protein, 366 aa, Arabidopsis thaliana
  peptide (1)..(366): Ceres Seq. ID no. 13500137
  misc_feature (270)..(304): Pfam Name: PPR repeat Pfam Description: PPR repeat
  misc_feature (1)..(293): Homolog of NCBI NO: 15223926 NR Description: pentatricopeptide (PPR) repeat-containing protein
  misc_feature (1)..(294): Homolog of NCBI NO: 15239161 NR Description: pentatricopeptide (PPR) repeat-containing protein
  misc_feature (1)..(293): Homolog of NCBI NO: 15219049 NR Description: hypothetical protein [Arabidopsis thaliana]
  misc_feature (1)..(294): Homolog of NCBI NO: 15229604 NR Description: expressed protein [Arabidopsis thaliana]
  misc_feature (1)..(356): Homolog of NCBI NO: 34394565 NR Description: unknown protein [Oryza sativa (japonica
  misc_feature (1)..(362): Homolog of NCBI NO: 21554346 NR Description: unknown [Arabidopsis thaliana]
  misc_feature (1)..(362): Homolog of NCBI NO: 15239488 NR Description: pentatricopeptide (PPR) repeat-containing protein
  misc_feature (1)..(315): Homolog of NCBI NO: 37534458 NR Description: putative endopeptidase [Oryza sativa (japonica
  misc_feature (1)..(366): Homolog of NCBI NO: 21593376 NR Description: unknown [Arabidopsis thaliana]
  misc_feature (1)..(366): Homolog of NCBI NO: 15240232 NR Description: pentatricopeptide (PPR) repeat-containing protein
MQILLSDLRKENRAMDKQTFSIVAETLVKVGKEEDAIGIFKILDKFSCPQDGFTVTAIISALCSRGHVKRALGVMHHHKDVISGNELSVYRSLLFGWSVQRNVKEARRVIQDMKSAGITPDLFCFNSLLTCLCERNVNRNPSGLVPEALNIMLEMRSYKIQPTSMSYNILLSCLGRTRRVRESCQILEQMKRSGCDPDTGSYYFVVRVLYLTGRFGKGNQIVDEMIERGFRPERKFYYDLIGVLCGVERVNFALQLFEKMKRSSVGGYGQVYDLLIPKLCKGGNFEKGRELWEEALSIDVTLSCSISLLDPSVTEVFKPMKMKEEAAMVDRRALNLKIHARMNKTKPKLKLKPKRRSKTKKKNLQH

SEQ ID NO: 24495 - DNA, 1677 bp, Arabidopsis thaliana
  misc_feature (1)..(1677): Ceres Seq. ID no. 12371837
  misc_feature: MA Experiment ID: 20000069 Result: Up-regulated in Transcription
  misc_feature: MA Experiment 20000069 PARAMETER Experiment Name: At_100uM_ABA_Mutants_cDNA_P Parameter: Plant Line Value: CS23
  misc_feature: MA Experiment 20000069 PARAMETER Experiment Name: At_100uM_ABA_Mutants_cDNA_P Parameter: Timepoint (hr) Value: 6
  misc_feature: MA Experiment 20000069 PARAMETER Experiment Name: At_100uM_ABA_Mutants_cDNA_P Parameter: Tissue Value: Aerial
  misc_feature: MA Experiment 20000069 PARAMETER Experiment Name: At_100uM_ABA_Mutants_cDNA_P Parameter: Treatment Value: 100uM ABA vs. No Treatment
  misc_feature: MA Experiment ID: 20000070 Result: Up-regulated in Transcription
  misc_feature: MA Experiment 20000070 PARAMETER Experiment Name: At_100uM_ABA_Mutants_cDNA_P Parameter: Plant Line Value: CS24
  misc_feature: MA Experiment 20000070 PARAMETER Experiment Name: At_100uM_ABA_Mutants_cDNA_P Parameter: Timepoint (hr) Value: 6
  misc_feature: MA Experiment 20000070 PARAMETER Experiment Name: At_100uM_ABA_Mutants_cDNA_P Parameter: Tissue Value: Aerial
  misc_feature: MA Experiment 20000070 PARAMETER Experiment Name: At_100uM_ABA_Mutants_cDNA_P Parameter: Treatment Value: 100uM ABA vs. No Treatment
  misc_feature: MA Experiment ID: 20000086 Result: Up-regulated in Transcription
  misc_feature: MA Experiment 20000086 PARAMETER Experiment Name: At_100uM_ABA_Mutants_cDNA_P Parameter: Plant Line Value: CS22
  misc_feature: MA Experiment 20000086 PARAMETER Experiment Name: At_100uM_ABA_Mutants_cDNA_P Parameter: Timepoint (hr) Value: 6
  misc_feature: MA Experiment 20000086 PARAMETER Experiment Name: At_100uM_ABA_Mutants_cDNA_P Parameter: Tissue Value: Aerial
  misc_feature: MA Experiment 20000086 PARAMETER Experiment Name: At_100uM_ABA_Mutants_cDNA_P Parameter: Treatment Value: 100uM ABA vs. No Treatment
  misc_feature: MA Experiment ID: 20000087 Result: Up-regulated in Transcription
  misc_feature: MA Experiment 20000087 PARAMETER Experiment Name: At_100uM_ABA_Mutants_cDNA_P Parameter: Plant Line Value: WS
  misc_feature: MA Experiment 20000087 PARAMETER Experiment Name: At_100uM_ABA_Mutants_cDNA_P Parameter: Timepoint (hr) Value: 6
  misc_feature: MA Experiment 20000087 PARAMETER Experiment Name: At_100uM_ABA_Mutants_cDNA_P Parameter: Tissue Value: Aerial
  misc_feature: MA Experiment 20000087 PARAMETER Experiment Name: At_100uM_ABA_Mutants_cDNA_P Parameter: Treatment Value: 100uM ABA vs. No Treatment
  misc_feature: MA Experiment ID: 20000088 Result: Up-regulated in Transcription
  misc_feature: MA Experiment 20000088 PARAMETER Experiment Name: At_100uM_ABA_Mutants_cDNA_P Parameter: Plant Line Value: Landsberg
  misc_feature: MA Experiment 20000088 PARAMETER Experiment Name: At_100uM_ABA_Mutants_cDNA_P Parameter: Timepoint (hr) Value: 6
  misc_feature: MA Experiment 20000088 PARAMETER Experiment Name: At_100uM_ABA_Mutants_cDNA_P Parameter: Tissue Value: Aerial
  misc_feature: MA Experiment 20000088 PARAMETER Experiment Name: At_100uM_ABA_Mutants_cDNA_P Parameter: Treatment Value: 100uM ABA vs. No Treatment
  misc_feature: MA Experiment ID: 20000090 Result: Up-regulated in Transcription
  misc_feature: MA Experiment ID: 20000184 Result: Down-regulated in Transcription
  misc_feature: MA Experiment 20000184 PARAMETER Experiment Name: At_Shoots__P Parameter: Age (day) Value: 7
  misc_feature: MA Experiment 20000184 PARAMETER Experiment Name: At_Shoots__P Parameter: Tissue Value: Shoots vs. Whole Plant
  misc_feature: MA Experiment ID: 20000185 Result: Down-regulated in Transcription
  misc_feature: MA Experiment 20000185 PARAMETER Experiment Name: At_Roots__P Parameter: Age (day) Value: 7 vs. 21
  misc_feature: MA Experiment 20000185 PARAMETER Experiment Name: At_Roots__P Parameter: Organism Value: A. thaliana
  misc_feature: MA Experiment 20000185 PARAMETER Experiment Name: At_Roots__P Parameter: Tissue Value: Roots vs. Whole Plant
  misc_feature: MA Experiment ID: 20000234 Result: Up-regulated in Transcription
  misc_feature: MA Experiment 20000234 PARAMETER Experiment Name: At_Siliques_P Parameter: Age (day) Value: 21
  misc_feature: MA Experiment 20000234 PARAMETER Experiment Name: At_Siliques_P Parameter: Organism Value: A. thaliana
  misc_feature: MA Experiment 20000234 PARAMETER Experiment Name: At_Siliques_P Parameter: Plant Line Value: WS
  misc_feature: MA Experiment 20000234 PARAMETER Experiment Name: At_Siliques_P Parameter: Tissue Value: Less Than 5mm Siliques vs. Whole Plant
  misc_feature: MA Experiment ID: 20000264 Result: Up-regulated in Transcription
  misc_feature: MA Experiment 20000264 PARAMETER Experiment Name: At_Open_Flower_P Parameter: Age (day) Value: 21
  misc_feature: MA Experiment 20000264 PARAMETER Experiment Name: At_Open_Flower_P Parameter: Plant Line Value: WS
  misc_feature: MA Experiment 20000264 PARAMETER Experiment Name: At_Open_Flower_P Parameter: Tissue Value: Open Flower vs. Whole Plant
  misc_feature: MA Experiment ID: 20000439 Result: Down-regulated in Transcription
  misc_feature: MA Experiment 20000439 PARAMETER Experiment Name: At_Roots__P Parameter: Age (day) Value: 14 vs. 21
  misc_feature: MA Experiment 20000439 PARAMETER Experiment Name: At_Roots__P Parameter: Organism Value: A. thaliana
  misc_feature: MA Experiment 20000439 PARAMETER Experiment Name: At_Roots__P Parameter: Tissue Value: Roots vs. Whole Plant
  misc_feature: MA Experiment ID: 20000794 Result: Down-regulated in Transcription
  misc_feature: MA Experiment 20000794 PARAMETER Experiment Name: At_Petals_P Parameter: Age (day) Value: 23-25 days
  misc_feature: MA Experiment 20000794 PARAMETER Experiment Name: At_Petals_P Parameter: Plant Line Value: WS
  misc_feature: MA Experiment 20000794 PARAMETER Experiment Name: At_Petals_P Parameter: Tissue Value: Petals vs. Whole plant
  misc_feature: MA Experiment ID: 20001906 Result: Down-regulated in Transcription
  misc_feature: MA Experiment 20001906 PARAMETER Experiment Name: At_Drought_Reproduction_P Parameter: Age (day) Value: 35
  misc_feature: MA Experiment 20001906 PARAMETER Experiment Name: At_Drought_Reproduction_P Parameter: Organism Value: A. thaliana
  misc_feature: MA Experiment 20001906 PARAMETER Experiment Name: At_Drought_Reproduction_P Parameter: Plant Line Value: WS
  misc_feature: MA Experiment 20001906 PARAMETER Experiment Name: At_Drought_Reproduction_P Parameter: Timepoint (day) Value: 5
  misc_feature: MA Experiment 20001906 PARAMETER Experiment Name: At_Drought_Reproduction_P Parameter: Tissue Value: Siliques
  misc_feature: MA Experiment 20001906 PARAMETER Experiment Name: At_Drought_Reproduction_P Parameter: Treatment Value: Drought vs. No Drought
  misc_feature: MA Experiment ID: 20001908 Result: Down-regulated in Transcription
  misc_feature: MA Experiment 20001908 PARAMETER Experiment Name: At_Drought_Reproduction_P Parameter: Age (day) Value: 40
  misc_feature: MA Experiment 20001908 PARAMETER Experiment Name: At_Drought_Reproduction_P Parameter: Organism Value: A. thaliana
  misc_feature: MA Experiment 20001908 PARAMETER Experiment Name: At_Drought_Reproduction_P Parameter: Plant Line Value: WS
  misc_feature: MA Experiment 20001908 PARAMETER Experiment Name: At_Drought_Reproduction_P Parameter: Timepoint (day) Value: 10
  misc_feature: MA Experiment 20001908 PARAMETER Experiment Name: At_Drought_Reproduction_P Parameter: Tissue Value: Siliques
  misc_feature: MA Experiment 20001908 PARAMETER Experiment Name: At_Drought_Reproduction_P Parameter: Treatment Value: Drought vs. No Drought
aatattaatttcttcaattaaccttgataagagttaaaaaagtaaaaaacctcgagaagagttgtagctgtggtcaacacttgagaggcagcacgatgagctccatatggaacgttgcaatgttgatggtagctttggtggttgtgaggatcagccactggctttaccgatggtcaaaccctaagtgccctggcaagttaccacctggatcgatgggttttccaatcattggagagactctcgatttctttaagccttgtggagtcgaaggtatcccaacctttgttaagaagaggatgataaggtatgggccgttgtttcgaacaaacatttttggttccaaaaccgtggtttcgacagatccggatgtgatccaccagattttccggcaagagaacacgtcttttgagctaggctatccagacatatttgtgaaagtatttggaaaagataatttgttcttgaaggaagtgttcatccacaagtacctccaaaaaatcactatgcaaattcttggctccgagggtttgaagcaaacaatgttaggaaacatggacaaagcaacccgcgaccatattaggtccattgctagccaggggagcttcaatgttcgtaaagaagttgaaaacttggtagtagcgtacatgacaccaaagctgataagtaaccttaaaccagagacgcaatcaaagcttatagataatctcaacgccttcaatcttgattggtttaagtccttcttaagactctctacttggaaagctgtcaccaaagccctcaagtcacgcgaagaagctatccaggtgatgaaagacgttctcatgatgagaaaagagacgcgagagaagcaagaagacttccttaacacgcttctagaagaactggagaaagacggtagctttttcgaccaaggatcggctataaatctcatcttccttctggcgtttgccttgagagaaggtacctctagttgtactgctttggccgtgaagttcatatccaaagacccgaaagtgcttgcagagctcaagcgtgagcataaggcaattgtagacaacagaaaagataaggaagctggagttagctgggaagaatatagacacaacatgactttcaccaacatggttagcaatgaggtgcttcgcctagcaaacacgacccctttgttgtttcgaaaggcggtgcaagatgttgagatcaaaggatatacaattccggctggttggattgtggcggttgcaccttcagcggttcattttgatcctgcaatctatgagaacccatttgagtttaatccatggagatgggaggggaaagaaatgatttggggatctaaaacgttcatggcgtttggatatggagttagactttgtgtaggtgcagagttttcacggcttcaaatggcaatcttcctccatcatcttgtggcatattacgatttctcaatggtccaagactccgagatcattcgttcaccattccatcaatacaccaaggatctgcttataaacatctctcagtctcctaccaagtgaaccatgcatgcagtttccaaatcttaataatcagatcattatatgcaataatctcatttcctgcttccgcaaaatctctggagtctttttatatgtaatatgcgatctctataatttttaaaaagtatctatcttgtcaaat

SEQ ID NO: 24496 - protein, 479 aa, Arabidopsis thaliana
  peptide (1)..(479): Ceres Seq. ID no. 12371838
  misc_feature (4)..(465): Homolog of NCBI NO: 30682922 NR Description: cytochrome P450, putative [Arabidopsis thaliana]
  misc_feature (1)..(477): Homolog of NCBI NO: 15222806 NR Description: cytochrome P450, putative; protein id:
  misc_feature (370)..(479): Homolog of NCBI NO: 15230572 NR Description: cytochrome P450 - like protein; protein id:
  misc_feature (1)..(345): Homolog of NCBI NO: 15230572 NR Description: cytochrome P450 - like protein; protein id:
  misc_feature (1)..(476): Homolog of NCBI NO: 30695352 NR Description: cytochrome p450 family [Arabidopsis thaliana]
  misc_feature (1)..(476): Homolog of NCBI NO: 22530982 NR Description: cytochrome P450-like protein [Arabidopsis
  misc_feature (1)..(476): Homolog of NCBI NO: 30695347 NR Description: cytochrome p450 family [Arabidopsis thaliana]
  misc_feature (402)..(479): Homolog of NCBI NO: 25282639 NR Description: hypothetical protein T30F21.17 [imported] -
  misc_feature (1)..(370): Homolog of NCBI NO: 25282639 NR Description: hypothetical protein T30F21.17 [imported] -
  misc_feature (1)..(479): Homolog of NCBI NO: 15218388 NR Description: cytochrome P450, putative
MSSIWNVAMLMVALVVVRISHWLYRWSNPKCPGKLPPGSMGFPIIGETLDFFKPCGVEGIPTFVKKRMIRYGPLFRTNIFGSKTVVSTDPDVIHQIFRQENTSFELGYPDIFVKVFGKDNLFLKEVFIHKYLQKITMQILGSEGLKQTMLGNMDKATRDHIRSIASQGSFNVRKEVENLVVAYMTPKLISNLKPETQSKLIDNLNAFNLDWFKSFLRLSTWKAVTKALKSREEAIQVMKDVLMMRKETREKQEDFLNTLLEELEKDGSFFDQGSAINLIFLLAFALREGTSSCTALAVKFISKDPKVLAELKREHKAIVDNRKDKEAGVSWEEYRHNMTFTNMVSNEVLRLANTTPLLFRKAVQDVEIKGYTIPAGWIVAVAPSAVHFDPAIYENPFEFNPWRWEGKEMIWGSKTFMAFGYGVRLCVGAEFSRLQMAIFLHHLVAYYDFSMVQDSEIIRSPFHQYTKDLLINISQSPTK

SEQ ID NO: 24497 - protein, 471 aa, Arabidopsis thaliana
  peptide (1)..(471): Ceres Seq. ID no. 12371839
  misc_feature (1)..(457): Homolog of NCBI NO: 30682922 NR Description: cytochrome P450, putative [Arabidopsis thaliana]
  misc_feature (1)..(469): Homolog of NCBI NO: 15222806 NR Description: cytochrome P450, putative; protein id:
  misc_feature (362)..(471): Homolog of NCBI NO: 15230572 NR Description: cytochrome P450 - like protein; protein id:
  misc_feature (1)..(337): Homolog of NCBI NO: 15230572 NR Description: cytochrome P450 - like protein; protein id:
  misc_feature (1)..(468): Homolog of NCBI NO: 30695352 NR Description: cytochrome p450 family [Arabidopsis thaliana]
  misc_feature (1)..(468): Homolog of NCBI NO: 22530982 NR Description: cytochrome P450-like protein [Arabidopsis
  misc_feature (1)..(468): Homolog of NCBI NO: 30695347 NR Description: cytochrome p450 family [Arabidopsis thaliana]
  misc_feature (394)..(471): Homolog of NCBI NO: 25282639 NR Description: hypothetical protein T30F21.17 [imported] -
  misc_feature (1)..(362): Homolog of NCBI NO: 25282639 NR Description: hypothetical protein T30F21.17 [imported] -
  misc_feature (1)..(471): Homolog of NCBI NO: 15218388 NR Description: cytochrome P450, putative
MLMVALVVVRISHWLYRWSNPKCPGKLPPGSMGFPIIGETLDFFKPCGVEGIPTFVKKRMIRYGPLFRTNIFGSKTVVSTDPDVIHQIFRQENTSFELGYPDIFVKVFGKDNLFLKEVFIHKYLQKITMQILGSEGLKQTMLGNMDKATRDHIRSIASQGSFNVRKEVENLVVAYMTPKLISNLKPETQSKLIDNLNAFNLDWFKSFLRLSTWKAVTKALKSREEAIQVMKDVLMMRKETREKQEDFLNTLLEELEKDGSFFDQGSAINLIFLLAFALREGTSSCTALAVKFISKDPKVLAELKREHKAIVDNRKDKEAGVSWEEYRHNMTFTNMVSNEVLRLANTTPLLFRKAVQDVEIKGYTIPAGWIVAVAPSAVHFDPAIYENPFEFNPWRWEGKEMIWGSKTFMAFGYGVRLCVGAEFSRLQMAIFLHHLVAYYDFSMVQDSEIIRSPFHQYTKDLLINISQSPTK

SEQ ID NO: 24498 - protein, 469 aa, Arabidopsis thaliana
  peptide (1)..(469): Ceres Seq. ID no. 12371840
  misc_feature (1)..(466): Homolog of NCBI NO: 30695347 NR Description: cytochrome p450 family [Arabidopsis thaliana]
  misc_feature (392)..(469): Homolog of NCBI NO: 25282639 NR Description: hypothetical protein T30F21.17 [imported] -
  misc_feature (1)..(360): Homolog of NCBI NO: 25282639 NR Description: hypothetical protein T30F21.17 [imported] -
  misc_feature (1)..(469): Homolog of NCBI NO: 15218388 NR Description: cytochrome P450, putative
  misc_feature (1)..(455): Homolog of NCBI NO: 30682922 NR Description: cytochrome P450, putative [Arabidopsis thaliana]
  misc_feature (1)..(467): Homolog of NCBI NO: 15222806 NR Description: cytochrome P450, putative; protein id:
  misc_feature (360)..(469): Homolog of NCBI NO: 15230572 NR Description: cytochrome P450 - like protein; protein id:
  misc_feature (1)..(335): Homolog of NCBI NO: 15230572 NR Description: cytochrome P450 - like protein; protein id:
  misc_feature (1)..(466): Homolog of NCBI NO: 30695352 NR Description: cytochrome p450 family [Arabidopsis thaliana]
  misc_feature (1)..(466): Homolog of NCBI NO: 22530982 NR Description: cytochrome P450-like protein [Arabidopsis
MVALVVVRISHWLYRWSNPKCPGKLPPGSMGFPIIGETLDFFKPCGVEGIPTFVKKRMIRYGPLFRTNIFGSKTVVSTDPDVIHQIFRQENTSFELGYPDIFVKVFGKDNLFLKEVFIHKYLQKITMQILGSEGLKQTMLGNMDKATRDHIRSIASQGSFNVRKEVENLVVAYMTPKLISNLKPETQSKLIDNLNAFNLDWFKSFLRLSTWKAVTKALKSREEAIQVMKDVLMMRKETREKQEDFLNTLLEELEKDGSFFDQGSAINLIFLLAFALREGTSSCTALAVKFISKDPKVLAELKREHKAIVDNRKDKEAGVSWEEYRHNMTFTNMVSNEVLRLANTTPLLFRKAVQDVEIKGYTIPAGWIVAVAPSAVHFDPAIYENPFEFNPWRWEGKEMIWGSKTFMAFGYGVRLCVGAEFSRLQMAIFLHHLVAYYDFSMVQDSEIIRSPFHQYTKDLLINISQSPTK

SEQ ID NO: 24499 - DNA, 1492 bp, Arabidopsis thaliana
  misc_feature (1)..(1492): Ceres Seq. ID no. 13487939
  misc_feature: MA Experiment ID: 108434 Result: Up-regulated in Transcription
  misc_feature: MA Experiment 108434 PARAMETER Experiment Name: At_Root_Tips_cDNA_P Parameter: Tissue Value: Root Tips
  misc_feature: MA Experiment ID: 108461 Result: Up-regulated in Transcription
  misc_feature: MA Experiment 108461 PARAMETER Experiment Name: At_Germinating_Seeds_cDNA_P Parameter: Age (day) Value: 1 vs. 0
  misc_feature: MA Experiment 108461 PARAMETER Experiment Name: At_Germinating_Seeds_cDNA_P Parameter: Tissue Value: Germinating Seeds
  misc_feature: MA Experiment ID: 108462 Result: Up-regulated in Transcription
  misc_feature: MA Experiment 108462 PARAMETER Experiment Name: At_Germinating_Seeds_cDNA_P Parameter: Age (day) Value: 2 vs. 0
  misc_feature: MA Experiment 108462 PARAMETER Experiment Name: At_Germinating_Seeds_cDNA_P Parameter: Tissue Value: Germinating Seeds
  misc_feature: MA Experiment ID: 108463 Result: Up-regulated in Transcription
  misc_feature: MA Experiment 108463 PARAMETER Experiment Name: At_Germinating_Seeds_cDNA_P Parameter: Age (day) Value: 3 vs. 0
  misc_feature: MA Experiment 108463 PARAMETER Experiment Name: At_Germinating_Seeds_cDNA_P Parameter: Tissue Value: Germinating Seeds
  misc_feature: MA Experiment ID: 108464 Result: Up-regulated in Transcription
  misc_feature: MA Experiment 108464 PARAMETER Experiment Name: At_Germinating_Seeds_cDNA_P Parameter: Age (day) Value: 4 vs. 0
  misc_feature: MA Experiment 108464 PARAMETER Experiment Name: At_Germinating_Seeds_cDNA_P Parameter: Tissue Value: Germinating Seeds
  misc_feature: MA Experiment ID: 108569 Result: Up-regulated in Transcription
  misc_feature: MA Experiment 108569 PARAMETER Experiment Name: At_0.001%_MeJA__cDNA_P Parameter: Timepoint (hr) Value: 6
  misc_feature: MA Experiment 108569 PARAMETER Experiment Name: At_0.001%_MeJA__cDNA_P Parameter: Tissue Value: Aerial
  misc_feature: MA Experiment 108569 PARAMETER Experiment Name: At_0.001%_MeJA__cDNA_P Parameter: Treatment Value: 0.001% MeJA vs. No Treatment
  misc_feature: MA Experiment ID: 108573 Result: Up-regulated in Transcription
  misc_feature: MA Experiment 108573 PARAMETER Experiment Name: At_Drought_cDNA_P Parameter: Timepoint (hr) Value: 6
  misc_feature: MA Experiment 108573 PARAMETER Experiment Name: At_Drought_cDNA_P Parameter: Tissue Value: Aerial
  misc_feature: MA Experiment 108573 PARAMETER Experiment Name: At_Drought_cDNA_P Parameter: Treatment Value: Drought vs. No Drought
  misc_feature: MA Experiment ID: 108576 Result: Up-regulated in Transcription
  misc_feature: MA Experiment 108576 PARAMETER Experiment Name: At_42deg_Heat_cDNA_P Parameter: Temperature (deg C) Value: 42 vs. 22
  misc_feature: MA Experiment 108576 PARAMETER Experiment Name: At_42deg_Heat_cDNA_P Parameter: Timepoint (hr) Value: 1
  misc_feature: MA Experiment 108576 PARAMETER Experiment Name: At_42deg_Heat_cDNA_P Parameter: Tissue Value: Aerial
  misc_feature: MA Experiment ID: 108577 Result: Up-regulated in Transcription
  misc_feature: MA Experiment 108577 PARAMETER Experiment Name: At_42deg_Heat_cDNA_P Parameter: Temperature (deg C) Value: 42 vs. 22
  misc_feature: MA Experiment 108577 PARAMETER Experiment Name: At_42deg_Heat_cDNA_P Parameter: Timepoint (hr) Value: 6
  misc_feature: MA Experiment 108577 PARAMETER Experiment Name: At_42deg_Heat_cDNA_P Parameter: Tissue Value: Aerial
  misc_feature: MA Experiment ID: 108579 Result: Down-regulated in Transcription
  misc_feature: MA Experiment 108579 PARAMETER Experiment Name: At_4deg_Cold_cDNA_P Parameter: Temperature (deg C) Value: 4 vs. 22
  misc_feature: MA Experiment 108579 PARAMETER Experiment Name: At_4deg_Cold_cDNA_P Parameter: Timepoint (hr) Value: 6
  misc_feature: MA Experiment 108579 PARAMETER Experiment Name: At_4deg_Cold_cDNA_P Parameter: Tissue Value: Aerial
  misc_feature: MA Experiment ID: 108595 Result: Down-regulated in Transcription
  misc_feature: MA Experiment 108595 PARAMETER Experiment Name: At_Ler-pi_Ovule_cDNA_P Parameter: Plant Line Value: null
  misc_feature: MA Experiment ID: 20000087 Result: Down-regulated in Transcription
  misc_feature: MA Experiment 20000087 PARAMETER Experiment Name: At_100uM_ABA_Mutants_cDNA_P Parameter: Plant Line Value: WS
  misc_feature: MA Experiment 20000087 PARAMETER Experiment Name: At_100uM_ABA_Mutants_cDNA_P Parameter: Timepoint (hr) Value: 6
  misc_feature: MA Experiment 20000087 PARAMETER Experiment Name: At_100uM_ABA_Mutants_cDNA_P Parameter: Tissue Value: Aerial
  misc_feature: MA Experiment 20000087 PARAMETER Experiment Name: At_100uM_ABA_Mutants_cDNA_P Parameter: Treatment Value: 100uM ABA vs. No Treatment
  misc_feature: MA Experiment ID: 20000093 Result: Up-regulated in Transcription
  misc_feature: MA Experiment 20000093 PARAMETER Experiment Name: At_42deg_Heat_cDNA_P Parameter: Temperature (deg C) Value: 42 vs. 22
  misc_feature: MA Experiment 20000093 PARAMETER Experiment Name: At_42deg_Heat_cDNA_P Parameter: Timepoint (hr) Value: 0.5
  misc_feature: MA Experiment 20000093 PARAMETER Experiment Name: At_42deg_Heat_cDNA_P Parameter: Tissue Value: Aerial
  misc_feature: MA Experiment ID: 20000112 Result: Up-regulated in Transcription
  misc_feature: MA Experiment 20000112 PARAMETER Experiment Name: At_42deg_Heat_cDNA_P Parameter: Temperature (deg C) Value: 42 vs. 22
  misc_feature: MA Experiment 20000112 PARAMETER Experiment Name: At_42deg_Heat_cDNA_P Parameter: Timepoint (hr) Value: 2
  misc_feature: MA Experiment 20000112 PARAMETER Experiment Name: At_42deg_Heat_cDNA_P Parameter: Tissue Value: Aerial
  misc_feature: MA Experiment ID: 20000113 Result: Up-regulated in Transcription
  misc_feature: MA Experiment 20000113 PARAMETER Experiment Name: At_42deg_Heat_cDNA_P Parameter: Temperature (deg C) Value: 42 vs. 22
  misc_feature: MA Experiment 20000113 PARAMETER Experiment Name: At_42deg_Heat_cDNA_P Parameter: Timepoint (hr) Value: 8
  misc_feature: MA Experiment 20000113 PARAMETER Experiment Name: At_42deg_Heat_cDNA_P Parameter: Tissue Value: Aerial
  misc_feature: MA Experiment ID: 20000144 Result: Up-regulated in Transcription
  misc_feature: MA Experiment 20000144 PARAMETER Experiment Name: At_42deg_Heat_cDNA_P Parameter: Temperature (deg C) Value: 42 vs. 22
  misc_feature: MA Experiment 20000144 PARAMETER Experiment Name: At_42deg_Heat_cDNA_P Parameter: Timepoint (hr) Value: 1
  misc_feature: MA Experiment 20000144 PARAMETER Experiment Name: At_42deg_Heat_cDNA_P Parameter: Tissue Value: Aerial
  misc_feature: MA Experiment ID: 20000171 Result: Up-regulated in Transcription
  misc_feature: MA Experiment 20000171 PARAMETER Experiment Name: At_42deg_Heat_P Parameter: Age (day) Value: 14
  misc_feature: MA Experiment 20000171 PARAMETER Experiment Name: At_42deg_Heat_P Parameter: Organism Value: A. thaliana
  misc_feature: MA Experiment 20000171 PARAMETER Experiment Name: At_42deg_Heat_P Parameter: Plant Line Value: WS
  misc_feature: MA Experiment 20000171 PARAMETER Experiment Name: At_42deg_Heat_P Parameter: Temperature (deg C) Value: 42 vs. 22
  misc_feature: MA Experiment 20000171 PARAMETER Experiment Name: At_42deg_Heat_P Parameter: Timepoint (hr) Value: 1
  misc_feature: MA Experiment 20000171 PARAMETER Experiment Name: At_42deg_Heat_P Parameter: Tissue Value: Aerial
  misc_feature: MA Experiment ID: 20000173 Result: Up-regulated in Transcription
  misc_feature: MA Experiment 20000173 PARAMETER Experiment Name: At_42deg_Heat_P Parameter: Age (day) Value: 14
  misc_feature: MA Experiment 20000173 PARAMETER Experiment Name: At_42deg_Heat_P Parameter: Organism Value: A. thaliana
  misc_feature: MA Experiment 20000173 PARAMETER Experiment Name: At_42deg_Heat_P Parameter: Plant Line Value: WS
  misc_feature: MA Experiment 20000173 PARAMETER Experiment Name: At_42deg_Heat_P Parameter: Temperature (deg C) Value: 42 vs. 22
  misc_feature: MA Experiment 20000173 PARAMETER Experiment Name: At_42deg_Heat_P Parameter: Timepoint (hr) Value: 6
  misc_feature: MA Experiment 20000173 PARAMETER Experiment Name: At_42deg_Heat_P Parameter: Tissue Value: Aerial
  misc_feature: MA Experiment ID: 20000179 Result: Up-regulated in Transcription
  misc_feature: MA Experiment 20000179 PARAMETER Experiment Name: At_Germinating_Seeds_P Parameter: Age (hr) Value: 6 vs. 0
  misc_feature: MA Experiment 20000179 PARAMETER Experiment Name: At_Germinating_Seeds_P Parameter: Tissue Value: Germinating Seeds
  misc_feature: MA Experiment ID: 20000180 Result: Up-regulated in Transcription
  misc_feature: MA Experiment 20000180 PARAMETER Experiment Name: At_Germinating_Seeds_P Parameter: Age (hr) Value: 24 vs. 0
  misc_feature: MA Experiment 20000180 PARAMETER Experiment Name: At_Germinating_Seeds_P Parameter: Tissue Value: Germinating Seeds
  misc_feature: MA Experiment ID: 20000794 Result: Down-regulated in Transcription
  misc_feature: MA Experiment 20000794 PARAMETER Experiment Name: At_Petals_P Parameter: Age (day) Value: 23-25 days
  misc_feature: MA Experiment 20000794 PARAMETER Experiment Name: At_Petals_P Parameter: Plant Line Value: WS
  misc_feature: MA Experiment 20000794 PARAMETER Experiment Name: At_Petals_P Parameter: Tissue Value: Petals vs. Whole plant
  misc_feature: MA Experiment ID: 20001248 Result: Up-regulated in Transcription
  misc_feature: MA Experiment 20001248 PARAMETER Experiment Name: At_Far-red-induction_P Parameter: Age (day) Value: 7
  misc_feature: MA Experiment 20001248 PARAMETER Experiment Name: At_Far-red-induction_P Parameter: Light Value: Far-red vs. White
  misc_feature: MA Experiment 20001248 PARAMETER Experiment Name: At_Far-red-induction_P Parameter: Organism Value: A. thaliana
  misc_feature: MA Experiment 20001248 PARAMETER Experiment Name: At_Far-red-induction_P Parameter: Plant Line Value: Columbia
  misc_feature: MA Experiment 20001248 PARAMETER Experiment Name: At_Far-red-induction_P Parameter: Timepoint (hr) Value: 4
  misc_feature: MA Experiment 20001248 PARAMETER Experiment Name: At_Far-red-induction_P Parameter: Tissue Value: Whole Plant
  misc_feature: MA Experiment ID: 20001450 Result: Up-regulated in Transcription
  misc_feature: MA Experiment 20001450 PARAMETER Experiment Name: At_Far-red-induction_P Parameter: Age (day) Value: 7
  misc_feature: MA Experiment 20001450 PARAMETER Experiment Name: At_Far-red-induction_P Parameter: Light Value: Far-red vs. White
  misc_feature: MA Experiment 20001450 PARAMETER Experiment Name: At_Far-red-induction_P Parameter: Organism Value: A. thaliana
  misc_feature: MA Experiment 20001450 PARAMETER Experiment Name: At_Far-red-induction_P Parameter: Plant Line Value: Columbia
  misc_feature: MA Experiment 20001450 PARAMETER Experiment Name: At_Far-red-induction_P Parameter: Timepoint (hr) Value: 8
  misc_feature: MA Experiment 20001450 PARAMETER Experiment Name: At_Far-red-induction_P Parameter: Tissue Value: Whole Plant
  misc_feature: MA Experiment ID: 20001451 Result: Up-regulated in Transcription
  misc_feature: MA Experiment 20001451 PARAMETER Experiment Name: At_Far-red-induction_P Parameter: Age (day) Value: 7
  misc_feature: MA Experiment 20001451 PARAMETER Experiment Name: At_Far-red-induction_P Parameter: Light Value: Far-red vs. White
  misc_feature: MA Experiment 20001451 PARAMETER Experiment Name: At_Far-red-induction_P Parameter: Organism Value: A. thaliana
  misc_feature: MA Experiment 20001451 PARAMETER Experiment Name: At_Far-red-induction_P Parameter: Plant Line Value: Columbia
  misc_feature: MA Experiment 20001451 PARAMETER Experiment Name: At_Far-red-induction_P Parameter: Timepoint (hr) Value: 24
  misc_feature: MA Experiment 20001451 PARAMETER Experiment Name: At_Far-red-induction_P Parameter: Tissue Value: Whole Plant
ccacgcgtccgccgctcttctccactcttcttctctgttctatcgcagacatttttgtttatatgcatacataataataatacactcttgtcaggatttttgattctctctttggttttctcggaaaaatgtctgcgatactccaaggagctggagctgcaacggctctctcgccgtttaattctatcgattccaacaaactcgttgctccttctcgctcttctctttcagtgaggagcaagagatacattgttgccggatctgatagtaaaagctttggttctagcctcgtagctcgtcgctctgagccgttgataccaaatgctgttacgacgaaggcggacactgctgcgagctctacttcatcaaagcctggacatgagctattacttttcgaggctcttcaagaaggtctagaagaagagatggacagagatccacatgtatgtgtcatgggtgaagatgtaggccattacggaggctcatacaaagtaactaaaggcctagctgataagtttggcgatctcagggttctggacactccaatctgtgaaaacgccttcaccggtatgggcattggagccgccatgacaggactaagacccgtcatcgaaggtatgaacatggggtttctactcttagccttcaaccaaatctccaacaactgtggtatgcttcactatacatccggtggtcaattcactatcccggttgttatccgtgggcctggaggtgtgggccggcagctcggagccgagcattcccagcgtctcgagtcttacttccagtcaatccctgggatccagatggtggcttgctcaacaccttacaacgctaaaggattgatgaaagcggcgataagaagtgagaatcctgtgattctgtttgaacacgttctgctctataacctcaaggagagtattccggatgaagaatacatatgtaatctggaagaagcagaaatggtcagacccggtgaacacatcacgatactgacgtattcaaggatgaggtaccatgtaatgcaggctgcaaagacgctggtgaacaaagggtatgatccagaggttatcgacataaggtcgttgaagccgtttgatctctacacaattggaaactcggtgaagaagacacaccgggttttgattgtggaggaatgtatgagaacgggaggaatcggagccagtttgacggctgcaataaacgagaactttcatgattacttagatgctccggtgatgtgtttgtcttctcaggatgtcccaactccttacgccggtacattggaagaatggacggttgttcagccagctcagatcgtcactgccgtcgaacaactttgccagtaattgctttttttacggtgattgtgttttacccttttttactttttgttactgtttgtcttcgatggaaaatgcttgtgaaatgaaaactctgaattttactcttatgatatgagcatttatattttctatagataataacttcc

SEQ ID NO: 24500 - protein, 406 aa, Arabidopsis thaliana
  peptide (1)..(406): Ceres Seq. ID no. 13487940
  misc_feature (275)..(397): Pfam Name: Transketolase, C-terminal domain Pfam Description: Transketolase, C-terminal domain
  misc_feature (85)..(404): Homolog of NCBI NO: 16330037 NR Description: pyruvate dehydrogenase E1 beta subunit
  misc_feature (85)..(404): Homolog of NCBI NO: 23041427 NR Description: hypothetical protein [Trichodesmium erythraeum
  misc_feature (85)..(404): Homolog of NCBI NO: 17227618 NR Description: pyruvate dehydrogenase E1 beta subunit [Nostoc
  misc_feature (85)..(406): Homolog of NCBI NO: 22297748 NR Description: pyruvate dehydrogenase E1 component beta subunit
  misc_feature (85)..(406): Homolog of NCBI NO: 22711921 NR Description: pyruvate dehydrogenase E1 component beta subunit
  misc_feature (120)..(406): Homolog of NCBI NO: 2982328 NR Description: pyruvate dehydrogenase E1 beta subunit [Picea
  misc_feature (1)..(406): Homolog of NCBI NO: 15220670 NR Description: pyruvate dehydrogenase E1 beta subunit -related
  misc_feature (1)..(406): Homolog of NCBI NO: 2454184 NR Description: pyruvate dehydrogenase E1 beta subunit
  misc_feature (1)..(406): Homolog of NCBI NO: 21593379 NR Description: putative pyruvate dehydrogenase E1 beta subunit
  misc_feature (1)..(406): Homolog of NCBI NO: 15226781 NR Description: pyruvate dehydrogenase E1 beta subunit -related
MSAILQGAGAATALSPFNSIDSNKLVAPSRSSLSVRSKRYIVAGSDSKSFGSSLVARRSEPLIPNAVTTKADTAASSTSSKPGHELLLFEALQEGLEEEMDRDPHVCVMGEDVGHYGGSYKVTKGLADKFGDLRVLDTPICENAFTGMGIGAAMTGLRPVIEGMNMGFLLLAFNQISNNCGMLHYTSGGQFTIPVVIRGPGGVGRQLGAEHSQRLESYFQSIPGIQMVACSTPYNAKGLMKAAIRSENPVILFEHVLLYNLKESIPDEEYICNLEEAEMVRPGEHITILTYSRMRYHVMQAAKTLVNKGYDPEVIDIRSLKPFDLYTIGNSVKKTHRVLIVEECMRTGGIGASLTAAINENFHDYLDAPVMCLSSQDVPTPYAGTLEEWTVVQPAQIVTAVEQLCQ

SEQ ID NO: 24501 - protein, 307 aa, Arabidopsis thaliana
  peptide (1)..(307): Ceres Seq. ID no. 13487941
  misc_feature (176)..(298): Pfam Name: Transketolase, C-terminal domain Pfam Description: Transketolase, C-terminal domain
  misc_feature (1)..(305): Homolog of NCBI NO: 16330037 NR Description: pyruvate dehydrogenase E1 beta subunit
  misc_feature (1)..(305): Homolog of NCBI NO: 23041427 NR Description: hypothetical protein [Trichodesmium erythraeum
  misc_feature (1)..(305): Homolog of NCBI NO: 17227618 NR Description: pyruvate dehydrogenase E1 beta subunit [Nostoc
  misc_feature (1)..(307): Homolog of NCBI NO: 22297748 NR Description: pyruvate dehydrogenase E1 component beta subunit
  misc_feature (1)..(307): Homolog of NCBI NO: 22711921 NR Description: pyruvate dehydrogenase E1 component beta subunit
  misc_feature (21)..(307): Homolog of NCBI NO: 2982328 NR Description: pyruvate dehydrogenase E1 beta subunit [Picea
  misc_feature (1)..(307): Homolog of NCBI NO: 15220670 NR Description: pyruvate dehydrogenase E1 beta subunit -related
  misc_feature (1)..(307): Homolog of NCBI NO: 2454184 NR Description: pyruvate dehydrogenase E1 beta subunit
  misc_feature (1)..(307): Homolog of NCBI NO: 21593379 NR Description: putative pyruvate dehydrogenase E1 beta subunit
  misc_feature (1)..(307): Homolog of NCBI NO: 15226781 NR Description: pyruvate dehydrogenase E1 beta subunit -related
MDRDPHVCVMGEDVGHYGGSYKVTKGLADKFGDLRVLDTPICENAFTGMGIGAAMTGLRPVIEGMNMGFLLLAFNQISNNCGMLHYTSGGQFTIPVVIRGPGGVGRQLGAEHSQRLESYFQSIPGIQMVACSTPYNAKGLMKAAIRSENPVILFEHVLLYNLKESIPDEEYICNLEEAEMVRPGEHITILTYSRMRYHVMQAAKTLVNKGYDPEVIDIRSLKPFDLYTIGNSVKKTHRVLIVEECMRTGGIGASLTAAINENFHDYLDAPVMCLSSQDVPTPYAGTLEEWTVVQPAQIVTAVEQLCQ

SEQ ID NO: 24502 - protein, 298 aa, Arabidopsis thaliana
  peptide (1)..(298): Ceres Seq. ID no. 13487942
  misc_feature (167)..(289): Pfam Name: Transketolase, C-terminal domain Pfam Description: Transketolase, C-terminal domain
  misc_feature (1)..(296): Homolog of NCBI NO: 16330037 NR Description: pyruvate dehydrogenase E1 beta subunit
  misc_feature (1)..(296): Homolog of NCBI NO: 23041427 NR Description: hypothetical protein [Trichodesmium erythraeum
  misc_feature (1)..(296): Homolog of NCBI NO: 17227618 NR Description: pyruvate dehydrogenase E1 beta subunit [Nostoc
  misc_feature (1)..(298): Homolog of NCBI NO: 22297748 NR Description: pyruvate dehydrogenase E1 component beta subunit
  misc_feature (1)..(298): Homolog of NCBI NO: 22711921 NR Description: pyruvate dehydrogenase E1 component beta subunit
  misc_feature (12)..(298): Homolog of NCBI NO: 2982328 NR Description: pyruvate dehydrogenase E1 beta subunit [Picea
  misc_feature (1)..(298): Homolog of NCBI NO: 15220670 NR Description: pyruvate dehydrogenase E1 beta subunit -related
  misc_feature (1)..(298): Homolog of NCBI NO: 2454184 NR Description: pyruvate dehydrogenase E1 beta subunit
  misc_feature (1)..(298): Homolog of NCBI NO: 21593379 NR Description: putative pyruvate dehydrogenase E1 beta subunit
  misc_feature (1)..(298): Homolog of NCBI NO: 15226781 NR Description: pyruvate dehydrogenase E1 beta subunit -related
MGEDVGHYGGSYKVTKGLADKFGDLRVLDTPICENAFTGMGIGAAMTGLRPVIEGMNMGFLLLAFNQISNNCGMLHYTSGGQFTIPVVIRGPGGVGRQLGAEHSQRLESYFQSIPGIQMVACSTPYNAKGLMKAAIRSENPVILFEHVLLYNLKESIPDEEYICNLEEAEMVRPGEHITILTYSRMRYHVMQAAKTLVNKGYDPEVIDIRSLKPFDLYTIGNSVKKTHRVLIVEECMRTGGIGASLTAAINENFHDYLDAPVMCLSSQDVPTPYAGTLEEWTVVQPAQIVTAVEQLCQ

SEQ ID NO: 24503 - DNA, 2091 bp, Arabidopsis thaliana
  misc_feature (1)..(2091): Ceres Seq. ID no. 12329923
  misc_feature: MA Experiment ID: 20000113 Result: Down-regulated in Transcription
  misc_feature: MA Experiment 20000113 PARAMETER Experiment Name: At_42deg_Heat_cDNA_P Parameter: Temperature (deg C) Value: 42 vs. 22
  misc_feature: MA Experiment 20000113 PARAMETER Experiment Name: At_42deg_Heat_cDNA_P Parameter: Timepoint (hr) Value: 8
  misc_feature: MA Experiment 20000113 PARAMETER Experiment Name: At_42deg_Heat_cDNA_P Parameter: Tissue Value: Aerial
  misc_feature: MA Experiment ID: 20000227 Result: Up-regulated in Transcription
  misc_feature: MA Experiment 20000227 PARAMETER Experiment Name: At_Root-Tips-vs-Tops_P Parameter: Tissue Value: Root Tips vs. Root Tops
attttttcgcgtcttcactgttgtggatttcttctgaatcttctgagctcgcttcacctacaagaagacaacaaggatcattttctctagattccagatcctgaagaaggtgaaatcttatctgtgatccagtggaagattgaatcaagtaacggattcacttagttcacttgcgtattgcatgcccctgaagataacattttgaataatgttgatattgaattatcacctataagctctggttcttgttgcttgtattggttctgggtatctactagtgaagaaaccatggcttttggttctcctaggaataattctatattagctgcggctggatttcctcggaaagtgtctacagttgcaattgctattggtggtttggcatcattctttgttttcggattgttgcttcgtctttcgtatccgaatagttcttcagttggtggcatattttatgggatagggaatcctgaacaagttcatgtccctttatctttgagcaaccatactgtcaatatccttcagaagagtagtgacatcaatgcgtttgataaaaatctgacttctgattctagctctggcttacctgttgttgttagcaaaagtataccacctccagatttcagtagtgataggaagttggagacacctttgacacaagaaaaagaggatttggtttcttcggatataactgaaaagactgatgttcaatcaggtgaacgtgaaaccaatgtttccaaggctgaagacactccaagtgcatcatctcctccagatgatgtctctgaaactgcttcagcagaaccagagtgtgatttgtatcaaggtagttggttttatgatcctgggggacctctctacacgaacaactcttgccctgtcctgacgcagatgcagaattgccagggaaatggaagacctgacaagggatatgagaactggagatggaaaccgtctcagtgtgagcttcctcggtttgatgccagaaaatttcttgaacttatgaaaggcaagacactggcctttataggagattcagtagctcgtaatcagatggagtccatgttgtgccttctttggcaggttgaaacaccagtcaatcgtgggagccgaaagatgcagagatggtattttaagcaatcatcagtaatgattgcccgtatttggtcatcttggcttgttcatcagttcaacgaaaaattcgattatgctcctgaaggtgtcacaaaactaaagctggatcttcctgatgagcgcataatggaagctatcccgaaattcgacgtggttgtcctctcatcagggcactggtttgcaaagcagtctgtctacatattgaaagaagagatcgtgggaggccaattatggtggccagacaaatcaaaacccatgaaagtcaataacgtggatgcatttggaatatcagttgaaacaatccttaagtccatggctacacacccgaactacagcggtttgaccattgtgagaacattctcacctgatcattacgaaggtggtgcttggaacacaggtggatcatgcacggggaaagaagaacccatccttccagggaagctagtgaaaaacggattcacagagataatgcatgagaagcaagcgacaggatataaccaagccgtcgataaagtcgcggagaatttgaagctaaaactaaagctgatggatatcacagaggcatttggatatcgccatgatggtcatcctggtccattcagaagtcctgaccctaacaagatcactaaacggggaccagacggacggcctccacctcaggactgcttgcactggtgcatgccaggaccagtcgatacatggaacgaaatggtcttggagctcataaggagagacaggaaaagctcatcaacttgacttggtttgaaactcaaaggatgagagagcatattacacgacttatactattaatctgattcttggttactgataaactcaaagataaactcacttgtagatttgtgctaggcacggtgagttaggattagaatttgttccactatacttgttggttcgtttgtcctgagattgaaatttaagatttgggagttatgagtc

SEQ ID NO: 24504 - protein, 533 aa, Arabidopsis thaliana
  peptide (1)..(533): Ceres Seq. ID no. 12329924
  misc_feature (342)..(524): Pfam Name: Arabidopsis proteins of unknown function Pfam Description: Arabidopsis proteins of unknown function
  misc_feature (155)..(529): Homolog of NCBI NO: 30678135 NR Description: expressed protein [Arabidopsis thaliana]
  misc_feature (174)..(524): Homolog of NCBI NO: 30686312 NR Description: expressed protein [Arabidopsis thaliana]
  misc_feature (174)..(524): Homolog of NCBI NO: 7486743 NR Description: hypothetical protein F9D16.260 - Arabidopsis
  misc_feature (42)..(527): Homolog of NCBI NO: 15237211 NR Description: putative protein; protein id: At5g15890.1
  misc_feature (147)..(528): Homolog of NCBI NO: 15237044 NR Description: putative protein; protein id: At4g11090.1
  misc_feature (141)..(527): Homolog of NCBI NO: 34906936 NR Description: leaf senescence related protein-like
  misc_feature (1)..(95): Homolog of NCBI NO: 15242138 NR Description: putative protein
  misc_feature (108)..(531): Homolog of NCBI NO: 15242138 NR Description: putative protein
  misc_feature (1)..(533): Homolog of NCBI NO: 7487578 NR Description: hypothetical protein T30C3.30 - Arabidopsis
  misc_feature (1)..(533): Homolog of NCBI NO: 22328922 NR Description: putative protein
MAFGSPRNNSILAAAGFPRKVSTVAIAIGGLASFFVFGLLLRLSYPNSSSVGGIFYGIGNPEQVHVPLSLSNHTVNILQKSSDINAFDKNLTSDSSSGLPVVVSKSIPPPDFSSDRKLETPLTQEKEDLVSSDITEKTDVQSGERETNVSKAEDTPSASSPPDDVSETASAEPECDLYQGSWFYDPGGPLYTNNSCPVLTQMQNCQGNGRPDKGYENWRWKPSQCELPRFDARKFLELMKGKTLAFIGDSVARNQMESMLCLLWQVETPVNRGSRKMQRWYFKQSSVMIARIWSSWLVHQFNEKFDYAPEGVTKLKLDLPDERIMEAIPKFDVVVLSSGHWFAKQSVYILKEEIVGGQLWWPDKSKPMKVNNVDAFGISVETILKSMATHPNYSGLTIVRTFSPDHYEGGAWNTGGSCTGKEEPILPGKLVKNGFTEIMHEKQATGYNQAVDKVAENLKLKLKLMDITEAFGYRHDGHPGPFRSPDPNKITKRGPDGRPPPQDCLHWCMPGPVDTWNEMVLELIRRDRKSSST

SEQ ID NO: 24505 - protein, 332 aa, Arabidopsis thaliana
  peptide (1)..(332): Ceres Seq. ID no. 12329925
  misc_feature (141)..(323): Pfam Name: Arabidopsis proteins of unknown function Pfam Description: Arabidopsis proteins of unknown function
  misc_feature (1)..(323): Homolog of NCBI NO: 34911888 NR Description: OSJNBb0032K15.21 [Oryza sativa (japonica
  misc_feature (1)..(328): Homolog of NCBI NO: 30678135 NR Description: expressed protein [Arabidopsis thaliana]
  misc_feature (1)..(323): Homolog of NCBI NO: 30686312 NR Description: expressed protein [Arabidopsis thaliana]
  misc_feature (1)..(323): Homolog of NCBI NO: 7486743 NR Description: hypothetical protein F9D16.260 - Arabidopsis
  misc_feature (1)..(326): Homolog of NCBI NO: 15237211 NR Description: putative protein; protein id: At5g15890.1
  misc_feature (1)..(327): Homolog of NCBI NO: 15237044 NR Description: putative protein; protein id: At4g11090.1
  misc_feature (1)..(326): Homolog of NCBI NO: 34906936 NR Description: leaf senescence related protein-like
  misc_feature (1)..(330): Homolog of NCBI NO: 15242138 NR Description: putative protein
  misc_feature (1)..(332): Homolog of NCBI NO: 7487578 NR Description: hypothetical protein T30C3.30 - Arabidopsis
  misc_feature (1)..(332): Homolog of NCBI NO: 22328922 NR Description: putative protein
MQNCQGNGRPDKGYENWRWKPSQCELPRFDARKFLELMKGKTLAFIGDSVARNQMESMLCLLWQVETPVNRGSRKMQRWYFKQSSVMIARIWSSWLVHQFNEKFDYAPEGVTKLKLDLPDERIMEAIPKFDVVVLSSGHWFAKQSVYILKEEIVGGQLWWPDKSKPMKVNNVDAFGISVETILKSMATHPNYSGLTIVRTFSPDHYEGGAWNTGGSCTGKEEPILPGKLVKNGFTEIMHEKQATGYNQAVDKVAENLKLKLKLMDITEAFGYRHDGHPGPFRSPDPNKITKRGPDGRPPPQDCLHWCMPGPVDTWNEMVLELIRRDRKSSST

SEQ ID NO: 24506 - protein, 295 aa, Arabidopsis thaliana
  peptide (1)..(295): Ceres Seq. ID no. 12329926
  misc_feature (104)..(286): Pfam Name: Arabidopsis proteins of unknown function Pfam Description: Arabidopsis proteins of unknown function
  misc_feature (1)..(291): Homolog of NCBI NO: 30678135 NR Description: expressed protein [Arabidopsis thaliana]
  misc_feature (1)..(286): Homolog of NCBI NO: 30686312 NR Description: expressed protein [Arabidopsis thaliana]
  misc_feature (1)..(286): Homolog of NCBI NO: 7486743 NR Description: hypothetical protein F9D16.260 - Arabidopsis
  misc_feature (1)..(289): Homolog of NCBI NO: 15237211 NR Description: putative protein; protein id: At5g15890.1
  misc_feature (1)..(290): Homolog of NCBI NO: 15237044 NR Description: putative protein; protein id: At4g11090.1
  misc_feature (1)..(286): Homolog of NCBI NO: 34911888 NR Description: OSJNBb0032K15.21 [Oryza sativa (japonica
  misc_feature (1)..(289): Homolog of NCBI NO: 34906936 NR Description: leaf senescence related protein-like
  misc_feature (1)..(293): Homolog of NCBI NO: 15242138 NR Description: putative protein
  misc_feature (1)..(295): Homolog of NCBI NO: 7487578 NR Description: hypothetical protein T30C3.30 - Arabidopsis
  misc_feature (1)..(295): Homolog of NCBI NO: 22328922 NR Description: putative protein
MKGKTLAFIGDSVARNQMESMLCLLWQVETPVNRGSRKMQRWYFKQSSVMIARIWSSWLVHQFNEKFDYAPEGVTKLKLDLPDERIMEAIPKFDVVVLSSGHWFAKQSVYILKEEIVGGQLWWPDKSKPMKVNNVDAFGISVETILKSMATHPNYSGLTIVRTFSPDHYEGGAWNTGGSCTGKEEPILPGKLVKNGFTEIMHEKQATGYNQAVDKVAENLKLKLKLMDITEAFGYRHDGHPGPFRSPDPNKITKRGPDGRPPPQDCLHWCMPGPVDTWNEMVLELIRRDRKSSST

SEQ ID NO: 24507 - DNA, 1022 bp, Arabidopsis thaliana
  misc_feature (1)..(1022): Ceres Seq. ID no. 12322862
  misc_feature: MA Experiment ID: 108573 Result: Up-regulated in Transcription
  misc_feature: MA Experiment 108573 PARAMETER Experiment Name: At_Drought_cDNA_P Parameter: Timepoint (hr) Value: 6
  misc_feature: MA Experiment 108573 PARAMETER Experiment Name: At_Drought_cDNA_P Parameter: Tissue Value: Aerial
  misc_feature: MA Experiment 108573 PARAMETER Experiment Name: At_Drought_cDNA_P Parameter: Treatment Value: Drought vs. No Drought
  misc_feature: MA Experiment ID: 20000173 Result: Up-regulated in Transcription
  misc_feature: MA Experiment 20000173 PARAMETER Experiment Name: At_42deg_Heat_P Parameter: Age (day) Value: 14
  misc_feature: MA Experiment 20000173 PARAMETER Experiment Name: At_42deg_Heat_P Parameter: Organism Value: A. thaliana
  misc_feature: MA Experiment 20000173 PARAMETER Experiment Name: At_42deg_Heat_P Parameter: Plant Line Value: WS
  misc_feature: MA Experiment 20000173 PARAMETER Experiment Name: At_42deg_Heat_P Parameter: Temperature (deg C) Value: 42 vs. 22
  misc_feature: MA Experiment 20000173 PARAMETER Experiment Name: At_42deg_Heat_P Parameter: Timepoint (hr) Value: 6
  misc_feature: MA Experiment 20000173 PARAMETER Experiment Name: At_42deg_Heat_P Parameter: Tissue Value: Aerial
  misc_feature: MA Experiment ID: 20001450 Result: Up-regulated in Transcription
  misc_feature: MA Experiment 20001450 PARAMETER Experiment Name: At_Far-red-induction_P Parameter: Age (day) Value: 7
  misc_feature: MA Experiment 20001450 PARAMETER Experiment Name: At_Far-red-induction_P Parameter: Light Value: Far-red vs. White
  misc_feature: MA Experiment 20001450 PARAMETER Experiment Name: At_Far-red-induction_P Parameter: Organism Value: A. thaliana
  misc_feature: MA Experiment 20001450 PARAMETER Experiment Name: At_Far-red-induction_P Parameter: Plant Line Value: Columbia
  misc_feature: MA Experiment 20001450 PARAMETER Experiment Name: At_Far-red-induction_P Parameter: Timepoint (hr) Value: 8
  misc_feature: MA Experiment 20001450 PARAMETER Experiment Name: At_Far-red-induction_P Parameter: Tissue Value: Whole Plant
  misc_feature: MA Experiment ID: 20001451 Result: Up-regulated in Transcription
  misc_feature: MA Experiment 20001451 PARAMETER Experiment Name: At_Far-red-induction_P Parameter: Age (day) Value: 7
  misc_feature: MA Experiment 20001451 PARAMETER Experiment Name: At_Far-red-induction_P Parameter: Light Value: Far-red vs. White
  misc_feature: MA Experiment 20001451 PARAMETER Experiment Name: At_Far-red-induction_P Parameter: Organism Value: A. thaliana
  misc_feature: MA Experiment 20001451 PARAMETER Experiment Name: At_Far-red-induction_P Parameter: Plant Line Value: Columbia
  misc_feature: MA Experiment 20001451 PARAMETER Experiment Name: At_Far-red-induction_P Parameter: Timepoint (hr) Value: 24
  misc_feature: MA Experiment 20001451 PARAMETER Experiment Name: At_Far-red-induction_P Parameter: Tissue Value: Whole Plant
cttacgcgtcatgtaaaaaaaaaagaagcgtaaattacgaaaaacagagagataaatccgggcattgagattttggagatagagagagagaaaaatcgaaatctattgtctatctcctcaatttggattggattttctgcatatcatcgctctagctttcgcgggttttggattcgattccttacccttctccaatcgaagtttttggctttgaattggatttgggtttcgttccaaaatcagctctttttgttaatcagcagatatgcaggaccagctggtgtgtcatggttgtaggaatttattgatgtatcctagaggagcatctaatgtgcgttgtgcgttatgtaacactatcaacatggttcctcctcctcctccacctcacgacatggcacacattatatgtggtggttgtagaacaatgcttatgtatacgcgtggggctagtagcgtaagatgctcttgctgtcaaactacgaaccttgtgccagcgcactccaatcaggttgcccatgctccttccagtcaggttgcgcagatcaattgtgggcattgtcggacgaccctcatgtatccttacggtgcatcatccgtcaaatgcgctgtttgtcaattcgtaactaacgttaatatgagcaatggaagggtacctctcccaactaaccggccaaatggaacagcttgtcccccctctacatcaacttcaacaccaccctctcagacccaaaccgttgttgtagaaaaccccatgtccgttgatgaaagcggaaagttggtgagcaatgttgttgttggagtgacaactgacaaaaagtaatcaagaatgagtgagatcttaaagatcaaatccaaattcttcctctattcctgcgtttggtttgtgcatattacatacgcggaaaaactgtatgttatatatctcttgactcctttttaacccaagagaaaaagcttatcagaatctcttgttactgcattattggggtttattcaaagttgaagacacaaggtttttgccc

SEQ ID NO: 24508 - protein, 184 aa, Arabidopsis thaliana
  peptide (1)..(184): Ceres Seq. ID no. 12322863
  misc_feature (1)..(74): Homolog of NCBI NO: 25403154 NR Description: probable zinc-finger protein, 7043-7771
  misc_feature (1)..(134): Homolog of NCBI NO: 29467531 NR Description: P0582D05.23 [Oryza sativa (japonica
  misc_feature (1)..(125): Homolog of NCBI NO: 18398482 NR Description: zinc-finger protein, putative
  misc_feature (1)..(126): Homolog of NCBI NO: 30692719 NR Description: zinc-finger protein -related [Arabidopsis
  misc_feature (2)..(134): Homolog of NCBI NO: 34905200 NR Description: P0672D01.2 [Oryza sativa (japonica
  misc_feature (43)..(184): Homolog of NCBI NO: 32400832 NR Description: 18S subunit ribosomal protein [Triticum aestivum]
  misc_feature (1)..(184): Homolog of NCBI NO: 17981380 NR Description: zinc finger protein LSD2 [Brassica oleracea]
  misc_feature (1)..(184): Homolog of NCBI NO: 17981378 NR Description: zinc finger protein LSD1 [Brassica oleracea]
  misc_feature (1)..(184): Homolog of NCBI NO: 30685083 NR Description: zinc-finger protein Lsd1 [Arabidopsis thaliana]
  misc_feature (1)..(184): Homolog of NCBI NO: 30685085 NR Description: zinc-finger protein Lsd1 [Arabidopsis thaliana]
MQDQLVCHGCRNLLMYPRGASNVRCALCNTINMVPPPPPPHDMAHIICGGCRTMLMYTRGASSVRCSCCQTTNLVPAHSNQVAHAPSSQVAQINCGHCRTTLMYPYGASSVKCAVCQFVTNVNMSNGRVPLPTNRPNGTACPPSTSTSTPPSQTQTVVVENPMSVDESGKLVSNVVVGVTTDKK

SEQ ID NO: 24509 - protein, 170 aa, Arabidopsis thaliana
  peptide (1)..(170): Ceres Seq. ID no. 12322864
  misc_feature (1)..(60): Homolog of NCBI NO: 25403154 NR Description: probable zinc-finger protein, 7043-7771
  misc_feature (1)..(120): Homolog of NCBI NO: 29467531 NR Description: P0582D05.23 [Oryza sativa (japonica
  misc_feature (1)..(111): Homolog of NCBI NO: 18398482 NR Description: zinc-finger protein, putative
  misc_feature (1)..(112): Homolog of NCBI NO: 30692719 NR Description: zinc-finger protein -related [Arabidopsis
  misc_feature (1)..(120): Homolog of NCBI NO: 34905200 NR Description: P0672D01.2 [Oryza sativa (japonica
  misc_feature (29)..(170): Homolog of NCBI NO: 32400832 NR Description: 18S subunit ribosomal protein [Triticum aestivum]
  misc_feature (1)..(170): Homolog of NCBI NO: 17981380 NR Description: zinc finger protein LSD2 [Brassica oleracea]
  misc_feature (1)..(170): Homolog of NCBI NO: 17981378 NR Description: zinc finger protein LSD1 [Brassica oleracea]
  misc_feature (1)..(170): Homolog of NCBI NO: 30685083 NR Description: zinc-finger protein Lsd1 [Arabidopsis thaliana]
  misc_feature (1)..(170): Homolog of NCBI NO: 30685085 NR Description: zinc-finger protein Lsd1 [Arabidopsis thaliana]
MYPRGASNVRCALCNTINMVPPPPPPHDMAHIICGGCRTMLMYTRGASSVRCSCCQTTNLVPAHSNQVAHAPSSQVAQINCGHCRTTLMYPYGASSVKCAVCQFVTNVNMSNGRVPLPTNRPNGTACPPSTSTSTPPSQTQTVVVENPMSVDESGKLVSNVVVGVTTDKK

SEQ ID NO: 24510 - protein, 152 aa, Arabidopsis thaliana
  peptide (1)..(152): Ceres Seq. ID no. 12322865
  misc_feature (1)..(42): Homolog of NCBI NO: 25403154 NR Description: probable zinc-finger protein, 7043-7771
  misc_feature (1)..(102): Homolog of NCBI NO: 29467531 NR Description: P0582D05.23 [Oryza sativa (japonica
  misc_feature (1)..(93): Homolog of NCBI NO: 18398482 NR Description: zinc-finger protein, putative
  misc_feature (1)..(94): Homolog of NCBI NO: 30692719 NR Description: zinc-finger protein -related [Arabidopsis
  misc_feature (1)..(102): Homolog of NCBI NO: 34905200 NR Description: P0672D01.2 [Oryza sativa (japonica
  misc_feature (11)..(152): Homolog of NCBI NO: 32400832 NR Description: 18S subunit ribosomal protein [Triticum aestivum]
  misc_feature (1)..(152): Homolog of NCBI NO: 17981380 NR Description: zinc finger protein LSD2 [Brassica oleracea]
  misc_feature (1)..(152): Homolog of NCBI NO: 17981378 NR Description: zinc finger protein LSD1 [Brassica oleracea]
  misc_feature (1)..(152): Homolog of NCBI NO: 30685083 NR Description: zinc-finger protein Lsd1 [Arabidopsis thaliana]
  misc_feature (1)..(152): Homolog of NCBI NO: 30685085 NR Description: zinc-finger protein Lsd1 [Arabidopsis thaliana]
MVPPPPPPHDMAHIICGGCRTMLMYTRGASSVRCSCCQTTNLVPAHSNQVAHAPSSQVAQINCGHCRTTLMYPYGASSVKCAVCQFVTNVNMSNGRVPLPTNRPNGTACPPSTSTSTPPSQTQTVVVENPMSVDESGKLVSNVVVGVTTDKK

SEQ ID NO: 24511 - DNA, 1504 bp, Arabidopsis thaliana
  misc_feature (1)..(1504): Ceres Seq. ID no. 13647866
  misc_feature: MA Experiment ID: 108573 Result: Down-regulated in Transcription
  misc_feature: MA Experiment 108573 PARAMETER Experiment Name: At_Drought_cDNA_P Parameter: Timepoint (hr) Value: 6
  misc_feature: MA Experiment 108573 PARAMETER Experiment Name: At_Drought_cDNA_P Parameter: Tissue Value: Aerial
  misc_feature: MA Experiment 108573 PARAMETER Experiment Name: At_Drought_cDNA_P Parameter: Treatment Value: Drought vs. No Drought
  misc_feature: MA Experiment ID: 20000180 Result: Up-regulated in Transcription
  misc_feature: MA Experiment 20000180 PARAMETER Experiment Name: At_Germinating_Seeds_P Parameter: Age (hr) Value: 24 vs. 0
  misc_feature: MA Experiment 20000180 PARAMETER Experiment Name: At_Germinating_Seeds_P Parameter: Tissue Value: Germinating Seeds
  misc_feature: MA Experiment ID: 20000182 Result: Up-regulated in Transcription
  misc_feature: MA Experiment 20000182 PARAMETER Experiment Name: At_2mM_SA_P Parameter: Age (day) Value: 14
  misc_feature: MA Experiment 20000182 PARAMETER Experiment Name: At_2mM_SA_P Parameter: Organism Value: A. thaliana
  misc_feature: MA Experiment 20000182 PARAMETER Experiment Name: At_2mM_SA_P Parameter: Plant Line Value: WS
  misc_feature: MA Experiment 20000182 PARAMETER Experiment Name: At_2mM_SA_P Parameter: Timepoint (hr) Value: 6
  misc_feature: MA Experiment 20000182 PARAMETER Experiment Name: At_2mM_SA_P Parameter: Tissue Value: Aerial
  misc_feature: MA Experiment 20000182 PARAMETER Experiment Name: At_2mM_SA_P Parameter: Treatment Value: 2mM SA vs. No Treatment
  misc_feature: MA Experiment ID: 20000227 Result: Up-regulated in Transcription
  misc_feature: MA Experiment 20000227 PARAMETER Experiment Name: At_Root-Tips-vs-Tops_P Parameter: Tissue Value: Root Tips vs. Root Tops
  misc_feature: MA Experiment ID: 20000234 Result: Up-regulated in Transcription
  misc_feature: MA Experiment 20000234 PARAMETER Experiment Name: At_Siliques_P Parameter: Age (day) Value: 21
  misc_feature: MA Experiment 20000234 PARAMETER Experiment Name: At_Siliques_P Parameter: Organism Value: A. thaliana
  misc_feature: MA Experiment 20000234 PARAMETER Experiment Name: At_Siliques_P Parameter: Plant Line Value: WS
  misc_feature: MA Experiment 20000234 PARAMETER Experiment Name: At_Siliques_P Parameter: Tissue Value: Less Than 5mm Siliques vs. Whole Plant
  misc_feature: MA Experiment ID: 20000495 Result: Up-regulated in Transcription
  misc_feature: MA Experiment 20000495 PARAMETER Experiment Name: At_Guard_Cells_P Parameter: Harvest Date Value: 8/2/2002
  misc_feature: MA Experiment 20000495 PARAMETER Experiment Name: At_Guard_Cells_P Parameter: Organism Value: A. thaliana
  misc_feature: MA Experiment 20000495 PARAMETER Experiment Name: At_Guard_Cells_P Parameter: Tissue Value: Guard Cells vs. Leaves
ggctaacttaaaaaacaaggctcgaggcggttctcttatctgcaaaactaaagactgttgtagagctcactagtcccccccccccccccccgaaaagcttaagtgagaagcagaaaaaaatggcgaaatctcagatctggtttggttttgcgttactcgcgttgcttctggtttcagccgtagctgacgatgtggttgttttgactgacgatagcttcgaaaaggaagttggtaaagataaaggagctctcgtcgagttttacgctccctggtgtggtcactgcaagaaacttgctccagagtatgaaaagctaggggcaagcttcaagaaggctaagtctgtgttgattgcaaaggttgattgtgatgagcaaaagagtgtctgtactaaatatggtgttagtggatacccaaccattcagtggtttcctaaaggatctcttgaacctcaaaagtatgagggtccacgcaatgctgaagctttggctgaatacgtgaacaaggaaggaggcaccaacgtaaaattagctgcagttccacaaaacgtggttgttttgacacctgacaatttcgatgagattgttctggatcaaaacaaagatgtcctagtcgaattttatgcaccatggtgtggccactgcaaatcactcgctcccacatacgaaaaggtagccacagtgtttaaacaggaagaaggtgtagtcatcgccaatttggatgctgatgcacacaaagcccttggcgagaaatatggagtgagtggattcccaacattgaaattcttcccaaaggacaacaaagctggtcacgattatgacggtggcagggatttagatgactttgtaagcttcatcaacgagaaatctgggaccagcagggacagtaaagggcagcttacttcaaaggctggtatagtcgaaagcttagatgctttggtaaaagagttagttgcagctagtgaagatgagaagaaggcagtgttgtctcgcatagaaaaggaagcaagtacccttaagggctccaccacgaggtatggaaagctttacttgaaactcgcaaagagctacatagaaaaaggttcagactatgctagcaaagaaacggagaggcttggacgggtgcttgggaagtcgataagtccagtgaaagctgatgaactcactctcaagagaaatatcctaaccacgttcgttgcttcttcttagaagtcatatagcttgaagctaagagaataggagtcgagagagtttataactgatactgttttgagattttatgtttgtcaagatcaagaacgtctgtggttatttctggttagttctgaaactcttttgaacccaagtttatctgtctctggtgaacaagcgaccccgataatcataaacttcattcgcgttaaaaaaaaaggttcagtaatgggccaggctcgtattcattattaatgggctaggctcgtgttcataaaaagtctgtaatgggtcattgaggtatacaaaggacatcc

SEQ ID NO: 24512 - protein, 361 aa, Arabidopsis thaliana
  peptide (1)..(361): Ceres Seq. ID no. 13647867
  misc_feature (17)..(358): Homolog of NCBI NO: 2501210 NR Description: PUTATIVE DISULFIDE ISOMERASE TIGA PRECURSOR
  misc_feature (10)..(358): Homolog of NCBI NO: 19114496 NR Description: putative protein disulfide isomerase (EC 5.3.4.1)
  misc_feature (165)..(361): Homolog of NCBI NO: 10180029 NR Description: putative protein disulfide-isomerase [Prunus
  misc_feature (13)..(357): Homolog of NCBI NO: 2627440 NR Description: protein disulfide isomerase; PDI; P5-like
  misc_feature (13)..(357): Homolog of NCBI NO: 28829383 NR Description: similar to Dictyostelium discoideum (Slime mold).
  misc_feature (14)..(357): Homolog of NCBI NO: 34897646 NR Description: putative disulfide-isomerase precursor [Oryza
  misc_feature (10)..(357): Homolog of NCBI NO: 34894982 NR Description: putative protein disulfide isomerase
  misc_feature (1)..(357): Homolog of NCBI NO: 7489183 NR Description: probable protein disulfide-isomerase (EC 5.3.4.1)
  misc_feature (1)..(357): Homolog of NCBI NO: 729442 NR Description: PROBABLE PROTEIN DISULFIDE ISOMERASE P5 PRECURSOR
  misc_feature (1)..(361): Homolog of NCBI NO: 15226610 NR Description: protein disulfide isomerase family [Arabidopsis
  misc_feature (17)..(358): Homolog of NCBI NO: 2501210 NR Description: PUTATIVE DISULFIDE ISOMERASE TIGA PRECURSOR
  misc_feature (10)..(358): Homolog of NCBI NO: 19114496 NR Description: putative protein disulfide isomerase (EC 5.3.4.1)
  misc_feature (165)..(361): Homolog of NCBI NO: 10180029 NR Description: putative protein disulfide-isomerase [Prunus
  misc_feature (13)..(357): Homolog of NCBI NO: 2627440 NR Description: protein disulfide isomerase; PDI; P5-like
  misc_feature (13)..(357): Homolog of NCBI NO: 28829383 NR Description: similar to Dictyostelium discoideum (Slime mold).
  misc_feature (14)..(357): Homolog of NCBI NO: 34897646 NR Description: putative disulfide-isomerase precursor [Oryza
  misc_feature (10)..(357): Homolog of NCBI NO: 34894982 NR Description: putative protein disulfide isomerase
  misc_feature (1)..(357): Homolog of NCBI NO: 7489183 NR Description: probable protein disulfide-isomerase (EC 5.3.4.1)
  misc_feature (1)..(357): Homolog of NCBI NO: 729442 NR Description: PROBABLE PROTEIN DISULFIDE ISOMERASE P5 PRECURSOR
  misc_feature (1)..(361): Homolog of NCBI NO: 15226610 NR Description: protein disulfide isomerase family [Arabidopsis
MAKSQIWFGFALLALLLVSAVADDVVVLTDDSFEKEVGKDKGALVEFYAPWCGHCKKLAPEYEKLGASFKKAKSVLIAKVDCDEQKSVCTKYGVSGYPTIQWFPKGSLEPQKYEGPRNAEALAEYVNKEGGTNVKLAAVPQNVVVLTPDNFDEIVLDQNKDVLVEFYAPWCGHCKSLAPTYEKVATVFKQEEGVVIANLDADAHKALGEKYGVSGFPTLKFFPKDNKAGHDYDGGRDLDDFVSFINEKSGTSRDSKGQLTSKAGIVESLDALVKELVAASEDEKKAVLSRIEKEASTLKGSTTRYGKLYLKLAKSYIEKGSDYASKETERLGRVLGKSISPVKADELTLKRNILTTFVASS

SEQ ID NO: 24513 - DNA, 468 bp, Arabidopsis thaliana
  misc_feature (1)..(468): Ceres Seq. ID no. 12337936
  misc_feature: MA Experiment ID: 20000184 Result: Down-regulated in Transcription
  misc_feature: MA Experiment 20000184 PARAMETER Experiment Name: At_Shoots__P Parameter: Age (day) Value: 7
  misc_feature: MA Experiment 20000184 PARAMETER Experiment Name: At_Shoots__P Parameter: Tissue Value: Shoots vs. Whole Plant
  misc_feature: MA Experiment ID: 20000185 Result: Down-regulated in Transcription
  misc_feature: MA Experiment 20000185 PARAMETER Experiment Name: At_Roots__P Parameter: Age (day) Value: 7 vs. 21
  misc_feature: MA Experiment 20000185 PARAMETER Experiment Name: At_Roots__P Parameter: Organism Value: A. thaliana
  misc_feature: MA Experiment 20000185 PARAMETER Experiment Name: At_Roots__P Parameter: Tissue Value: Roots vs. Whole Plant
  misc_feature: MA Experiment ID: 20000234 Result: Down-regulated in Transcription
  misc_feature: MA Experiment 20000234 PARAMETER Experiment Name: At_Siliques_P Parameter: Age (day) Value: 21
  misc_feature: MA Experiment 20000234 PARAMETER Experiment Name: At_Siliques_P Parameter: Organism Value: A. thaliana
  misc_feature: MA Experiment 20000234 PARAMETER Experiment Name: At_Siliques_P Parameter: Plant Line Value: WS
  misc_feature: MA Experiment 20000234 PARAMETER Experiment Name: At_Siliques_P Parameter: Tissue Value: Less Than 5mm Siliques vs. Whole Plant
  misc_feature: MA Experiment ID: 20000235 Result: Down-regulated in Transcription
  misc_feature: MA Experiment 20000235 PARAMETER Experiment Name: At_Siliques_P Parameter: Age (day) Value: 21
  misc_feature: MA Experiment 20000235 PARAMETER Experiment Name: At_Siliques_P Parameter: Organism Value: A. thaliana
  misc_feature: MA Experiment 20000235 PARAMETER Experiment Name: At_Siliques_P Parameter: Plant Line Value: WS
  misc_feature: MA Experiment 20000235 PARAMETER Experiment Name: At_Siliques_P Parameter: Tissue Value: 5-10mm Siliques vs. Whole Plant
  misc_feature: MA Experiment ID: 20000265 Result: Up-regulated in Transcription
  misc_feature: MA Experiment 20000265 PARAMETER Experiment Name: At_Open_Flower_P Parameter: Age (day) Value: 21
  misc_feature: MA Experiment 20000265 PARAMETER Experiment Name: At_Open_Flower_P Parameter: Plant Line Value: WS
  misc_feature: MA Experiment 20000265 PARAMETER Experiment Name: At_Open_Flower_P Parameter: Tissue Value: Closed Flower vs. Whole Plant
  misc_feature: MA Experiment ID: 20000286 Result: Up-regulated in Transcription
  misc_feature: MA Experiment 20000286 PARAMETER Experiment Name: At_Open_Flower_P Parameter: Age (day) Value: 21
  misc_feature: MA Experiment 20000286 PARAMETER Experiment Name: At_Open_Flower_P Parameter: Plant Line Value: WS
  misc_feature: MA Experiment 20000286 PARAMETER Experiment Name: At_Open_Flower_P Parameter: Tissue Value: Half Open vs. Whole Plant
  misc_feature: MA Experiment ID: 20000438 Result: Down-regulated in Transcription
  misc_feature: MA Experiment 20000438 PARAMETER Experiment Name: At_Shoots__P Parameter: Age (day) Value: 14
  misc_feature: MA Experiment 20000438 PARAMETER Experiment Name: At_Shoots__P Parameter: Tissue Value: Shoots vs. Whole Plant
  misc_feature: MA Experiment ID: 20000794 Result: Down-regulated in Transcription
  misc_feature: MA Experiment 20000794 PARAMETER Experiment Name: At_Petals_P Parameter: Age (day) Value: 23-25 days
  misc_feature: MA Experiment 20000794 PARAMETER Experiment Name: At_Petals_P Parameter: Plant Line Value: WS
  misc_feature: MA Experiment 20000794 PARAMETER Experiment Name: At_Petals_P Parameter: Tissue Value: Petals vs. Whole plant
  misc_feature: MA Experiment ID: 20001760 Result: Up-regulated in Transcription
  misc_feature: MA Experiment 20001760 PARAMETER Experiment Name: At_50mM_NH4NO3_L-to-H_P Parameter: Timepoint (hr) Value: 2
  misc_feature: MA Experiment 20001760 PARAMETER Experiment Name: At_50mM_NH4NO3_L-to-H_P Parameter: Tissue Value: Siliques
  misc_feature: MA Experiment 20001760 PARAMETER Experiment Name: At_50mM_NH4NO3_L-to-H_P Parameter: Treatment Value: 50mM NH4NO3 vs 100mM Mannitol
  misc_feature: MA Experiment ID: 20001770 Result: Down-regulated in Transcription
  misc_feature: MA Experiment 20001770 PARAMETER Experiment Name: At_Far-red-enriched-adult_P Parameter: Age (day) Value: 28
  misc_feature: MA Experiment 20001770 PARAMETER Experiment Name: At_Far-red-enriched-adult_P Parameter: Light Value: Far-red enriched vs. White
  misc_feature: MA Experiment 20001770 PARAMETER Experiment Name: At_Far-red-enriched-adult_P Parameter: Organism Value: A. thaliana
  misc_feature: MA Experiment 20001770 PARAMETER Experiment Name: At_Far-red-enriched-adult_P Parameter: Plant Line Value: Columbia
  misc_feature: MA Experiment 20001770 PARAMETER Experiment Name: At_Far-red-enriched-adult_P Parameter: Timepoint (hr) Value: 8
  misc_feature: MA Experiment 20001770 PARAMETER Experiment Name: At_Far-red-enriched-adult_P Parameter: Tissue Value: Aerial
  misc_feature: MA Experiment ID: 20001771 Result: Up-regulated in Transcription
  misc_feature: MA Experiment 20001771 PARAMETER Experiment Name: At_Far-red-enriched-adult_P Parameter: Age (day) Value: 28
  misc_feature: MA Experiment 20001771 PARAMETER Experiment Name: At_Far-red-enriched-adult_P Parameter: Light Value: Far-red enriched vs. White
  misc_feature: MA Experiment 20001771 PARAMETER Experiment Name: At_Far-red-enriched-adult_P Parameter: Organism Value: A. thaliana
  misc_feature: MA Experiment 20001771 PARAMETER Experiment Name: At_Far-red-enriched-adult_P Parameter: Plant Line Value: Columbia
  misc_feature: MA Experiment 20001771 PARAMETER Experiment Name: At_Far-red-enriched-adult_P Parameter: Timepoint (hr) Value: 16
  misc_feature: MA Experiment 20001771 PARAMETER Experiment Name: At_Far-red-enriched-adult_P Parameter: Tissue Value: Aerial
  misc_feature: MA Experiment ID: 20001906 Result: Up-regulated in Transcription
  misc_feature: MA Experiment 20001906 PARAMETER Experiment Name: At_Drought_Reproduction_P Parameter: Age (day) Value: 35
  misc_feature: MA Experiment 20001906 PARAMETER Experiment Name: At_Drought_Reproduction_P Parameter: Organism Value: A. thaliana
  misc_feature: MA Experiment 20001906 PARAMETER Experiment Name: At_Drought_Reproduction_P Parameter: Plant Line Value: WS
  misc_feature: MA Experiment 20001906 PARAMETER Experiment Name: At_Drought_Reproduction_P Parameter: Timepoint (day) Value: 5
  misc_feature: MA Experiment 20001906 PARAMETER Experiment Name: At_Drought_Reproduction_P Parameter: Tissue Value: Siliques
  misc_feature: MA Experiment 20001906 PARAMETER Experiment Name: At_Drought_Reproduction_P Parameter: Treatment Value: Drought vs. No Drought
  misc_feature: Phenotype: WHOLE PLANT Size-Small
  misc_feature: Phenotype: WHOLE PLANT Size-Small
  misc_feature: Phenotype: INFLORESCENCE Flowering Time-Late Flowering
  misc_feature: Phenotype: WHOLE PLANT Size-Small
  misc_feature: Phenotype: INFLORESCENCE Flowering Time-Late Flowering
atagaatataaccatattccggacatgaagatcgtgacattggtactcgtcgtcttcgtcatactttcgacatcattcccggctgccatcaaagccgaagacacgggagatacaggaaatgtgggagtgacatgtgacgcaaggcagcttcagccttgccttgccgcgattacgggaggaggacaaccctcgggtgcatgttgtgcaaagcttacagagcaacagtcatgcctatgtggtttcgctaagaaccctgcgttcgcacagtacattagctctccaaacgctcgcaaagtgctccttgcttgcaatgttgcttatcccacttgttgaaacttatctagattttataaataaataaacgaaaggaaataaattacattatatcaaacgttatgatacaattcaaccgtttgtgttaatgtactggcttacatggttaaataaagtttaatttcttggttgctc

SEQ ID NO: 24514 - protein, 110 aa, Arabidopsis thaliana
  peptide (1)..(110): Ceres Seq. ID no. 12337937
  misc_feature (45)..(110): Pfam Name: Protease inhibitor/seed storage/LTP family Pfam Description: Protease inhibitor/seed storage/LTP family
  misc_feature (37)..(110): Homolog of NCBI NO: 3183088 NR Description: Probable nonspecific lipid-transfer protein AKCS9
  misc_feature (42)..(110): Homolog of NCBI NO: 18402345 NR Description: lipid transfer protein, putative
  misc_feature (28)..(110): Homolog of NCBI NO: 7489543 NR Description: probable lipid transfer protein - rice
  misc_feature (9)..(110): Homolog of NCBI NO: 15240856 NR Description: lipid transfer - like protein; protein id:
  misc_feature (9)..(110): Homolog of NCBI NO: 21555147 NR Description: lipid transfer-like protein [Arabidopsis thaliana]
  misc_feature (9)..(110): Homolog of NCBI NO: 18421731 NR Description: Expressed protein
  misc_feature (9)..(110): Homolog of NCBI NO: 32395583 NR Description: seed specific protein Bn15D80B [Brassica napus]
  misc_feature (9)..(110): Homolog of NCBI NO: 15240847 NR Description: lipid transfer - like protein; protein id:
  misc_feature (21)..(110): Homolog of NCBI NO: 7488524 NR Description: lipid transfer like protein - turnip (fragment)
  misc_feature (9)..(110): Homolog of NCBI NO: 15219758 NR Description: lipid transfer protein, putative
IEYNHIPDMKIVTLVLVVFVILSTSFPAAIKAEDTGDTGNVGVTCDARQLQPCLAAITGGGQPSGACCAKLTEQQSCLCGFAKNPAFAQYISSPNARKVLLACNVAYPTC

SEQ ID NO: 24515 - protein, 102 aa, Arabidopsis thaliana
  peptide (1)..(102): Ceres Seq. ID no. 12337938
  misc_feature (37)..(102): Pfam Name: Protease inhibitor/seed storage/LTP family Pfam Description: Protease inhibitor/seed storage/LTP family
  misc_feature (29)..(102): Homolog of NCBI NO: 3183088 NR Description: Probable nonspecific lipid-transfer protein AKCS9
  misc_feature (34)..(102): Homolog of NCBI NO: 18402345 NR Description: lipid transfer protein, putative
  misc_feature (20)..(102): Homolog of NCBI NO: 7489543 NR Description: probable lipid transfer protein - rice
  misc_feature (1)..(102): Homolog of NCBI NO: 15240856 NR Description: lipid transfer - like protein; protein id:
  misc_feature (1)..(102): Homolog of NCBI NO: 21555147 NR Description: lipid transfer-like protein [Arabidopsis thaliana]
  misc_feature (1)..(102): Homolog of NCBI NO: 18421731 NR Description: Expressed protein
  misc_feature (1)..(102): Homolog of NCBI NO: 32395583 NR Description: seed specific protein Bn15D80B [Brassica napus]
  misc_feature (1)..(102): Homolog of NCBI NO: 15240847 NR Description: lipid transfer - like protein; protein id:
  misc_feature (13)..(102): Homolog of NCBI NO: 7488524 NR Description: lipid transfer like protein - turnip (fragment)
  misc_feature (1)..(102): Homolog of NCBI NO: 15219758 NR Description: lipid transfer protein, putative
MKIVTLVLVVFVILSTSFPAAIKAEDTGDTGNVGVTCDARQLQPCLAAITGGGQPSGACCAKLTEQQSCLCGFAKNPAFAQYISSPNARKVLLACNVAYPTC

SEQ ID NO: 24516 - DNA, 1376 bp, Arabidopsis thaliana
  misc_feature (1)..(1376): Ceres Seq. ID no. 13490520
  misc_feature: MA Experiment ID: 108434 Result: Up-regulated in Transcription
  misc_feature: MA Experiment 108434 PARAMETER Experiment Name: At_Root_Tips_cDNA_P Parameter: Tissue Value: Root Tips
  misc_feature: MA Experiment ID: 108576 Result: Up-regulated in Transcription
  misc_feature: MA Experiment 108576 PARAMETER Experiment Name: At_42deg_Heat_cDNA_P Parameter: Temperature (deg C) Value: 42 vs. 22
  misc_feature: MA Experiment 108576 PARAMETER Experiment Name: At_42deg_Heat_cDNA_P Parameter: Timepoint (hr) Value: 1
  misc_feature: MA Experiment 108576 PARAMETER Experiment Name: At_42deg_Heat_cDNA_P Parameter: Tissue Value: Aerial
  misc_feature: MA Experiment ID: 108577 Result: Up-regulated in Transcription
  misc_feature: MA Experiment 108577 PARAMETER Experiment Name: At_42deg_Heat_cDNA_P Parameter: Temperature (deg C) Value: 42 vs. 22
  misc_feature: MA Experiment 108577 PARAMETER Experiment Name: At_42deg_Heat_cDNA_P Parameter: Timepoint (hr) Value: 6
  misc_feature: MA Experiment 108577 PARAMETER Experiment Name: At_42deg_Heat_cDNA_P Parameter: Tissue Value: Aerial
  misc_feature: MA Experiment ID: 108585 Result: Up-regulated in Transcription
  misc_feature: MA Experiment 108585 PARAMETER Experiment Name: At_5mM_NaNP_cDNA_P Parameter: Timepoint (hr) Value: 6
  misc_feature: MA Experiment 108585 PARAMETER Experiment Name: At_5mM_NaNP_cDNA_P Parameter: Tissue Value: Aerial
  misc_feature: MA Experiment 108585 PARAMETER Experiment Name: At_5mM_NaNP_cDNA_P Parameter: Treatment Value: null
  misc_feature: MA Experiment ID: 20000093 Result: Up-regulated in Transcription
  misc_feature: MA Experiment 20000093 PARAMETER Experiment Name: At_42deg_Heat_cDNA_P Parameter: Temperature (deg C) Value: 42 vs. 22
  misc_feature: MA Experiment 20000093 PARAMETER Experiment Name: At_42deg_Heat_cDNA_P Parameter: Timepoint (hr) Value: 0.5
  misc_feature: MA Experiment 20000093 PARAMETER Experiment Name: At_42deg_Heat_cDNA_P Parameter: Tissue Value: Aerial
  misc_feature: MA Experiment ID: 20000171 Result: Up-regulated in Transcription
  misc_feature: MA Experiment 20000171 PARAMETER Experiment Name: At_42deg_Heat_P Parameter: Age (day) Value: 14
  misc_feature: MA Experiment 20000171 PARAMETER Experiment Name: At_42deg_Heat_P Parameter: Organism Value: A. thaliana
  misc_feature: MA Experiment 20000171 PARAMETER Experiment Name: At_42deg_Heat_P Parameter: Plant Line Value: WS
  misc_feature: MA Experiment 20000171 PARAMETER Experiment Name: At_42deg_Heat_P Parameter: Temperature (deg C) Value: 42 vs. 22
  misc_feature: MA Experiment 20000171 PARAMETER Experiment Name: At_42deg_Heat_P Parameter: Timepoint (hr) Value: 1
  misc_feature: MA Experiment 20000171 PARAMETER Experiment Name: At_42deg_Heat_P Parameter: Tissue Value: Aerial
  misc_feature: MA Experiment ID: 20000173 Result: Up-regulated in Transcription
  misc_feature: MA Experiment 20000173 PARAMETER Experiment Name: At_42deg_Heat_P Parameter: Age (day) Value: 14
  misc_feature: MA Experiment 20000173 PARAMETER Experiment Name: At_42deg_Heat_P Parameter: Organism Value: A. thaliana
  misc_feature: MA Experiment 20000173 PARAMETER Experiment Name: At_42deg_Heat_P Parameter: Plant Line Value: WS
  misc_feature: MA Experiment 20000173 PARAMETER Experiment Name: At_42deg_Heat_P Parameter: Temperature (deg C) Value: 42 vs. 22
  misc_feature: MA Experiment 20000173 PARAMETER Experiment Name: At_42deg_Heat_P Parameter: Timepoint (hr) Value: 6
  misc_feature: MA Experiment 20000173 PARAMETER Experiment Name: At_42deg_Heat_P Parameter: Tissue Value: Aerial
  misc_feature: MA Experiment ID: 20000443 Result: Up-regulated in Transcription
  misc_feature: MA Experiment 20000443 PARAMETER Experiment Name: At_1uM_BR-BRZ__P Parameter: Tissue Value: Shoot Apices
  misc_feature: MA Experiment 20000443 PARAMETER Experiment Name: At_1uM_BR-BRZ__P Parameter: Treatment Value: 1uM BRZ vs. No Treatment
  misc_feature: MA Experiment ID: 20001248 Result: Down-regulated in Transcription
  misc_feature: MA Experiment 20001248 PARAMETER Experiment Name: At_Far-red-induction_P Parameter: Age (day) Value: 7
  misc_feature: MA Experiment 20001248 PARAMETER Experiment Name: At_Far-red-induction_P Parameter: Light Value: Far-red vs. White
  misc_feature: MA Experiment 20001248 PARAMETER Experiment Name: At_Far-red-induction_P Parameter: Organism Value: A. thaliana
  misc_feature: MA Experiment 20001248 PARAMETER Experiment Name: At_Far-red-induction_P Parameter: Plant Line Value: Columbia
  misc_feature: MA Experiment 20001248 PARAMETER Experiment Name: At_Far-red-induction_P Parameter: Timepoint (hr) Value: 4
  misc_feature: MA Experiment 20001248 PARAMETER Experiment Name: At_Far-red-induction_P Parameter: Tissue Value: Whole Plant
aaattgtccccaaaaaaaaaaaaaaaaagtttctagaggcttcgttagcctaattcattaactaggttctcctagtgtctgctgctaattcccaaatctcagcgaaatcaaacttctctgctctgcttagctctcagctagctgaaatctctctcaatccgtgtagcttagcttccctaatccaaccatggcaaagttcggtgaaggtgacaagagatggatcgtagaagacagacctgacggcaccaacgtccataactggcactggtccgaaaccaattgccttgaatggtctcgcaacttcttcaccaaacaattctccggcgttgatatcctctccggcgaaggtaatcttttcatcaaggtcagtaagatcgagaaagtcgaaggcgaggcttatgtgaatgtgaggaaggggaagattatccctggctacgagcttaacgtctctttatcttgggaaggtgaggctaaagattccgatgggaagacgcttttgaaagctgatggattggtcgatatgccttatatctccgatgagaatgctgatgaagatccggagattaggttttcggtgaaggatgagggaccgattgggaggactttgaaggaagcgatggtgaagaaggggaaggagattattctggagaaggttagggtttatgtggaggctatggcgagaggaggcccgtgtagggatgaattggaatcgaagaaggttgcgccgaaatcggtagcggctggatcagctacggtggcggtggagaagtctggtgctgccccggtggtgtctgctgctgcggtggagagtaaggtagttaaggagaagaagaaggcgaagactaaggaagggtttaagacaattactatgaccgagaagtttaattgcagagctagggatttgtatgagattttaatggatgagaatcgttggaaaggttttacgcagagtaatgctaagattagtaaagatgtgaatggtccgattagtgtctttgatgggtctgttactggaataaatcttgagcttgaagaaggcaaattgattgttcagaagtggagatttgggagctggcctgatggtcttgattcaacggtgaagatcgttttcgaggagcctcaaccaggagtcaccattgtcaatcttactcacactgacgttcctgaagaggacagatacgggaatgcgactgtggtggaaaacactgagagaggatggagagatcttatattccataggatccgtgcagttttcggatttggaatatgaacttatgattttgattatcaaataagttgattatgatttggaccgataaccaatgcaaaatgtatgattttaaagtttttcagttttagttaatgcatttcccttg

SEQ ID NO: 24517 - protein, 360 aa, Arabidopsis thaliana
  peptide (1)..(360): Ceres Seq. ID no. 13490521
  misc_feature (221)..(360): Pfam Name: Aha1 domain Pfam Description: Aha1 domain
  misc_feature (1)..(200): Homolog of NCBI NO: 39850089 NR Description: RIKEN cDNA 1110064P04 [Mus musculus]
  misc_feature (1)..(326): Homolog of NCBI NO: 17557460 NR Description: Putative cytoplasmic protein of eukaryotic origin
  misc_feature (1)..(326): Homolog of NCBI NO: 39583346 NR Description: Hypothetical protein CBG11571 [Caenorhabditis
  misc_feature (1)..(258): Homolog of NCBI NO: 31211041 NR Description: ENSANGP00000020586 [Anopheles gambiae]
  misc_feature (1)..(326): Homolog of NCBI NO: 40786381 NR Description: Bm44 [Bombyx mori]
  misc_feature (1)..(359): Homolog of NCBI NO: 24585720 NR Description: CG1416-PA [Drosophila melanogaster]
  misc_feature (1)..(54): Homolog of NCBI NO: 30682028 NR Description: expressed protein [Arabidopsis thaliana]
  misc_feature (89)..(360): Homolog of NCBI NO: 30682028 NR Description: expressed protein [Arabidopsis thaliana]
  misc_feature (1)..(360): Homolog of NCBI NO: 18399461 NR Description: expressed protein [Arabidopsis thaliana]
  misc_feature (1)..(360): Homolog of NCBI NO: 21539453 NR Description: unknown protein [Arabidopsis thaliana]
MAKFGEGDKRWIVEDRPDGTNVHNWHWSETNCLEWSRNFFTKQFSGVDILSGEGNLFIKVSKIEKVEGEAYVNVRKGKIIPGYELNVSLSWEGEAKDSDGKTLLKADGLVDMPYISDENADEDPEIRFSVKDEGPIGRTLKEAMVKKGKEIILEKVRVYVEAMARGGPCRDELESKKVAPKSVAAGSATVAVEKSGAAPVVSAAAVESKVVKEKKKAKTKEGFKTITMTEKFNCRARDLYEILMDENRWKGFTQSNAKISKDVNGPISVFDGSVTGINLELEEGKLIVQKWRFGSWPDGLDSTVKIVFEEPQPGVTIVNLTHTDVPEEDRYGNATVVENTERGWRDLIFHRIRAVFGFGI

SEQ ID NO: 24518 - protein, 249 aa, Arabidopsis thaliana
  peptide (1)..(249): Ceres Seq. ID no. 13490522
  misc_feature (110)..(249): Pfam Name: Aha1 domain Pfam Description: Aha1 domain
  misc_feature (1)..(89): Homolog of NCBI NO: 31982558 NR Description: RIKEN cDNA 1110064P04 [Mus musculus]
  misc_feature (1)..(89): Homolog of NCBI NO: 39850089 NR Description: RIKEN cDNA 1110064P04 [Mus musculus]
  misc_feature (1)..(215): Homolog of NCBI NO: 17557460 NR Description: Putative cytoplasmic protein of eukaryotic origin
  misc_feature (1)..(215): Homolog of NCBI NO: 39583346 NR Description: Hypothetical protein CBG11571 [Caenorhabditis
  misc_feature (1)..(147): Homolog of NCBI NO: 31211041 NR Description: ENSANGP00000020586 [Anopheles gambiae]
  misc_feature (1)..(215): Homolog of NCBI NO: 40786381 NR Description: Bm44 [Bombyx mori]
  misc_feature (1)..(248): Homolog of NCBI NO: 24585720 NR Description: CG1416-PA [Drosophila melanogaster]
  misc_feature (1)..(249): Homolog of NCBI NO: 30682028 NR Description: expressed protein [Arabidopsis thaliana]
  misc_feature (1)..(249): Homolog of NCBI NO: 18399461 NR Description: expressed protein [Arabidopsis thaliana]
  misc_feature (1)..(249): Homolog of NCBI NO: 21539453 NR Description: unknown protein [Arabidopsis thaliana]
MPYISDENADEDPEIRFSVKDEGPIGRTLKEAMVKKGKEIILEKVRVYVEAMARGGPCRDELESKKVAPKSVAAGSATVAVEKSGAAPVVSAAAVESKVVKEKKKAKTKEGFKTITMTEKFNCRARDLYEILMDENRWKGFTQSNAKISKDVNGPISVFDGSVTGINLELEEGKLIVQKWRFGSWPDGLDSTVKIVFEEPQPGVTIVNLTHTDVPEEDRYGNATVVENTERGWRDLIFHRIRAVFGFGI

SEQ ID NO: 24519 - protein, 217 aa, Arabidopsis thaliana
  peptide (1)..(217): Ceres Seq. ID no. 13490523
  misc_feature (78)..(217): Pfam Name: Aha1 domain Pfam Description: Aha1 domain
  misc_feature (1)..(217): Homolog of NCBI NO: 30682028 NR Description: expressed protein [Arabidopsis thaliana]
  misc_feature (1)..(217): Homolog of NCBI NO: 18399461 NR Description: expressed protein [Arabidopsis thaliana]
  misc_feature (1)..(57): Homolog of NCBI NO: 39850089 NR Description: RIKEN cDNA 1110064P04 [Mus musculus]
  misc_feature (1)..(183): Homolog of NCBI NO: 39583346 NR Description: Hypothetical protein CBG11571 [Caenorhabditis
  misc_feature (1)..(183): Homolog of NCBI NO: 40786381 NR Description: Bm44 [Bombyx mori]
  misc_feature (1)..(216): Homolog of NCBI NO: 24585720 NR Description: CG1416-PA [Drosophila melanogaster]
  misc_feature (1)..(115): Homolog of NCBI NO: 31211041 NR Description: ENSANGP00000020586 [Anopheles gambiae]
  misc_feature (1)..(183): Homolog of NCBI NO: 17557460 NR Description: Putative cytoplasmic protein of eukaryotic origin
  misc_feature (1)..(57): Homolog of NCBI NO: 31982558 NR Description: RIKEN cDNA 1110064P04 [Mus musculus]
  misc_feature (1)..(217): Homolog of NCBI NO: 21539453 NR Description: unknown protein [Arabidopsis thaliana]
MVKKGKEIILEKVRVYVEAMARGGPCRDELESKKVAPKSVAAGSATVAVEKSGAAPVVSAAAVESKVVKEKKKAKTKEGFKTITMTEKFNCRARDLYEILMDENRWKGFTQSNAKISKDVNGPISVFDGSVTGINLELEEGKLIVQKWRFGSWPDGLDSTVKIVFEEPQPGVTIVNLTHTDVPEEDRYGNATVVENTERGWRDLIFHRIRAVFGFGI

SEQ ID NO: 24520 - DNA, 1086 bp, Arabidopsis thaliana
  misc_feature (1)..(1086): Ceres Seq. ID no. 12334577
  misc_feature: MA Experiment ID: 108501 Result: Down-regulated in Transcription
  misc_feature: MA Experiment 108501 PARAMETER Experiment Name: At_ap2_floral_buds_cDNA_P Parameter: Plant Line Value: ap2 (Ler.)
  misc_feature: MA Experiment 108501 PARAMETER Experiment Name: At_ap2_floral_buds_cDNA_P Parameter: Tissue Value: Closed Flower
  misc_feature: MA Experiment ID: 20001451 Result: Up-regulated in Transcription
  misc_feature: MA Experiment 20001451 PARAMETER Experiment Name: At_Far-red-induction_P Parameter: Age (day) Value: 7
  misc_feature: MA Experiment 20001451 PARAMETER Experiment Name: At_Far-red-induction_P Parameter: Light Value: Far-red vs. White
  misc_feature: MA Experiment 20001451 PARAMETER Experiment Name: At_Far-red-induction_P Parameter: Organism Value: A. thaliana
  misc_feature: MA Experiment 20001451 PARAMETER Experiment Name: At_Far-red-induction_P Parameter: Plant Line Value: Columbia
  misc_feature: MA Experiment 20001451 PARAMETER Experiment Name: At_Far-red-induction_P Parameter: Timepoint (hr) Value: 24
  misc_feature: MA Experiment 20001451 PARAMETER Experiment Name: At_Far-red-induction_P Parameter: Tissue Value: Whole Plant
  misc_feature: MA Experiment ID: 20001910 Result: Down-regulated in Transcription
  misc_feature: MA Experiment 20001910 PARAMETER Experiment Name: At_Drought_Reproduction_P Parameter: Age (day) Value: 37
  misc_feature: MA Experiment 20001910 PARAMETER Experiment Name: At_Drought_Reproduction_P Parameter: Organism Value: A. thaliana
  misc_feature: MA Experiment 20001910 PARAMETER Experiment Name: At_Drought_Reproduction_P Parameter: Plant Line Value: WS
  misc_feature: MA Experiment 20001910 PARAMETER Experiment Name: At_Drought_Reproduction_P Parameter: Timepoint (day) Value: 7
  misc_feature: MA Experiment 20001910 PARAMETER Experiment Name: At_Drought_Reproduction_P Parameter: Tissue Value: Flowers
  misc_feature: MA Experiment 20001910 PARAMETER Experiment Name: At_Drought_Reproduction_P Parameter: Treatment Value: Drought vs. No Drought
tcctcagttcttgatcactatatcttgaaggaattaagaagatgaatggtgaggcacggtctcgagtagtcgaccaagaagctggttcaactccatctactttgagagatgaagatcatccgtcgagacaaaggcttttcggatgtctcccttatgatatagatctcaatcccctacgcattgtaatggcggaattggtggggacattcattctaatgttcagtgtgtgtggggtcataagcagtacccaattatccggcggccacgtgggattgctagagtacgccgtcaccgctggattatctgtggtggtcgtagtttactccatcggacacatctctggcgcccatcttaacccttccatcaccattgctttcgctgtctttggcggattcccgtggtctcaggttccgttgtatataacggcgcaaacattgggggcaacggcggcaacattagttggggtgtcagtgtacggagtaaacgctgacattatggcaacaaaacctgctttaagctgcgtttctgcatttttcgttgaactcatagctacgagcatcgtcgtgtttctcgcctccgcgttgcattgtggtcctcatcaaaatttgggtaacttgacggggttcgtgattggaacagtcatttcccttggagtgcttattaccggaccgatttcaggaggatcgatgaacccagctcgatcacttggaccggcggtggtggcatgggattttgaagacttatggatttacatgacagctccggtgatcggagccataatcggagttttgacatacagatcaattagcctaaaaaccaggccttgcccttctccagtttccccttccgtttcttcatttttacgttaatcacttcaaaacctaatatctattatacaaataaacacttttgattttttttcttggttaaggtttttaagtttttgtcattacgtcattagatgccgtgatgcgaaaacagagagctacttatcggattgaagatatagagggtaaagcaaatgaaaacagggggcattttgttctttttacacaatgaaatgaacgcaattaaaaatctttagtc

SEQ ID NO: 24521 - protein, 275 aa, Arabidopsis thaliana
  peptide (1)..(275): Ceres Seq. ID no. 12334578
  misc_feature (39)..(252): Pfam Name: Major intrinsic protein Pfam Description: Major intrinsic protein
  misc_feature (41)..(266): Homolog of NCBI NO: 15235034 NR Description: major intrinsic protein (MIP) - like
  misc_feature (11)..(275): Homolog of NCBI NO: 21536953 NR Description: major intrinsic protein (MIP)- like [Arabidopsis
  misc_feature (50)..(265): Homolog of NCBI NO: 37536006 NR Description: putative nodulin-26 [Oryza sativa (japonica
  misc_feature (48)..(275): Homolog of NCBI NO: 15240347 NR Description: Membrane integral protein (MIP) -like; protein
  misc_feature (42)..(275): Homolog of NCBI NO: 15777893 NR Description: early embryogenesis aquaglyceroporin [Pinus taeda]
  misc_feature (34)..(275): Homolog of NCBI NO: 1076748 NR Description: major intrinsic protein - rice
  misc_feature (45)..(261): Homolog of NCBI NO: 9971217 NR Description: MIP [Adiantum capillus-veneris]
  misc_feature (34)..(275): Homolog of NCBI NO: 13447785 NR Description: NOD26-like membrane integral protein ZmNIP1-1
  misc_feature (1)..(275): Homolog of NCBI NO: 6862914 NR Description: putative major intrinsic protein [Arabidopsis
  misc_feature (1)..(275): Homolog of NCBI NO: 18397472 NR Description: putative major intrinsic protein
MNGEARSRVVDQEAGSTPSTLRDEDHPSRQRLFGCLPYDIDLNPLRIVMAELVGTFILMFSVCGVISSTQLSGGHVGLLEYAVTAGLSVVVVVYSIGHISGAHLNPSITIAFAVFGGFPWSQVPLYITAQTLGATAATLVGVSVYGVNADIMATKPALSCVSAFFVELIATSIVVFLASALHCGPHQNLGNLTGFVIGTVISLGVLITGPISGGSMNPARSLGPAVVAWDFEDLWIYMTAPVIGAIIGVLTYRSISLKTRPCPSPVSPSVSSFLR

SEQ ID NO: 24522 - protein, 227 aa, Arabidopsis thaliana
  peptide (1)..(227): Ceres Seq. ID no. 12334579
  misc_feature (1)..(204): Pfam Name: Major intrinsic protein Pfam Description: Major intrinsic protein
  misc_feature (1)..(218): Homolog of NCBI NO: 15235034 NR Description: major intrinsic protein (MIP) - like
  misc_feature (1)..(227): Homolog of NCBI NO: 21536953 NR Description: major intrinsic protein (MIP)- like [Arabidopsis
  misc_feature (2)..(217): Homolog of NCBI NO: 37536006 NR Description: putative nodulin-26 [Oryza sativa (japonica
  misc_feature (1)..(227): Homolog of NCBI NO: 15240347 NR Description: Membrane integral protein (MIP) -like; protein
  misc_feature (1)..(227): Homolog of NCBI NO: 15777893 NR Description: early embryogenesis aquaglyceroporin [Pinus taeda]
  misc_feature (1)..(227): Homolog of NCBI NO: 1076748 NR Description: major intrinsic protein - rice
  misc_feature (1)..(213): Homolog of NCBI NO: 9971217 NR Description: MIP [Adiantum capillus-veneris]
  misc_feature (1)..(227): Homolog of NCBI NO: 13447785 NR Description: NOD26-like membrane integral protein ZmNIP1-1
  misc_feature (1)..(227): Homolog of NCBI NO: 6862914 NR Description: putative major intrinsic protein [Arabidopsis
  misc_feature (1)..(227): Homolog of NCBI NO: 18397472 NR Description: putative major intrinsic protein
MAELVGTFILMFSVCGVISSTQLSGGHVGLLEYAVTAGLSVVVVVYSIGHISGAHLNPSITIAFAVFGGFPWSQVPLYITAQTLGATAATLVGVSVYGVNADIMATKPALSCVSAFFVELIATSIVVFLASALHCGPHQNLGNLTGFVIGTVISLGVLITGPISGGSMNPARSLGPAVVAWDFEDLWIYMTAPVIGAIIGVLTYRSISLKTRPCPSPVSPSVSSFLR

SEQ ID NO: 24523 - protein, 217 aa, Arabidopsis thaliana
  peptide (1)..(217): Ceres Seq. ID no. 12334580
  misc_feature (1)..(194): Pfam Name: Major intrinsic protein Pfam Description: Major intrinsic protein
  misc_feature (1)..(208): Homolog of NCBI NO: 15235034 NR Description: major intrinsic protein (MIP) - like
  misc_feature (1)..(217): Homolog of NCBI NO: 21536953 NR Description: major intrinsic protein (MIP)- like [Arabidopsis
  misc_feature (1)..(207): Homolog of NCBI NO: 37536006 NR Description: putative nodulin-26 [Oryza sativa (japonica
  misc_feature (1)..(217): Homolog of NCBI NO: 15240347 NR Description: Membrane integral protein (MIP) -like; protein
  misc_feature (1)..(217): Homolog of NCBI NO: 15777893 NR Description: early embryogenesis aquaglyceroporin [Pinus taeda]
  misc_feature (1)..(217): Homolog of NCBI NO: 1076748 NR Description: major intrinsic protein - rice
  misc_feature (1)..(203): Homolog of NCBI NO: 9971217 NR Description: MIP [Adiantum capillus-veneris]
  misc_feature (1)..(217): Homolog of NCBI NO: 13447785 NR Description: NOD26-like membrane integral protein ZmNIP1-1
  misc_feature (1)..(217): Homolog of NCBI NO: 6862914 NR Description: putative major intrinsic protein [Arabidopsis
  misc_feature (1)..(217): Homolog of NCBI NO: 18397472 NR Description: putative major intrinsic protein
MFSVCGVISSTQLSGGHVGLLEYAVTAGLSVVVVVYSIGHISGAHLNPSITIAFAVFGGFPWSQVPLYITAQTLGATAATLVGVSVYGVNADIMATKPALSCVSAFFVELIATSIVVFLASALHCGPHQNLGNLTGFVIGTVISLGVLITGPISGGSMNPARSLGPAVVAWDFEDLWIYMTAPVIGAIIGVLTYRSISLKTRPCPSPVSPSVSSFLR

SEQ ID NO: 24524 - DNA, 973 bp, Arabidopsis thaliana
  misc_feature (1)..(973): Ceres Seq. ID no. 13499864
  misc_feature: MA Experiment ID: 20000265 Result: Up-regulated in Transcription
  misc_feature: MA Experiment 20000265 PARAMETER Experiment Name: At_Open_Flower_P Parameter: Age (day) Value: 21
  misc_feature: MA Experiment 20000265 PARAMETER Experiment Name: At_Open_Flower_P Parameter: Plant Line Value: WS
  misc_feature: MA Experiment 20000265 PARAMETER Experiment Name: At_Open_Flower_P Parameter: Tissue Value: Closed Flower vs. Whole Plant
  misc_feature: MA Experiment ID: 20000286 Result: Up-regulated in Transcription
  misc_feature: MA Experiment 20000286 PARAMETER Experiment Name: At_Open_Flower_P Parameter: Age (day) Value: 21
  misc_feature: MA Experiment 20000286 PARAMETER Experiment Name: At_Open_Flower_P Parameter: Plant Line Value: WS
  misc_feature: MA Experiment 20000286 PARAMETER Experiment Name: At_Open_Flower_P Parameter: Tissue Value: Half Open vs. Whole Plant
ccctgtttgcacatcactcttctcagtcctcacgcatcgtatcagagaaaatgagctcccaaatctgcagatctgcttctagagcagccaggtctcttctttcttcagccaagaatgctcgtttcttctccgaaggccgagccattggtgcagcaagtgtggtgcatgcgactggaaaagtccctcagtatgcatccaactttggaaaatcgggttctggcttcgtctctaatagctggatcaccggactccttgctcttcctgctgcagccttcatgctccaagatcaggaagcacttgctgcagagatggaacgcactttcatcgctatcaaacctgatggagtgcagcgaggactgatatcagaaatcattacacggttcgaacgcaaaggatacaagcttgttggcattaaagtcatggttccttcaaagggtttcgcgcagaagcattaccatgatctaaaggagagacctttcttcaacggcttgtgtaacttccttagctcaggccctgttgttgccatggtatgggaaggtgaaggagtgattagatacggacgtaaactgattggagccactgatcctcagaaatcagaacctggaactatccgaggcgatctcgctgttgttgttggaaggaacattatacatggaagcgatggaccagagacagctaaagacgagatcagcttgtggtttaagcctgaagaactcgtttcttacactagtaacgctgagaagtggatctacggccagaactgaactattccctctttctcccttattttcaaccgttagatcagacataaataattacttcttttgttttttcttttacccaaacactgaaaacgtaccgggaataacaaatttactgcatttgttatcaagtttgttctaatagacccaatgaaattaggccacgtgtgcgatcatgtaaccggtttaccgtaatgtggacttgaaatccc

SEQ ID NO: 24525 - protein, 253 aa, Arabidopsis thaliana
  peptide (1)..(253): Ceres Seq. ID no. 13499865
  misc_feature (104)..(241): Pfam Name: Nucleoside diphosphate kinase Pfam Description: Nucleoside diphosphate kinase
  misc_feature (66)..(250): Homolog of NCBI NO: 19879330 NR Description: nucleoside diphosphate kinase [Dunaliella
  misc_feature (101)..(253): Homolog of NCBI NO: 6225754 NR Description: NUCLEOSIDE DIPHOSPHATE KINASE III (NDK III) (NDP
  misc_feature (17)..(252): Homolog of NCBI NO: 20218817 NR Description: putative nucleoside diphosphate kinase [Pinus
  misc_feature (59)..(253): Homolog of NCBI NO: 8272416 NR Description: nucleoside diphosphate kinase 3 [Brassica rapa]
  misc_feature (17)..(253): Homolog of NCBI NO: 19699051 NR Description: nucleoside diphosphate kinase III [Spinacia
  misc_feature (17)..(253): Homolog of NCBI NO: 6435320 NR Description: nucleoside diphosphate kinase [Pisum sativum]
  misc_feature (17)..(253): Homolog of NCBI NO: 19744167 NR Description: NDPK III [Brassica rapa]
  misc_feature (17)..(253): Homolog of NCBI NO: 15237018 NR Description: nucleoside diphosphate kinase 3 (ndpk3)
  misc_feature (17)..(253): Homolog of NCBI NO: 21593387 NR Description: nucleoside diphosphate kinase 3 (ndpk3)
  misc_feature (17)..(253): Homolog of NCBI NO: 18416233 NR Description: expressed protein [Arabidopsis thaliana]
LFAHHSSQSSRIVSEKMSSQICRSASRAARSLLSSAKNARFFSEGRAIGAASVVHATGKVPQYASNFGKSGSGFVSNSWITGLLALPAAAFMLQDQEALAAEMERTFIAIKPDGVQRGLISEIITRFERKGYKLVGIKVMVPSKGFAQKHYHDLKERPFFNGLCNFLSSGPVVAMVWEGEGVIRYGRKLIGATDPQKSEPGTIRGDLAVVVGRNIIHGSDGPETAKDEISLWFKPEELVSYTSNAEKWIYGQN

SEQ ID NO: 24526 - protein, 237 aa, Arabidopsis thaliana
  peptide (1)..(237): Ceres Seq. ID no. 13499866
  misc_feature (88)..(225): Pfam Name: Nucleoside diphosphate kinase Pfam Description: Nucleoside diphosphate kinase
  misc_feature (50)..(234): Homolog of NCBI NO: 19879330 NR Description: nucleoside diphosphate kinase [Dunaliella
  misc_feature (85)..(237): Homolog of NCBI NO: 6225754 NR Description: NUCLEOSIDE DIPHOSPHATE KINASE III (NDK III) (NDP
  misc_feature (1)..(236): Homolog of NCBI NO: 20218817 NR Description: putative nucleoside diphosphate kinase [Pinus
  misc_feature (43)..(237): Homolog of NCBI NO: 8272416 NR Description: nucleoside diphosphate kinase 3 [Brassica rapa]
  misc_feature (1)..(237): Homolog of NCBI NO: 19699051 NR Description: nucleoside diphosphate kinase III [Spinacia
  misc_feature (1)..(237): Homolog of NCBI NO: 6435320 NR Description: nucleoside diphosphate kinase [Pisum sativum]
  misc_feature (1)..(237): Homolog of NCBI NO: 19744167 NR Description: NDPK III [Brassica rapa]
  misc_feature (1)..(237): Homolog of NCBI NO: 15237018 NR Description: nucleoside diphosphate kinase 3 (ndpk3)
  misc_feature (1)..(237): Homolog of NCBI NO: 21593387 NR Description: nucleoside diphosphate kinase 3 (ndpk3)
  misc_feature (1)..(237): Homolog of NCBI NO: 18416233 NR Description: expressed protein [Arabidopsis thaliana]
MSSQICRSASRAARSLLSSAKNARFFSEGRAIGAASVVHATGKVPQYASNFGKSGSGFVSNSWITGLLALPAAAFMLQDQEALAAEMERTFIAIKPDGVQRGLISEIITRFERKGYKLVGIKVMVPSKGFAQKHYHDLKERPFFNGLCNFLSSGPVVAMVWEGEGVIRYGRKLIGATDPQKSEPGTIRGDLAVVVGRNIIHGSDGPETAKDEISLWFKPEELVSYTSNAEKWIYGQN

SEQ ID NO: 24527 - protein, 162 aa, Arabidopsis thaliana
  peptide (1)..(162): Ceres Seq. ID no. 13499867
  misc_feature (13)..(150): Pfam Name: Nucleoside diphosphate kinase Pfam Description: Nucleoside diphosphate kinase
  misc_feature (1)..(159): Homolog of NCBI NO: 19879330 NR Description: nucleoside diphosphate kinase [Dunaliella
  misc_feature (10)..(162): Homolog of NCBI NO: 6225754 NR Description: NUCLEOSIDE DIPHOSPHATE KINASE III (NDK III) (NDP
  misc_feature (1)..(161): Homolog of NCBI NO: 20218817 NR Description: putative nucleoside diphosphate kinase [Pinus
  misc_feature (1)..(162): Homolog of NCBI NO: 8272416 NR Description: nucleoside diphosphate kinase 3 [Brassica rapa]
  misc_feature (1)..(162): Homolog of NCBI NO: 19699051 NR Description: nucleoside diphosphate kinase III [Spinacia
  misc_feature (1)..(162): Homolog of NCBI NO: 6435320 NR Description: nucleoside diphosphate kinase [Pisum sativum]
  misc_feature (1)..(162): Homolog of NCBI NO: 19744167 NR Description: NDPK III [Brassica rapa]
  misc_feature (1)..(162): Homolog of NCBI NO: 15237018 NR Description: nucleoside diphosphate kinase 3 (ndpk3)
  misc_feature (1)..(162): Homolog of NCBI NO: 21593387 NR Description: nucleoside diphosphate kinase 3 (ndpk3)
  misc_feature (1)..(162): Homolog of NCBI NO: 18416233 NR Description: expressed protein [Arabidopsis thaliana]
MLQDQEALAAEMERTFIAIKPDGVQRGLISEIITRFERKGYKLVGIKVMVPSKGFAQKHYHDLKERPFFNGLCNFLSSGPVVAMVWEGEGVIRYGRKLIGATDPQKSEPGTIRGDLAVVVGRNIIHGSDGPETAKDEISLWFKPEELVSYTSNAEKWIYGQN

SEQ ID NO: 24528 - DNA, 684 bp, Arabidopsis thaliana
  misc_feature (1)..(684): Ceres Seq. ID no. 12332058
  misc_feature: MA Experiment ID: 108435 Result: Down-regulated in Transcription
  misc_feature: MA Experiment 108435 PARAMETER Experiment Name: At_stm_Mutants_cDNA_P Parameter: Plant Line Value: wt Landsburg vs stm
  misc_feature: MA Experiment 108435 PARAMETER Experiment Name: At_stm_Mutants_cDNA_P Parameter: Tissue Value: Shoot Apical Meristem Region
  misc_feature: MA Experiment ID: 108464 Result: Up-regulated in Transcription
  misc_feature: MA Experiment 108464 PARAMETER Experiment Name: At_Germinating_Seeds_cDNA_P Parameter: Age (day) Value: 4 vs. 0
  misc_feature: MA Experiment 108464 PARAMETER Experiment Name: At_Germinating_Seeds_cDNA_P Parameter: Tissue Value: Germinating Seeds
  misc_feature: MA Experiment ID: 108488 Result: Down-regulated in Transcription
  misc_feature: MA Experiment ID: 108572 Result: Down-regulated in Transcription
  misc_feature: MA Experiment 108572 PARAMETER Experiment Name: At_Drought_cDNA_P Parameter: Timepoint (hr) Value: 1
  misc_feature: MA Experiment 108572 PARAMETER Experiment Name: At_Drought_cDNA_P Parameter: Tissue Value: Aerial
  misc_feature: MA Experiment 108572 PARAMETER Experiment Name: At_Drought_cDNA_P Parameter: Treatment Value: Drought vs. No Drought
  misc_feature: MA Experiment ID: 108573 Result: Down-regulated in Transcription
  misc_feature: MA Experiment 108573 PARAMETER Experiment Name: At_Drought_cDNA_P Parameter: Timepoint (hr) Value: 6
  misc_feature: MA Experiment 108573 PARAMETER Experiment Name: At_Drought_cDNA_P Parameter: Tissue Value: Aerial
  misc_feature: MA Experiment 108573 PARAMETER Experiment Name: At_Drought_cDNA_P Parameter: Treatment Value: Drought vs. No Drought
  misc_feature: MA Experiment ID: 108585 Result: Down-regulated in Transcription
  misc_feature: MA Experiment 108585 PARAMETER Experiment Name: At_5mM_NaNP_cDNA_P Parameter: Timepoint (hr) Value: 6
  misc_feature: MA Experiment 108585 PARAMETER Experiment Name: At_5mM_NaNP_cDNA_P Parameter: Tissue Value: Aerial
  misc_feature: MA Experiment 108585 PARAMETER Experiment Name: At_5mM_NaNP_cDNA_P Parameter: Treatment Value: null
  misc_feature: MA Experiment ID: 108595 Result: Down-regulated in Transcription
  misc_feature: MA Experiment 108595 PARAMETER Experiment Name: At_Ler-pi_Ovule_cDNA_P Parameter: Plant Line Value: null
  misc_feature: MA Experiment ID: 20000069 Result: Up-regulated in Transcription
  misc_feature: MA Experiment 20000069 PARAMETER Experiment Name: At_100uM_ABA_Mutants_cDNA_P Parameter: Plant Line Value: CS23
  misc_feature: MA Experiment 20000069 PARAMETER Experiment Name: At_100uM_ABA_Mutants_cDNA_P Parameter: Timepoint (hr) Value: 6
  misc_feature: MA Experiment 20000069 PARAMETER Experiment Name: At_100uM_ABA_Mutants_cDNA_P Parameter: Tissue Value: Aerial
  misc_feature: MA Experiment 20000069 PARAMETER Experiment Name: At_100uM_ABA_Mutants_cDNA_P Parameter: Treatment Value: 100uM ABA vs. No Treatment
  misc_feature: MA Experiment ID: 20000070 Result: Up-regulated in Transcription
  misc_feature: MA Experiment 20000070 PARAMETER Experiment Name: At_100uM_ABA_Mutants_cDNA_P Parameter: Plant Line Value: CS24
  misc_feature: MA Experiment 20000070 PARAMETER Experiment Name: At_100uM_ABA_Mutants_cDNA_P Parameter: Timepoint (hr) Value: 6
  misc_feature: MA Experiment 20000070 PARAMETER Experiment Name: At_100uM_ABA_Mutants_cDNA_P Parameter: Tissue Value: Aerial
  misc_feature: MA Experiment 20000070 PARAMETER Experiment Name: At_100uM_ABA_Mutants_cDNA_P Parameter: Treatment Value: 100uM ABA vs. No Treatment
  misc_feature: MA Experiment ID: 20000071 Result: Up-regulated in Transcription
  misc_feature: MA Experiment 20000071 PARAMETER Experiment Name: At_100uM_ABA_Mutants_cDNA_P Parameter: Plant Line Value: CS8104
  misc_feature: MA Experiment 20000071 PARAMETER Experiment Name: At_100uM_ABA_Mutants_cDNA_P Parameter: Timepoint (hr) Value: 6
  misc_feature: MA Experiment 20000071 PARAMETER Experiment Name: At_100uM_ABA_Mutants_cDNA_P Parameter: Tissue Value: Aerial
  misc_feature: MA Experiment 20000071 PARAMETER Experiment Name: At_100uM_ABA_Mutants_cDNA_P Parameter: Treatment Value: 100uM ABA vs. No Treatment
  misc_feature: MA Experiment ID: 20000089 Result: Up-regulated in Transcription
  misc_feature: MA Experiment ID: 20000093 Result: Down-regulated in Transcription
  misc_feature: MA Experiment 20000093 PARAMETER Experiment Name: At_42deg_Heat_cDNA_P Parameter: Temperature (deg C) Value: 42 vs. 22
  misc_feature: MA Experiment 20000093 PARAMETER Experiment Name: At_42deg_Heat_cDNA_P Parameter: Timepoint (hr) Value: 0.5
  misc_feature: MA Experiment 20000093 PARAMETER Experiment Name: At_42deg_Heat_cDNA_P Parameter: Tissue Value: Aerial
  misc_feature: MA Experiment ID: 20000112 Result: Down-regulated in Transcription
  misc_feature: MA Experiment 20000112 PARAMETER Experiment Name: At_42deg_Heat_cDNA_P Parameter: Temperature (deg C) Value: 42 vs. 22
  misc_feature: MA Experiment 20000112 PARAMETER Experiment Name: At_42deg_Heat_cDNA_P Parameter: Timepoint (hr) Value: 2
  misc_feature: MA Experiment 20000112 PARAMETER Experiment Name: At_42deg_Heat_cDNA_P Parameter: Tissue Value: Aerial
  misc_feature: MA Experiment ID: 20000117 Result: Up-regulated in Transcription
  misc_feature: MA Experiment 20000117 PARAMETER Experiment Name: At_100uM_ABA_Mutants_cDNA_P Parameter: Plant Line Value: Columbia
  misc_feature: MA Experiment 20000117 PARAMETER Experiment Name: At_100uM_ABA_Mutants_cDNA_P Parameter: Timepoint (hr) Value: 6
  misc_feature: MA Experiment 20000117 PARAMETER Experiment Name: At_100uM_ABA_Mutants_cDNA_P Parameter: Tissue Value: Aerial
  misc_feature: MA Experiment 20000117 PARAMETER Experiment Name: At_100uM_ABA_Mutants_cDNA_P Parameter: Treatment Value: 100uM ABA vs. No Treatment
  misc_feature: MA Experiment ID: 20000144 Result: Down-regulated in Transcription
  misc_feature: MA Experiment 20000144 PARAMETER Experiment Name: At_42deg_Heat_cDNA_P Parameter: Temperature (deg C) Value: 42 vs. 22
  misc_feature: MA Experiment 20000144 PARAMETER Experiment Name: At_42deg_Heat_cDNA_P Parameter: Timepoint (hr) Value: 1
  misc_feature: MA Experiment 20000144 PARAMETER Experiment Name: At_42deg_Heat_cDNA_P Parameter: Tissue Value: Aerial
  misc_feature: MA Experiment ID: 20000171 Result: Down-regulated in Transcription
  misc_feature: MA Experiment 20000171 PARAMETER Experiment Name: At_42deg_Heat_P Parameter: Age (day) Value: 14
  misc_feature: MA Experiment 20000171 PARAMETER Experiment Name: At_42deg_Heat_P Parameter: Organism Value: A. thaliana
  misc_feature: MA Experiment 20000171 PARAMETER Experiment Name: At_42deg_Heat_P Parameter: Plant Line Value: WS
  misc_feature: MA Experiment 20000171 PARAMETER Experiment Name: At_42deg_Heat_P Parameter: Temperature (deg C) Value: 42 vs. 22
  misc_feature: MA Experiment 20000171 PARAMETER Experiment Name: At_42deg_Heat_P Parameter: Timepoint (hr) Value: 1
  misc_feature: MA Experiment 20000171 PARAMETER Experiment Name: At_42deg_Heat_P Parameter: Tissue Value: Aerial
  misc_feature: MA Experiment ID: 20000173 Result: Down-regulated in Transcription
  misc_feature: MA Experiment 20000173 PARAMETER Experiment Name: At_42deg_Heat_P Parameter: Age (day) Value: 14
  misc_feature: MA Experiment 20000173 PARAMETER Experiment Name: At_42deg_Heat_P Parameter: Organism Value: A. thaliana
  misc_feature: MA Experiment 20000173 PARAMETER Experiment Name: At_42deg_Heat_P Parameter: Plant Line Value: WS
  misc_feature: MA Experiment 20000173 PARAMETER Experiment Name: At_42deg_Heat_P Parameter: Temperature (deg C) Value: 42 vs. 22
  misc_feature: MA Experiment 20000173 PARAMETER Experiment Name: At_42deg_Heat_P Parameter: Timepoint (hr) Value: 6
  misc_feature: MA Experiment 20000173 PARAMETER Experiment Name: At_42deg_Heat_P Parameter: Tissue Value: Aerial
  misc_feature: MA Experiment ID: 20000180 Result: Down-regulated in Transcription
  misc_feature: MA Experiment 20000180 PARAMETER Experiment Name: At_Germinating_Seeds_P Parameter: Age (hr) Value: 24 vs. 0
  misc_feature: MA Experiment 20000180 PARAMETER Experiment Name: At_Germinating_Seeds_P Parameter: Tissue Value: Germinating Seeds
  misc_feature: MA Experiment ID: 20000184 Result: Down-regulated in Transcription
  misc_feature: MA Experiment 20000184 PARAMETER Experiment Name: At_Shoots__P Parameter: Age (day) Value: 7
  misc_feature: MA Experiment 20000184 PARAMETER Experiment Name: At_Shoots__P Parameter: Tissue Value: Shoots vs. Whole Plant
  misc_feature: MA Experiment ID: 20000227 Result: Down-regulated in Transcription
  misc_feature: MA Experiment 20000227 PARAMETER Experiment Name: At_Root-Tips-vs-Tops_P Parameter: Tissue Value: Root Tips vs. Root Tops
  misc_feature: MA Experiment ID: 20000234 Result: Down-regulated in Transcription
  misc_feature: MA Experiment 20000234 PARAMETER Experiment Name: At_Siliques_P Parameter: Age (day) Value: 21
  misc_feature: MA Experiment 20000234 PARAMETER Experiment Name: At_Siliques_P Parameter: Organism Value: A. thaliana
  misc_feature: MA Experiment 20000234 PARAMETER Experiment Name: At_Siliques_P Parameter: Plant Line Value: WS
  misc_feature: MA Experiment 20000234 PARAMETER Experiment Name: At_Siliques_P Parameter: Tissue Value: Less Than 5mm Siliques vs. Whole Plant
  misc_feature: MA Experiment ID: 20000235 Result: Down-regulated in Transcription
  misc_feature: MA Experiment 20000235 PARAMETER Experiment Name: At_Siliques_P Parameter: Age (day) Value: 21
  misc_feature: MA Experiment 20000235 PARAMETER Experiment Name: At_Siliques_P Parameter: Organism Value: A. thaliana
  misc_feature: MA Experiment 20000235 PARAMETER Experiment Name: At_Siliques_P Parameter: Plant Line Value: WS
  misc_feature: MA Experiment 20000235 PARAMETER Experiment Name: At_Siliques_P Parameter: Tissue Value: 5-10mm Siliques vs. Whole Plant
  misc_feature: MA Experiment ID: 20000438 Result: Down-regulated in Transcription
  misc_feature: MA Experiment 20000438 PARAMETER Experiment Name: At_Shoots__P Parameter: Age (day) Value: 14
  misc_feature: MA Experiment 20000438 PARAMETER Experiment Name: At_Shoots__P Parameter: Tissue Value: Shoots vs. Whole Plant
  misc_feature: MA Experiment ID: 20000451 Result: Down-regulated in Transcription
  misc_feature: MA Experiment 20000451 PARAMETER Experiment Name: At_CS6879_Shoots-Roots_P Parameter: Age (day) Value: 14
  misc_feature: MA Experiment 20000451 PARAMETER Experiment Name: At_CS6879_Shoots-Roots_P Parameter: Organism Value: A. thaliana
  misc_feature: MA Experiment 20000451 PARAMETER Experiment Name: At_CS6879_Shoots-Roots_P Parameter: Plant Line Value: CS6879 vs. WS
  misc_feature: MA Experiment 20000451 PARAMETER Experiment Name: At_CS6879_Shoots-Roots_P Parameter: Tissue Value: Roots
  misc_feature: MA Experiment ID: 20000495 Result: Down-regulated in Transcription
  misc_feature: MA Experiment 20000495 PARAMETER Experiment Name: At_Guard_Cells_P Parameter: Harvest Date Value: 8/2/2002
  misc_feature: MA Experiment 20000495 PARAMETER Experiment Name: At_Guard_Cells_P Parameter: Organism Value: A. thaliana
  misc_feature: MA Experiment 20000495 PARAMETER Experiment Name: At_Guard_Cells_P Parameter: Tissue Value: Guard Cells vs. Leaves
  misc_feature: MA Experiment ID: 20001247 Result: Down-regulated in Transcription
  misc_feature: MA Experiment 20001247 PARAMETER Experiment Name: At_Far-red-induction_P Parameter: Age (day) Value: 7
  misc_feature: MA Experiment 20001247 PARAMETER Experiment Name: At_Far-red-induction_P Parameter: Light Value: Far-red vs. White
  misc_feature: MA Experiment 20001247 PARAMETER Experiment Name: At_Far-red-induction_P Parameter: Organism Value: A. thaliana
  misc_feature: MA Experiment 20001247 PARAMETER Experiment Name: At_Far-red-induction_P Parameter: Plant Line Value: Columbia
  misc_feature: MA Experiment 20001247 PARAMETER Experiment Name: At_Far-red-induction_P Parameter: Timepoint (hr) Value: 1
  misc_feature: MA Experiment 20001247 PARAMETER Experiment Name: At_Far-red-induction_P Parameter: Tissue Value: Whole Plant
  misc_feature: MA Experiment ID: 20001451 Result: Down-regulated in Transcription
  misc_feature: MA Experiment 20001451 PARAMETER Experiment Name: At_Far-red-induction_P Parameter: Age (day) Value: 7
  misc_feature: MA Experiment 20001451 PARAMETER Experiment Name: At_Far-red-induction_P Parameter: Light Value: Far-red vs. White
  misc_feature: MA Experiment 20001451 PARAMETER Experiment Name: At_Far-red-induction_P Parameter: Organism Value: A. thaliana
  misc_feature: MA Experiment 20001451 PARAMETER Experiment Name: At_Far-red-induction_P Parameter: Plant Line Value: Columbia
  misc_feature: MA Experiment 20001451 PARAMETER Experiment Name: At_Far-red-induction_P Parameter: Timepoint (hr) Value: 24
  misc_feature: MA Experiment 20001451 PARAMETER Experiment Name: At_Far-red-induction_P Parameter: Tissue Value: Whole Plant
  misc_feature: MA Experiment ID: 20001557 Result: Down-regulated in Transcription
  misc_feature: MA Experiment 20001557 PARAMETER Experiment Name: At_Drought_Soil_Dry_P Parameter: Age (day) Value: 27
  misc_feature: MA Experiment 20001557 PARAMETER Experiment Name: At_Drought_Soil_Dry_P Parameter: Organism Value: A. thaliana
  misc_feature: MA Experiment 20001557 PARAMETER Experiment Name: At_Drought_Soil_Dry_P Parameter: Plant Line Value: WS
  misc_feature: MA Experiment 20001557 PARAMETER Experiment Name: At_Drought_Soil_Dry_P Parameter: Post Timepoint (hr) Value: 3
  misc_feature: MA Experiment 20001557 PARAMETER Experiment Name: At_Drought_Soil_Dry_P Parameter: Post-Treatment Value: Re-Water vs. No Drought
  misc_feature: MA Experiment 20001557 PARAMETER Experiment Name: At_Drought_Soil_Dry_P Parameter: Timepoint (day) Value: 13
  misc_feature: MA Experiment 20001557 PARAMETER Experiment Name: At_Drought_Soil_Dry_P Parameter: Treatment Value: Drought vs. No Drought
  misc_feature: MA Experiment ID: 20001558 Result: Down-regulated in Transcription
  misc_feature: MA Experiment 20001558 PARAMETER Experiment Name: At_Drought_Soil_Dry_P Parameter: Age (day) Value: 27
  misc_feature: MA Experiment 20001558 PARAMETER Experiment Name: At_Drought_Soil_Dry_P Parameter: Organism Value: A. thaliana
  misc_feature: MA Experiment 20001558 PARAMETER Experiment Name: At_Drought_Soil_Dry_P Parameter: Plant Line Value: WS
  misc_feature: MA Experiment 20001558 PARAMETER Experiment Name: At_Drought_Soil_Dry_P Parameter: Post Timepoint (hr) Value: 6
  misc_feature: MA Experiment 20001558 PARAMETER Experiment Name: At_Drought_Soil_Dry_P Parameter: Post-Treatment Value: Re-Water vs. No Drought
  misc_feature: MA Experiment 20001558 PARAMETER Experiment Name: At_Drought_Soil_Dry_P Parameter: Timepoint (day) Value: 13
  misc_feature: MA Experiment 20001558 PARAMETER Experiment Name: At_Drought_Soil_Dry_P Parameter: Treatment Value: Drought vs. No Drought
  misc_feature: MA Experiment ID: 20001560 Result: Down-regulated in Transcription
  misc_feature: MA Experiment 20001560 PARAMETER Experiment Name: At_Drought_Soil_Dry_P Parameter: Age (day) Value: 28
  misc_feature: MA Experiment 20001560 PARAMETER Experiment Name: At_Drought_Soil_Dry_P Parameter: Organism Value: A. thaliana
  misc_feature: MA Experiment 20001560 PARAMETER Experiment Name: At_Drought_Soil_Dry_P Parameter: Plant Line Value: WS
  misc_feature: MA Experiment 20001560 PARAMETER Experiment Name: At_Drought_Soil_Dry_P Parameter: Post Timepoint (hr) Value: None
  misc_feature: MA Experiment 20001560 PARAMETER Experiment Name: At_Drought_Soil_Dry_P Parameter: Post-Treatment Value: None
  misc_feature: MA Experiment 20001560 PARAMETER Experiment Name: At_Drought_Soil_Dry_P Parameter: Timepoint (day) Value: 14
  misc_feature: MA Experiment 20001560 PARAMETER Experiment Name: At_Drought_Soil_Dry_P Parameter: Treatment Value: Drought vs. No Drought
atcttcttcatcatcatcaatcacaaaaatccaaatcccaaaactttcccgagaaaactaaaaaaatggcaccaaaagccggaaagaaaccagcagagaaaaagcccgcagagaaagctccagcagaagaagagaaagtagccgaaaaagcaccagcagagaagaaaccaaaagccggaaaaaaactaccaaaagaagcagtcaccggaggagtcgagaagaagaagaaacgagtcaagaaaagcacagagacatacaagatctacatcttcaaggtgttgaaacaagttcatccagatattggaatctcaagtaaagctatggggattatgaacagttttatcaatgatatattcgagaaacttgcgcaagaagcttcaaaattagctaggtataataagaaacctacgattacttctagggagattcagacagctgttagactagtgttacctggtgaacttgctaagcatgctgtttctgaaggaactaaggctgttactaagtttactagctcttaggtttagccgtttaggtttcgaatcttggttcgttttgatatggaatctgatggtttttatgtaatttgttgaagattgtaatggtgttaatgttttctttttaatttggattttgtgtttagtgacttgggattctacaagaagtttgatatttatgaatgtt

SEQ ID NO: 24529 - protein, 172 aa, Arabidopsis thaliana
  peptide (1)..(172): Ceres Seq. ID no. 12332059
  misc_feature (31)..(171): Pfam Name: Core histone H2A/H2B/H3/H4 Pfam Description: Core histone H2A/H2B/H3/H4
  misc_feature (31)..(171): Pfam Name: Core histone H2A/H2B/H3/H4 Pfam Description: Core histone H2A/H2B/H3/H4
  misc_feature (22)..(172): Homolog of NCBI NO: 7387727 NR Description: Histone H2B (CaH2B)
  misc_feature (29)..(172): Homolog of NCBI NO: 7439754 NR Description: histone H2B-3 - tomato (fragment)
  misc_feature (22)..(172): Homolog of NCBI NO: 15231313 NR Description: histone H2B -like protein
  misc_feature (22)..(172): Homolog of NCBI NO: 21617908 NR Description: histone H2B [Arabidopsis thaliana]
  misc_feature (22)..(172): Homolog of NCBI NO: 15223016 NR Description: histone H2B
  misc_feature (22)..(172): Homolog of NCBI NO: 7387727 NR Description: Histone H2B (CaH2B)
  misc_feature (22)..(172): Homolog of NCBI NO: 15231313 NR Description: histone H2B -like protein
  misc_feature (22)..(172): Homolog of NCBI NO: 15223016 NR Description: histone H2B
  misc_feature (22)..(172): Homolog of NCBI NO: 15226943 NR Description: putative histone H2B
  misc_feature (22)..(172): Homolog of NCBI NO: 15238563 NR Description: histone H2B - like protein
  misc_feature (22)..(172): Homolog of NCBI NO: 21554180 NR Description: histone H2B-like protein [Arabidopsis thaliana]
  misc_feature (22)..(172): Homolog of NCBI NO: 15231304 NR Description: histone H2B; protein id: At3g45980.1, supported
  misc_feature (22)..(172): Homolog of NCBI NO: 7387726 NR Description: Histone H2B
  misc_feature (22)..(172): Homolog of NCBI NO: 21617908 NR Description: histone H2B [Arabidopsis thaliana]
  misc_feature (29)..(172): Homolog of NCBI NO: 7439754 NR Description: histone H2B-3 - tomato (fragment)
  misc_feature (22)..(172): Homolog of NCBI NO: 7387726 NR Description: Histone H2B
  misc_feature (22)..(172): Homolog of NCBI NO: 15231304 NR Description: histone H2B; protein id: At3g45980.1, supported
  misc_feature (22)..(172): Homolog of NCBI NO: 21554180 NR Description: histone H2B-like protein [Arabidopsis thaliana]
  misc_feature (22)..(172): Homolog of NCBI NO: 15238563 NR Description: histone H2B - like protein
  misc_feature (22)..(172): Homolog of NCBI NO: 15226943 NR Description: putative histone H2B
LLHHHQSQKSKSQNFPEKTKKMAPKAGKKPAEKKPAEKAPAEEEKVAEKAPAEKKPKAGKKLPKEAVTGGVEKKKKRVKKSTETYKIYIFKVLKQVHPDIGISSKAMGIMNSFINDIFEKLAQEASKLARYNKKPTITSREIQTAVRLVLPGELAKHAVSEGTKAVTKFTSS

SEQ ID NO: 24530 - protein, 151 aa, Arabidopsis thaliana
  peptide (1)..(151): Ceres Seq. ID no. 12332060
  misc_feature (10)..(150): Pfam Name: Core histone H2A/H2B/H3/H4 Pfam Description: Core histone H2A/H2B/H3/H4
  misc_feature (10)..(150): Pfam Name: Core histone H2A/H2B/H3/H4 Pfam Description: Core histone H2A/H2B/H3/H4
  misc_feature (1)..(151): Homolog of NCBI NO: 7387727 NR Description: Histone H2B (CaH2B)
  misc_feature (8)..(151): Homolog of NCBI NO: 7439754 NR Description: histone H2B-3 - tomato (fragment)
  misc_feature (1)..(151): Homolog of NCBI NO: 15231313 NR Description: histone H2B -like protein
  misc_feature (1)..(151): Homolog of NCBI NO: 21617908 NR Description: histone H2B [Arabidopsis thaliana]
  misc_feature (1)..(151): Homolog of NCBI NO: 15223016 NR Description: histone H2B
  misc_feature (1)..(151): Homolog of NCBI NO: 7387727 NR Description: Histone H2B (CaH2B)
  misc_feature (1)..(151): Homolog of NCBI NO: 15231313 NR Description: histone H2B -like protein
  misc_feature (1)..(151): Homolog of NCBI NO: 15223016 NR Description: histone H2B
  misc_feature (1)..(151): Homolog of NCBI NO: 15226943 NR Description: putative histone H2B
  misc_feature (1)..(151): Homolog of NCBI NO: 15238563 NR Description: histone H2B - like protein
  misc_feature (1)..(151): Homolog of NCBI NO: 21554180 NR Description: histone H2B-like protein [Arabidopsis thaliana]
  misc_feature (1)..(151): Homolog of NCBI NO: 15231304 NR Description: histone H2B; protein id: At3g45980.1, supported
  misc_feature (1)..(151): Homolog of NCBI NO: 7387726 NR Description: Histone H2B
  misc_feature (1)..(151): Homolog of NCBI NO: 21617908 NR Description: histone H2B [Arabidopsis thaliana]
  misc_feature (8)..(151): Homolog of NCBI NO: 7439754 NR Description: histone H2B-3 - tomato (fragment)
  misc_feature (1)..(151): Homolog of NCBI NO: 7387726 NR Description: Histone H2B
  misc_feature (1)..(151): Homolog of NCBI NO: 15231304 NR Description: histone H2B; protein id: At3g45980.1, supported
  misc_feature (1)..(151): Homolog of NCBI NO: 21554180 NR Description: histone H2B-like protein [Arabidopsis thaliana]
  misc_feature (1)..(151): Homolog of NCBI NO: 15238563 NR Description: histone H2B - like protein
  misc_feature (1)..(151): Homolog of NCBI NO: 15226943 NR Description: putative histone H2B
MAPKAGKKPAEKKPAEKAPAEEEKVAEKAPAEKKPKAGKKLPKEAVTGGVEKKKKRVKKSTETYKIYIFKVLKQVHPDIGISSKAMGIMNSFINDIFEKLAQEASKLARYNKKPTITSREIQTAVRLVLPGELAKHAVSEGTKAVTKFTSS

SEQ ID NO: 24531 - DNA, 1280 bp, Arabidopsis thaliana
  misc_feature (1)..(1280): Ceres Seq. ID no. 13492384
  misc_feature: MA Experiment ID: 108434 Result: Down-regulated in Transcription
  misc_feature: MA Experiment 108434 PARAMETER Experiment Name: At_Root_Tips_cDNA_P Parameter: Tissue Value: Root Tips
  misc_feature: MA Experiment ID: 108462 Result: Up-regulated in Transcription
  misc_feature: MA Experiment 108462 PARAMETER Experiment Name: At_Germinating_Seeds_cDNA_P Parameter: Age (day) Value: 2 vs. 0
  misc_feature: MA Experiment 108462 PARAMETER Experiment Name: At_Germinating_Seeds_cDNA_P Parameter: Tissue Value: Germinating Seeds
  misc_feature: MA Experiment ID: 108463 Result: Up-regulated in Transcription
  misc_feature: MA Experiment 108463 PARAMETER Experiment Name: At_Germinating_Seeds_cDNA_P Parameter: Age (day) Value: 3 vs. 0
  misc_feature: MA Experiment 108463 PARAMETER Experiment Name: At_Germinating_Seeds_cDNA_P Parameter: Tissue Value: Germinating Seeds
  misc_feature: MA Experiment ID: 108464 Result: Up-regulated in Transcription
  misc_feature: MA Experiment 108464 PARAMETER Experiment Name: At_Germinating_Seeds_cDNA_P Parameter: Age (day) Value: 4 vs. 0
  misc_feature: MA Experiment 108464 PARAMETER Experiment Name: At_Germinating_Seeds_cDNA_P Parameter: Tissue Value: Germinating Seeds
  misc_feature: MA Experiment ID: 108469 Result: Up-regulated in Transcription
  misc_feature: MA Experiment ID: 108473 Result: Down-regulated in Transcription
  misc_feature: MA Experiment 108473 PARAMETER Experiment Name: At_Drought_Flowers_cDNA_P Parameter: Timepoint (hr) Value: 7 d
  misc_feature: MA Experiment 108473 PARAMETER Experiment Name: At_Drought_Flowers_cDNA_P Parameter: Tissue Value: Flower
  misc_feature: MA Experiment 108473 PARAMETER Experiment Name: At_Drought_Flowers_cDNA_P Parameter: Treatment Value: Drought vs. No Drought
  misc_feature: MA Experiment ID: 108489 Result: Down-regulated in Transcription
  misc_feature: MA Experiment ID: 108572 Result: Down-regulated in Transcription
  misc_feature: MA Experiment 108572 PARAMETER Experiment Name: At_Drought_cDNA_P Parameter: Timepoint (hr) Value: 1
  misc_feature: MA Experiment 108572 PARAMETER Experiment Name: At_Drought_cDNA_P Parameter: Tissue Value: Aerial
  misc_feature: MA Experiment 108572 PARAMETER Experiment Name: At_Drought_cDNA_P Parameter: Treatment Value: Drought vs. No Drought
  misc_feature: MA Experiment ID: 108573 Result: Down-regulated in Transcription
  misc_feature: MA Experiment 108573 PARAMETER Experiment Name: At_Drought_cDNA_P Parameter: Timepoint (hr) Value: 6
  misc_feature: MA Experiment 108573 PARAMETER Experiment Name: At_Drought_cDNA_P Parameter: Tissue Value: Aerial
  misc_feature: MA Experiment 108573 PARAMETER Experiment Name: At_Drought_cDNA_P Parameter: Treatment Value: Drought vs. No Drought
  misc_feature: MA Experiment ID: 108574 Result: Up-regulated in Transcription
  misc_feature: MA Experiment 108574 PARAMETER Experiment Name: At_Wounding__cDNA_P Parameter: Timepoint (hr) Value: 1
  misc_feature: MA Experiment 108574 PARAMETER Experiment Name: At_Wounding__cDNA_P Parameter: Tissue Value: Aerial
  misc_feature: MA Experiment 108574 PARAMETER Experiment Name: At_Wounding__cDNA_P Parameter: Treatment Value: Wounding vs. No Wounding
  misc_feature: MA Experiment ID: 108579 Result: Up-regulated in Transcription
  misc_feature: MA Experiment 108579 PARAMETER Experiment Name: At_4deg_Cold_cDNA_P Parameter: Temperature (deg C) Value: 4 vs. 22
  misc_feature: MA Experiment 108579 PARAMETER Experiment Name: At_4deg_Cold_cDNA_P Parameter: Timepoint (hr) Value: 6
  misc_feature: MA Experiment 108579 PARAMETER Experiment Name: At_4deg_Cold_cDNA_P Parameter: Tissue Value: Aerial
  misc_feature: MA Experiment ID: 108585 Result: Up-regulated in Transcription
  misc_feature: MA Experiment 108585 PARAMETER Experiment Name: At_5mM_NaNP_cDNA_P Parameter: Timepoint (hr) Value: 6
  misc_feature: MA Experiment 108585 PARAMETER Experiment Name: At_5mM_NaNP_cDNA_P Parameter: Tissue Value: Aerial
  misc_feature: MA Experiment 108585 PARAMETER Experiment Name: At_5mM_NaNP_cDNA_P Parameter: Treatment Value: null
  misc_feature: MA Experiment ID: 108594 Result: Down-regulated in Transcription
  misc_feature: MA Experiment 108594 PARAMETER Experiment Name: At_Ler-rhl_Root_cDNA_P Parameter: Plant Line Value: null
  misc_feature: MA Experiment ID: 108595 Result: Up-regulated in Transcription
  misc_feature: MA Experiment 108595 PARAMETER Experiment Name: At_Ler-pi_Ovule_cDNA_P Parameter: Plant Line Value: null
  misc_feature: MA Experiment ID: 108608 Result: Down-regulated in Transcription
  misc_feature: MA Experiment 108608 PARAMETER Experiment Name: At_100uM_ABA_cDNA_P Parameter: Timepoint (hr) Value: 1
  misc_feature: MA Experiment 108608 PARAMETER Experiment Name: At_100uM_ABA_cDNA_P Parameter: Tissue Value: Aerial
  misc_feature: MA Experiment 108608 PARAMETER Experiment Name: At_100uM_ABA_cDNA_P Parameter: Treatment Value: 100uM ABA vs. No Treatment
  misc_feature: MA Experiment ID: 108667 Result: Up-regulated in Transcription
  misc_feature: MA Experiment 108667 PARAMETER Experiment Name: At_2mM_SA_cDNA_P Parameter: Plant Line Value: WS
  misc_feature: MA Experiment 108667 PARAMETER Experiment Name: At_2mM_SA_cDNA_P Parameter: Timepoint (hr) Value: 1
  misc_feature: MA Experiment 108667 PARAMETER Experiment Name: At_2mM_SA_cDNA_P Parameter: Treatment Value: 2mM SA vs. No Treatment
  misc_feature: MA Experiment ID: 108668 Result: Up-regulated in Transcription
  misc_feature: MA Experiment 108668 PARAMETER Experiment Name: At_2mM_SA_cDNA_P Parameter: Plant Line Value: WS
  misc_feature: MA Experiment 108668 PARAMETER Experiment Name: At_2mM_SA_cDNA_P Parameter: Timepoint (hr) Value: 6
  misc_feature: MA Experiment 108668 PARAMETER Experiment Name: At_2mM_SA_cDNA_P Parameter: Treatment Value: 2mM SA vs. No Treatment
  misc_feature: MA Experiment ID: 20000089 Result: Up-regulated in Transcription
  misc_feature: MA Experiment ID: 20000166 Result: Down-regulated in Transcription
  misc_feature: MA Experiment 20000166 PARAMETER Experiment Name: At_100uM_ABA_P Parameter: Age (day) Value: 14
  misc_feature: MA Experiment 20000166 PARAMETER Experiment Name: At_100uM_ABA_P Parameter: Organism Value: A. thaliana
  misc_feature: MA Experiment 20000166 PARAMETER Experiment Name: At_100uM_ABA_P Parameter: Plant Line Value: WS
  misc_feature: MA Experiment 20000166 PARAMETER Experiment Name: At_100uM_ABA_P Parameter: Timepoint (hr) Value: 1
  misc_feature: MA Experiment 20000166 PARAMETER Experiment Name: At_100uM_ABA_P Parameter: Tissue Value: Aerial
  misc_feature: MA Experiment 20000166 PARAMETER Experiment Name: At_100uM_ABA_P Parameter: Treatment Value: 100uM ABA vs. No Treatment
  misc_feature: MA Experiment ID: 20000182 Result: Up-regulated in Transcription
  misc_feature: MA Experiment 20000182 PARAMETER Experiment Name: At_2mM_SA_P Parameter: Age (day) Value: 14
  misc_feature: MA Experiment 20000182 PARAMETER Experiment Name: At_2mM_SA_P Parameter: Organism Value: A. thaliana
  misc_feature: MA Experiment 20000182 PARAMETER Experiment Name: At_2mM_SA_P Parameter: Plant Line Value: WS
  misc_feature: MA Experiment 20000182 PARAMETER Experiment Name: At_2mM_SA_P Parameter: Timepoint (hr) Value: 6
  misc_feature: MA Experiment 20000182 PARAMETER Experiment Name: At_2mM_SA_P Parameter: Tissue Value: Aerial
  misc_feature: MA Experiment 20000182 PARAMETER Experiment Name: At_2mM_SA_P Parameter: Treatment Value: 2mM SA vs. No Treatment
  misc_feature: MA Experiment ID: 20000213 Result: Up-regulated in Transcription
  misc_feature: MA Experiment 20000213 PARAMETER Experiment Name: At_4deg_Cold_P Parameter: Timepoint (hr) Value: 2
  misc_feature: MA Experiment ID: 20000234 Result: Down-regulated in Transcription
  misc_feature: MA Experiment 20000234 PARAMETER Experiment Name: At_Siliques_P Parameter: Age (day) Value: 21
  misc_feature: MA Experiment 20000234 PARAMETER Experiment Name: At_Siliques_P Parameter: Organism Value: A. thaliana
  misc_feature: MA Experiment 20000234 PARAMETER Experiment Name: At_Siliques_P Parameter: Plant Line Value: WS
  misc_feature: MA Experiment 20000234 PARAMETER Experiment Name: At_Siliques_P Parameter: Tissue Value: Less Than 5mm Siliques vs. Whole Plant
  misc_feature: MA Experiment ID: 20000264 Result: Down-regulated in Transcription
  misc_feature: MA Experiment 20000264 PARAMETER Experiment Name: At_Open_Flower_P Parameter: Age (day) Value: 21
  misc_feature: MA Experiment 20000264 PARAMETER Experiment Name: At_Open_Flower_P Parameter: Plant Line Value: WS
  misc_feature: MA Experiment 20000264 PARAMETER Experiment Name: At_Open_Flower_P Parameter: Tissue Value: Open Flower vs. Whole Plant
  misc_feature: MA Experiment ID: 20000265 Result: Down-regulated in Transcription
  misc_feature: MA Experiment 20000265 PARAMETER Experiment Name: At_Open_Flower_P Parameter: Age (day) Value: 21
  misc_feature: MA Experiment 20000265 PARAMETER Experiment Name: At_Open_Flower_P Parameter: Plant Line Value: WS
  misc_feature: MA Experiment 20000265 PARAMETER Experiment Name: At_Open_Flower_P Parameter: Tissue Value: Closed Flower vs. Whole Plant
  misc_feature: MA Experiment ID: 20000286 Result: Down-regulated in Transcription
  misc_feature: MA Experiment 20000286 PARAMETER Experiment Name: At_Open_Flower_P Parameter: Age (day) Value: 21
  misc_feature: MA Experiment 20000286 PARAMETER Experiment Name: At_Open_Flower_P Parameter: Plant Line Value: WS
  misc_feature: MA Experiment 20000286 PARAMETER Experiment Name: At_Open_Flower_P Parameter: Tissue Value: Half Open vs. Whole Plant
  misc_feature: MA Experiment ID: 20000437 Result: Down-regulated in Transcription
  misc_feature: MA Experiment 20000437 PARAMETER Experiment Name: At_Drought_P Parameter: Age (day) Value: 8
  misc_feature: MA Experiment 20000437 PARAMETER Experiment Name: At_Drought_P Parameter: Organism Value: A. thaliana
  misc_feature: MA Experiment 20000437 PARAMETER Experiment Name: At_Drought_P Parameter: Plant Line Value: WS
  misc_feature: MA Experiment 20000437 PARAMETER Experiment Name: At_Drought_P Parameter: Timepoint (hr) Value: 24
  misc_feature: MA Experiment 20000437 PARAMETER Experiment Name: At_Drought_P Parameter: Tissue Value: Whole Plant
  misc_feature: MA Experiment 20000437 PARAMETER Experiment Name: At_Drought_P Parameter: Treatment Value: Drought vs. No Drought
  misc_feature: MA Experiment ID: 20000438 Result: Down-regulated in Transcription
  misc_feature: MA Experiment 20000438 PARAMETER Experiment Name: At_Shoots__P Parameter: Age (day) Value: 14
  misc_feature: MA Experiment 20000438 PARAMETER Experiment Name: At_Shoots__P Parameter: Tissue Value: Shoots vs. Whole Plant
  misc_feature: MA Experiment ID: 20000456 Result: Up-regulated in Transcription
  misc_feature: MA Experiment 20000456 PARAMETER Experiment Name: At_100uM_BA_P Parameter: Age (day) Value: 14
  misc_feature: MA Experiment 20000456 PARAMETER Experiment Name: At_100uM_BA_P Parameter: Organism Value: A. thaliana
  misc_feature: MA Experiment 20000456 PARAMETER Experiment Name: At_100uM_BA_P Parameter: Plant Line Value: WS
  misc_feature: MA Experiment 20000456 PARAMETER Experiment Name: At_100uM_BA_P Parameter: Timepoint (hr) Value: 6
  misc_feature: MA Experiment 20000456 PARAMETER Experiment Name: At_100uM_BA_P Parameter: Tissue Value: Aerial
  misc_feature: MA Experiment 20000456 PARAMETER Experiment Name: At_100uM_BA_P Parameter: Treatment Value: 100uM BA vs. No Treatment
  misc_feature: MA Experiment ID: 20000495 Result: Down-regulated in Transcription
  misc_feature: MA Experiment 20000495 PARAMETER Experiment Name: At_Guard_Cells_P Parameter: Harvest Date Value: 8/2/2002
  misc_feature: MA Experiment 20000495 PARAMETER Experiment Name: At_Guard_Cells_P Parameter: Organism Value: A. thaliana
  misc_feature: MA Experiment 20000495 PARAMETER Experiment Name: At_Guard_Cells_P Parameter: Tissue Value: Guard Cells vs. Leaves
  misc_feature: MA Experiment ID: 20000527 Result: Down-regulated in Transcription
  misc_feature: MA Experiment 20000527 PARAMETER Experiment Name: At_10percent_PEG_P Parameter: Age (day) Value: 20
  misc_feature: MA Experiment 20000527 PARAMETER Experiment Name: At_10percent_PEG_P Parameter: Organism Value: A. thaliana
  misc_feature: MA Experiment 20000527 PARAMETER Experiment Name: At_10percent_PEG_P Parameter: Plant Line Value: WS
  misc_feature: MA Experiment 20000527 PARAMETER Experiment Name: At_10percent_PEG_P Parameter: Timepoint (day) Value: 20
  misc_feature: MA Experiment 20000527 PARAMETER Experiment Name: At_10percent_PEG_P Parameter: Tissue Value: Whole Plant
  misc_feature: MA Experiment 20000527 PARAMETER Experiment Name: At_10percent_PEG_P Parameter: Treatment Value: 10percent PEG vs. No Treatment
  misc_feature: MA Experiment ID: 20000576 Result: Down-regulated in Transcription
  misc_feature: MA Experiment 20000576 PARAMETER Experiment Name: At_100uM_ABA_Mutants__P Parameter: Organism Value: A. thaliana
  misc_feature: MA Experiment 20000576 PARAMETER Experiment Name: At_100uM_ABA_Mutants__P Parameter: Plant Line Value: CS23
  misc_feature: MA Experiment 20000576 PARAMETER Experiment Name: At_100uM_ABA_Mutants__P Parameter: Timepoint (hr) Value: 6
  misc_feature: MA Experiment 20000576 PARAMETER Experiment Name: At_100uM_ABA_Mutants__P Parameter: Tissue Value: Whole Plant
  misc_feature: MA Experiment 20000576 PARAMETER Experiment Name: At_100uM_ABA_Mutants__P Parameter: Treatment Value: 1uM ABA vs. No Treatment
  misc_feature: MA Experiment ID: 20000709 Result: Up-regulated in Transcription
  misc_feature: MA Experiment 20000709 PARAMETER Experiment Name: At_15mM_NH4NO3_L-to-H_P Parameter: Age (hr) Value: 14
  misc_feature: MA Experiment 20000709 PARAMETER Experiment Name: At_15mM_NH4NO3_L-to-H_P Parameter: Organism Value: A. thaliana
  misc_feature: MA Experiment 20000709 PARAMETER Experiment Name: At_15mM_NH4NO3_L-to-H_P Parameter: Plant Line Value: WS
  misc_feature: MA Experiment 20000709 PARAMETER Experiment Name: At_15mM_NH4NO3_L-to-H_P Parameter: Timepoint (hr) Value: 4
  misc_feature: MA Experiment 20000709 PARAMETER Experiment Name: At_15mM_NH4NO3_L-to-H_P Parameter: Tissue Value: Aerial
  misc_feature: MA Experiment 20000709 PARAMETER Experiment Name: At_15mM_NH4NO3_L-to-H_P Parameter: Treatment Value: 15mM NH4NO3 vs. 30mM Mannitol
  misc_feature: MA Experiment ID: 20000794 Result: Down-regulated in Transcription
  misc_feature: MA Experiment 20000794 PARAMETER Experiment Name: At_Petals_P Parameter: Age (day) Value: 23-25 days
  misc_feature: MA Experiment 20000794 PARAMETER Experiment Name: At_Petals_P Parameter: Plant Line Value: WS
  misc_feature: MA Experiment 20000794 PARAMETER Experiment Name: At_Petals_P Parameter: Tissue Value: Petals vs. Whole plant
  misc_feature: MA Experiment ID: 20001451 Result: Down-regulated in Transcription
  misc_feature: MA Experiment 20001451 PARAMETER Experiment Name: At_Far-red-induction_P Parameter: Age (day) Value: 7
  misc_feature: MA Experiment 20001451 PARAMETER Experiment Name: At_Far-red-induction_P Parameter: Light Value: Far-red vs. White
  misc_feature: MA Experiment 20001451 PARAMETER Experiment Name: At_Far-red-induction_P Parameter: Organism Value: A. thaliana
  misc_feature: MA Experiment 20001451 PARAMETER Experiment Name: At_Far-red-induction_P Parameter: Plant Line Value: Columbia
  misc_feature: MA Experiment 20001451 PARAMETER Experiment Name: At_Far-red-induction_P Parameter: Timepoint (hr) Value: 24
  misc_feature: MA Experiment 20001451 PARAMETER Experiment Name: At_Far-red-induction_P Parameter: Tissue Value: Whole Plant
  misc_feature: MA Experiment ID: 20001554 Result: Down-regulated in Transcription
  misc_feature: MA Experiment 20001554 PARAMETER Experiment Name: At_Drought_Soil_Dry_P Parameter: Age (day) Value: 21
  misc_feature: MA Experiment 20001554 PARAMETER Experiment Name: At_Drought_Soil_Dry_P Parameter: Organism Value: A. thaliana
  misc_feature: MA Experiment 20001554 PARAMETER Experiment Name: At_Drought_Soil_Dry_P Parameter: Plant Line Value: WS
  misc_feature: MA Experiment 20001554 PARAMETER Experiment Name: At_Drought_Soil_Dry_P Parameter: Post Timepoint (hr) Value: None
  misc_feature: MA Experiment 20001554 PARAMETER Experiment Name: At_Drought_Soil_Dry_P Parameter: Post-Treatment Value: None
  misc_feature: MA Experiment 20001554 PARAMETER Experiment Name: At_Drought_Soil_Dry_P Parameter: Timepoint (day) Value: 7
  misc_feature: MA Experiment 20001554 PARAMETER Experiment Name: At_Drought_Soil_Dry_P Parameter: Treatment Value: Drought vs. No Drought
  misc_feature: MA Experiment ID: 20001557 Result: Up-regulated in Transcription
  misc_feature: MA Experiment 20001557 PARAMETER Experiment Name: At_Drought_Soil_Dry_P Parameter: Age (day) Value: 27
  misc_feature: MA Experiment 20001557 PARAMETER Experiment Name: At_Drought_Soil_Dry_P Parameter: Organism Value: A. thaliana
  misc_feature: MA Experiment 20001557 PARAMETER Experiment Name: At_Drought_Soil_Dry_P Parameter: Plant Line Value: WS
  misc_feature: MA Experiment 20001557 PARAMETER Experiment Name: At_Drought_Soil_Dry_P Parameter: Post Timepoint (hr) Value: 3
  misc_feature: MA Experiment 20001557 PARAMETER Experiment Name: At_Drought_Soil_Dry_P Parameter: Post-Treatment Value: Re-Water vs. No Drought
  misc_feature: MA Experiment 20001557 PARAMETER Experiment Name: At_Drought_Soil_Dry_P Parameter: Timepoint (day) Value: 13
  misc_feature: MA Experiment 20001557 PARAMETER Experiment Name: At_Drought_Soil_Dry_P Parameter: Treatment Value: Drought vs. No Drought
  misc_feature: MA Experiment ID: 20001904 Result: Down-regulated in Transcription
  misc_feature: MA Experiment 20001904 PARAMETER Experiment Name: At_Drought_Reproduction_P Parameter: Age (day) Value: 37
  misc_feature: MA Experiment 20001904 PARAMETER Experiment Name: At_Drought_Reproduction_P Parameter: Organism Value: A. thaliana
  misc_feature: MA Experiment 20001904 PARAMETER Experiment Name: At_Drought_Reproduction_P Parameter: Plant Line Value: WS
  misc_feature: MA Experiment 20001904 PARAMETER Experiment Name: At_Drought_Reproduction_P Parameter: Timepoint (day) Value: 7
  misc_feature: MA Experiment 20001904 PARAMETER Experiment Name: At_Drought_Reproduction_P Parameter: Tissue Value: Rosettes
  misc_feature: MA Experiment 20001904 PARAMETER Experiment Name: At_Drought_Reproduction_P Parameter: Treatment Value: Drought vs. No Drought
  misc_feature: MA Experiment ID: 20001905 Result: Down-regulated in Transcription
  misc_feature: MA Experiment 20001905 PARAMETER Experiment Name: At_Drought_Reproduction_P Parameter: Age (day) Value: 40
  misc_feature: MA Experiment 20001905 PARAMETER Experiment Name: At_Drought_Reproduction_P Parameter: Organism Value: A. thaliana
  misc_feature: MA Experiment 20001905 PARAMETER Experiment Name: At_Drought_Reproduction_P Parameter: Plant Line Value: WS
  misc_feature: MA Experiment 20001905 PARAMETER Experiment Name: At_Drought_Reproduction_P Parameter: Timepoint (day) Value: 10
  misc_feature: MA Experiment 20001905 PARAMETER Experiment Name: At_Drought_Reproduction_P Parameter: Tissue Value: Rosettes
  misc_feature: MA Experiment 20001905 PARAMETER Experiment Name: At_Drought_Reproduction_P Parameter: Treatment Value: Drought vs. No Drought
acaattcagggaaaatcttcaaagtgtttgcagagaaatctaaattcatcaacagttttttacaaaagaaatggaaaacggagaagcaaaacagagtgtacctcttctcactccctataagatgggaagattcaatctttcccatagggttgttctagcaccattgacgagacagagatcgtacggaaacgttcctcagcctcacgctgccatatattactctcagagaacgactccaggaggttttctcatcactgaagccactggagtttcagatacagctcaaggatatcaagatactcctgggatatggactaaagagcatgtggaggcatggaagccaatcgttgatgctgtacatgccaaaggtggtatcttcttctgtcagatctggcatgttggccgcgtttctaatagcgggtttcagccaaatggaaaagctcctatctcttgttcggataagccattgatgcctcaaattcgctctaatggcatcgatgaagctctctttacccctccaagacggcttggtatcgaagaaatccccggcattgtcaatgattttaggcttgctgcaagaaatgctatggaagctggttttgatggagttgagattcatggagctaatggctatctgattgaccagttcatgaaggatacggtgaatgatagaactgatgaatacggtggatcattgcaaaaccgttgcaaatttcctctagaaatagtcgatgcagttgctaaggagatcggaccagaccgtgttggaatcaggctctctccatttgctgactacatggaatctggagacactaatccaggagcattagggctttatatggcggaatctttgaacaaatacggaatcctctactgtcatgtgattgaagcgagaatgaaaacaatgggagaagtacatgcttgtcctcacacactaatgccgatgaggaaagcgtttaaggggacttttatctccgcaggaggtttcacgagggaagatgggaatgaggctgtgtcaaagggaagaactgatttggtggcttatggtcgatggtttctagccaacccggacctgccaaagaggttccaagtggatgcaccgctgaataagtacgatagaccaacgttttacacttctgatccagtcgtcggttacaccgattaccctttcctcgaatcaacagcttaaaattgttatcaataatgtaatgtagtgtgtttcccttatataagatgtaataagtttctggcttttcatttatactttttaagtttaagcc

SEQ ID NO: 24532 - protein, 372 aa, Arabidopsis thaliana
  peptide (1)..(372): Ceres Seq. ID no. 13492385
  misc_feature (11)..(346): Pfam Name: NADH:flavin oxidoreductase / NADH oxidase family Pfam Description: NADH:flavin oxidoreductase / NADH oxidase family
  misc_feature (9)..(368): Homolog of NCBI NO: 13516922 NR Description: 12-oxophytodienoic acid 10, 11-reductase [Pisum
  misc_feature (8)..(369): Homolog of NCBI NO: 7449902 NR Description: probable 12-oxophytodienoate reductase (EC
  misc_feature (1)..(370): Homolog of NCBI NO: 14277800 NR Description: Chain A, Crystal Structure Of 12-Oxophytodienoate
  misc_feature (1)..(370): Homolog of NCBI NO: 4894182 NR Description: 12-oxophytodienoate reductase [Lycopersicon
  misc_feature (1)..(371): Homolog of NCBI NO: 7449901 NR Description: probable 12-oxophytodienoate reductase (EC
  misc_feature (1)..(372): Homolog of NCBI NO: 26450549 NR Description: putative 12-oxophytodienoate reductase OPR2
  misc_feature (1)..(372): Homolog of NCBI NO: 15223140 NR Description: 12-oxophytodienoate reductase (OPR2) [Arabidopsis
  misc_feature (1)..(372): Homolog of NCBI NO: 2765083 NR Description: 12-oxophytodienoate reductase [Arabidopsis
  misc_feature (1)..(372): Homolog of NCBI NO: 21593388 NR Description: 12-oxophytodienoate reductase (OPR1) [Arabidopsis
  misc_feature (1)..(372): Homolog of NCBI NO: 15223138 NR Description: 12-oxophytodienoate reductase (OPR1) [Arabidopsis
MENGEAKQSVPLLTPYKMGRFNLSHRVVLAPLTRQRSYGNVPQPHAAIYYSQRTTPGGFLITEATGVSDTAQGYQDTPGIWTKEHVEAWKPIVDAVHAKGGIFFCQIWHVGRVSNSGFQPNGKAPISCSDKPLMPQIRSNGIDEALFTPPRRLGIEEIPGIVNDFRLAARNAMEAGFDGVEIHGANGYLIDQFMKDTVNDRTDEYGGSLQNRCKFPLEIVDAVAKEIGPDRVGIRLSPFADYMESGDTNPGALGLYMAESLNKYGILYCHVIEARMKTMGEVHACPHTLMPMRKAFKGTFISAGGFTREDGNEAVSKGRTDLVAYGRWFLANPDLPKRFQVDAPLNKYDRPTFYTSDPVVGYTDYPFLESTA

SEQ ID NO: 24533 - protein, 355 aa, Arabidopsis thaliana
  peptide (1)..(355): Ceres Seq. ID no. 13492386
  misc_feature (1)..(329): Pfam Name: NADH:flavin oxidoreductase / NADH oxidase family Pfam Description: NADH:flavin oxidoreductase / NADH oxidase family
  misc_feature (1)..(351): Homolog of NCBI NO: 13516922 NR Description: 12-oxophytodienoic acid 10, 11-reductase [Pisum
  misc_feature (1)..(352): Homolog of NCBI NO: 7449902 NR Description: probable 12-oxophytodienoate reductase (EC
  misc_feature (1)..(353): Homolog of NCBI NO: 14277800 NR Description: Chain A, Crystal Structure Of 12-Oxophytodienoate
  misc_feature (1)..(353): Homolog of NCBI NO: 4894182 NR Description: 12-oxophytodienoate reductase [Lycopersicon
  misc_feature (1)..(354): Homolog of NCBI NO: 7449901 NR Description: probable 12-oxophytodienoate reductase (EC
  misc_feature (1)..(355): Homolog of NCBI NO: 26450549 NR Description: putative 12-oxophytodienoate reductase OPR2
  misc_feature (1)..(355): Homolog of NCBI NO: 15223140 NR Description: 12-oxophytodienoate reductase (OPR2) [Arabidopsis
  misc_feature (1)..(355): Homolog of NCBI NO: 2765083 NR Description: 12-oxophytodienoate reductase [Arabidopsis
  misc_feature (1)..(355): Homolog of NCBI NO: 21593388 NR Description: 12-oxophytodienoate reductase (OPR1) [Arabidopsis
  misc_feature (1)..(355): Homolog of NCBI NO: 15223138 NR Description: 12-oxophytodienoate reductase (OPR1) [Arabidopsis
MGRFNLSHRVVLAPLTRQRSYGNVPQPHAAIYYSQRTTPGGFLITEATGVSDTAQGYQDTPGIWTKEHVEAWKPIVDAVHAKGGIFFCQIWHVGRVSNSGFQPNGKAPISCSDKPLMPQIRSNGIDEALFTPPRRLGIEEIPGIVNDFRLAARNAMEAGFDGVEIHGANGYLIDQFMKDTVNDRTDEYGGSLQNRCKFPLEIVDAVAKEIGPDRVGIRLSPFADYMESGDTNPGALGLYMAESLNKYGILYCHVIEARMKTMGEVHACPHTLMPMRKAFKGTFISAGGFTREDGNEAVSKGRTDLVAYGRWFLANPDLPKRFQVDAPLNKYDRPTFYTSDPVVGYTDYPFLESTA

SEQ ID NO: 24534 - protein, 239 aa, Arabidopsis thaliana
  peptide (1)..(239): Ceres Seq. ID no. 13492387
  misc_feature (1)..(213): Pfam Name: NADH:flavin oxidoreductase / NADH oxidase family Pfam Description: NADH:flavin oxidoreductase / NADH oxidase family
  misc_feature (1)..(235): Homolog of NCBI NO: 13516922 NR Description: 12-oxophytodienoic acid 10, 11-reductase [Pisum
  misc_feature (1)..(236): Homolog of NCBI NO: 7449902 NR Description: probable 12-oxophytodienoate reductase (EC
  misc_feature (1)..(237): Homolog of NCBI NO: 14277800 NR Description: Chain A, Crystal Structure Of 12-Oxophytodienoate
  misc_feature (1)..(237): Homolog of NCBI NO: 4894182 NR Description: 12-oxophytodienoate reductase [Lycopersicon
  misc_feature (1)..(238): Homolog of NCBI NO: 7449901 NR Description: probable 12-oxophytodienoate reductase (EC
  misc_feature (1)..(239): Homolog of NCBI NO: 26450549 NR Description: putative 12-oxophytodienoate reductase OPR2
  misc_feature (1)..(239): Homolog of NCBI NO: 15223140 NR Description: 12-oxophytodienoate reductase (OPR2) [Arabidopsis
  misc_feature (1)..(239): Homolog of NCBI NO: 2765083 NR Description: 12-oxophytodienoate reductase [Arabidopsis
  misc_feature (1)..(239): Homolog of NCBI NO: 21593388 NR Description: 12-oxophytodienoate reductase (OPR1) [Arabidopsis
  misc_feature (1)..(239): Homolog of NCBI NO: 15223138 NR Description: 12-oxophytodienoate reductase (OPR1) [Arabidopsis
MPQIRSNGIDEALFTPPRRLGIEEIPGIVNDFRLAARNAMEAGFDGVEIHGANGYLIDQFMKDTVNDRTDEYGGSLQNRCKFPLEIVDAVAKEIGPDRVGIRLSPFADYMESGDTNPGALGLYMAESLNKYGILYCHVIEARMKTMGEVHACPHTLMPMRKAFKGTFISAGGFTREDGNEAVSKGRTDLVAYGRWFLANPDLPKRFQVDAPLNKYDRPTFYTSDPVVGYTDYPFLESTA

SEQ ID NO: 24535 - DNA, 1869 bp, Arabidopsis thaliana
  misc_feature (1)..(1869): Ceres Seq. ID no. 12439756
  misc_feature: MA Experiment ID: 108434 Result: Down-regulated in Transcription
  misc_feature: MA Experiment 108434 PARAMETER Experiment Name: At_Root_Tips_cDNA_P Parameter: Tissue Value: Root Tips
  misc_feature: MA Experiment ID: 108461 Result: Down-regulated in Transcription
  misc_feature: MA Experiment 108461 PARAMETER Experiment Name: At_Germinating_Seeds_cDNA_P Parameter: Age (day) Value: 1 vs. 0
  misc_feature: MA Experiment 108461 PARAMETER Experiment Name: At_Germinating_Seeds_cDNA_P Parameter: Tissue Value: Germinating Seeds
  misc_feature: MA Experiment ID: 108462 Result: Down-regulated in Transcription
  misc_feature: MA Experiment 108462 PARAMETER Experiment Name: At_Germinating_Seeds_cDNA_P Parameter: Age (day) Value: 2 vs. 0
  misc_feature: MA Experiment 108462 PARAMETER Experiment Name: At_Germinating_Seeds_cDNA_P Parameter: Tissue Value: Germinating Seeds
  misc_feature: MA Experiment ID: 108488 Result: Down-regulated in Transcription
  misc_feature: MA Experiment ID: 108573 Result: Up-regulated in Transcription
  misc_feature: MA Experiment 108573 PARAMETER Experiment Name: At_Drought_cDNA_P Parameter: Timepoint (hr) Value: 6
  misc_feature: MA Experiment 108573 PARAMETER Experiment Name: At_Drought_cDNA_P Parameter: Tissue Value: Aerial
  misc_feature: MA Experiment 108573 PARAMETER Experiment Name: At_Drought_cDNA_P Parameter: Treatment Value: Drought vs. No Drought
  misc_feature: MA Experiment ID: 108585 Result: Up-regulated in Transcription
  misc_feature: MA Experiment 108585 PARAMETER Experiment Name: At_5mM_NaNP_cDNA_P Parameter: Timepoint (hr) Value: 6
  misc_feature: MA Experiment 108585 PARAMETER Experiment Name: At_5mM_NaNP_cDNA_P Parameter: Tissue Value: Aerial
  misc_feature: MA Experiment 108585 PARAMETER Experiment Name: At_5mM_NaNP_cDNA_P Parameter: Treatment Value: null
  misc_feature: MA Experiment ID: 108594 Result: Down-regulated in Transcription
  misc_feature: MA Experiment 108594 PARAMETER Experiment Name: At_Ler-rhl_Root_cDNA_P Parameter: Plant Line Value: null
  misc_feature: MA Experiment ID: 108607 Result: Up-regulated in Transcription
  misc_feature: MA Experiment 108607 PARAMETER Experiment Name: At_100uM_ABA_cDNA_P Parameter: Timepoint (hr) Value: 4
  misc_feature: MA Experiment 108607 PARAMETER Experiment Name: At_100uM_ABA_cDNA_P Parameter: Tissue Value: Aerial
  misc_feature: MA Experiment 108607 PARAMETER Experiment Name: At_100uM_ABA_cDNA_P Parameter: Treatment Value: 100uM ABA vs. No Treatment
  misc_feature: MA Experiment ID: 108668 Result: Up-regulated in Transcription
  misc_feature: MA Experiment 108668 PARAMETER Experiment Name: At_2mM_SA_cDNA_P Parameter: Plant Line Value: WS
  misc_feature: MA Experiment 108668 PARAMETER Experiment Name: At_2mM_SA_cDNA_P Parameter: Timepoint (hr) Value: 6
  misc_feature: MA Experiment 108668 PARAMETER Experiment Name: At_2mM_SA_cDNA_P Parameter: Treatment Value: 2mM SA vs. No Treatment
  misc_feature: MA Experiment ID: 20000069 Result: Up-regulated in Transcription
  misc_feature: MA Experiment 20000069 PARAMETER Experiment Name: At_100uM_ABA_Mutants_cDNA_P Parameter: Plant Line Value: CS23
  misc_feature: MA Experiment 20000069 PARAMETER Experiment Name: At_100uM_ABA_Mutants_cDNA_P Parameter: Timepoint (hr) Value: 6
  misc_feature: MA Experiment 20000069 PARAMETER Experiment Name: At_100uM_ABA_Mutants_cDNA_P Parameter: Tissue Value: Aerial
  misc_feature: MA Experiment 20000069 PARAMETER Experiment Name: At_100uM_ABA_Mutants_cDNA_P Parameter: Treatment Value: 100uM ABA vs. No Treatment
  misc_feature: MA Experiment ID: 20000070 Result: Up-regulated in Transcription
  misc_feature: MA Experiment 20000070 PARAMETER Experiment Name: At_100uM_ABA_Mutants_cDNA_P Parameter: Plant Line Value: CS24
  misc_feature: MA Experiment 20000070 PARAMETER Experiment Name: At_100uM_ABA_Mutants_cDNA_P Parameter: Timepoint (hr) Value: 6
  misc_feature: MA Experiment 20000070 PARAMETER Experiment Name: At_100uM_ABA_Mutants_cDNA_P Parameter: Tissue Value: Aerial
  misc_feature: MA Experiment 20000070 PARAMETER Experiment Name: At_100uM_ABA_Mutants_cDNA_P Parameter: Treatment Value: 100uM ABA vs. No Treatment
  misc_feature: MA Experiment ID: 20000071 Result: Up-regulated in Transcription
  misc_feature: MA Experiment 20000071 PARAMETER Experiment Name: At_100uM_ABA_Mutants_cDNA_P Parameter: Plant Line Value: CS8104
  misc_feature: MA Experiment 20000071 PARAMETER Experiment Name: At_100uM_ABA_Mutants_cDNA_P Parameter: Timepoint (hr) Value: 6
  misc_feature: MA Experiment 20000071 PARAMETER Experiment Name: At_100uM_ABA_Mutants_cDNA_P Parameter: Tissue Value: Aerial
  misc_feature: MA Experiment 20000071 PARAMETER Experiment Name: At_100uM_ABA_Mutants_cDNA_P Parameter: Treatment Value: 100uM ABA vs. No Treatment
  misc_feature: MA Experiment ID: 20000086 Result: Up-regulated in Transcription
  misc_feature: MA Experiment 20000086 PARAMETER Experiment Name: At_100uM_ABA_Mutants_cDNA_P Parameter: Plant Line Value: CS22
  misc_feature: MA Experiment 20000086 PARAMETER Experiment Name: At_100uM_ABA_Mutants_cDNA_P Parameter: Timepoint (hr) Value: 6
  misc_feature: MA Experiment 20000086 PARAMETER Experiment Name: At_100uM_ABA_Mutants_cDNA_P Parameter: Tissue Value: Aerial
  misc_feature: MA Experiment 20000086 PARAMETER Experiment Name: At_100uM_ABA_Mutants_cDNA_P Parameter: Treatment Value: 100uM ABA vs. No Treatment
  misc_feature: MA Experiment ID: 20000088 Result: Up-regulated in Transcription
  misc_feature: MA Experiment 20000088 PARAMETER Experiment Name: At_100uM_ABA_Mutants_cDNA_P Parameter: Plant Line Value: Landsberg
  misc_feature: MA Experiment 20000088 PARAMETER Experiment Name: At_100uM_ABA_Mutants_cDNA_P Parameter: Timepoint (hr) Value: 6
  misc_feature: MA Experiment 20000088 PARAMETER Experiment Name: At_100uM_ABA_Mutants_cDNA_P Parameter: Tissue Value: Aerial
  misc_feature: MA Experiment 20000088 PARAMETER Experiment Name: At_100uM_ABA_Mutants_cDNA_P Parameter: Treatment Value: 100uM ABA vs. No Treatment
  misc_feature: MA Experiment ID: 20000093 Result: Up-regulated in Transcription
  misc_feature: MA Experiment 20000093 PARAMETER Experiment Name: At_42deg_Heat_cDNA_P Parameter: Temperature (deg C) Value: 42 vs. 22
  misc_feature: MA Experiment 20000093 PARAMETER Experiment Name: At_42deg_Heat_cDNA_P Parameter: Timepoint (hr) Value: 0.5
  misc_feature: MA Experiment 20000093 PARAMETER Experiment Name: At_42deg_Heat_cDNA_P Parameter: Tissue Value: Aerial
  misc_feature: MA Experiment ID: 20000117 Result: Up-regulated in Transcription
  misc_feature: MA Experiment 20000117 PARAMETER Experiment Name: At_100uM_ABA_Mutants_cDNA_P Parameter: Plant Line Value: Columbia
  misc_feature: MA Experiment 20000117 PARAMETER Experiment Name: At_100uM_ABA_Mutants_cDNA_P Parameter: Timepoint (hr) Value: 6
  misc_feature: MA Experiment 20000117 PARAMETER Experiment Name: At_100uM_ABA_Mutants_cDNA_P Parameter: Tissue Value: Aerial
  misc_feature: MA Experiment 20000117 PARAMETER Experiment Name: At_100uM_ABA_Mutants_cDNA_P Parameter: Treatment Value: 100uM ABA vs. No Treatment
  misc_feature: MA Experiment ID: 20000180 Result: Down-regulated in Transcription
  misc_feature: MA Experiment 20000180 PARAMETER Experiment Name: At_Germinating_Seeds_P Parameter: Age (hr) Value: 24 vs. 0
  misc_feature: MA Experiment 20000180 PARAMETER Experiment Name: At_Germinating_Seeds_P Parameter: Tissue Value: Germinating Seeds
  misc_feature: MA Experiment ID: 20000182 Result: Up-regulated in Transcription
  misc_feature: MA Experiment 20000182 PARAMETER Experiment Name: At_2mM_SA_P Parameter: Age (day) Value: 14
  misc_feature: MA Experiment 20000182 PARAMETER Experiment Name: At_2mM_SA_P Parameter: Organism Value: A. thaliana
  misc_feature: MA Experiment 20000182 PARAMETER Experiment Name: At_2mM_SA_P Parameter: Plant Line Value: WS
  misc_feature: MA Experiment 20000182 PARAMETER Experiment Name: At_2mM_SA_P Parameter: Timepoint (hr) Value: 6
  misc_feature: MA Experiment 20000182 PARAMETER Experiment Name: At_2mM_SA_P Parameter: Tissue Value: Aerial
  misc_feature: MA Experiment 20000182 PARAMETER Experiment Name: At_2mM_SA_P Parameter: Treatment Value: 2mM SA vs. No Treatment
  misc_feature: MA Experiment ID: 20000184 Result: Down-regulated in Transcription
  misc_feature: MA Experiment 20000184 PARAMETER Experiment Name: At_Shoots__P Parameter: Age (day) Value: 7
  misc_feature: MA Experiment 20000184 PARAMETER Experiment Name: At_Shoots__P Parameter: Tissue Value: Shoots vs. Whole Plant
  misc_feature: MA Experiment ID: 20000185 Result: Up-regulated in Transcription
  misc_feature: MA Experiment 20000185 PARAMETER Experiment Name: At_Roots__P Parameter: Age (day) Value: 7 vs. 21
  misc_feature: MA Experiment 20000185 PARAMETER Experiment Name: At_Roots__P Parameter: Organism Value: A. thaliana
  misc_feature: MA Experiment 20000185 PARAMETER Experiment Name: At_Roots__P Parameter: Tissue Value: Roots vs. Whole Plant
  misc_feature: MA Experiment ID: 20000234 Result: Down-regulated in Transcription
  misc_feature: MA Experiment 20000234 PARAMETER Experiment Name: At_Siliques_P Parameter: Age (day) Value: 21
  misc_feature: MA Experiment 20000234 PARAMETER Experiment Name: At_Siliques_P Parameter: Organism Value: A. thaliana
  misc_feature: MA Experiment 20000234 PARAMETER Experiment Name: At_Siliques_P Parameter: Plant Line Value: WS
  misc_feature: MA Experiment 20000234 PARAMETER Experiment Name: At_Siliques_P Parameter: Tissue Value: Less Than 5mm Siliques vs. Whole Plant
  misc_feature: MA Experiment ID: 20000235 Result: Down-regulated in Transcription
  misc_feature: MA Experiment 20000235 PARAMETER Experiment Name: At_Siliques_P Parameter: Age (day) Value: 21
  misc_feature: MA Experiment 20000235 PARAMETER Experiment Name: At_Siliques_P Parameter: Organism Value: A. thaliana
  misc_feature: MA Experiment 20000235 PARAMETER Experiment Name: At_Siliques_P Parameter: Plant Line Value: WS
  misc_feature: MA Experiment 20000235 PARAMETER Experiment Name: At_Siliques_P Parameter: Tissue Value: 5-10mm Siliques vs. Whole Plant
  misc_feature: MA Experiment ID: 20001757 Result: Down-regulated in Transcription
  misc_feature: MA Experiment 20001757 PARAMETER Experiment Name: At_50mM_NH4NO3_L-to-H_P Parameter: Timepoint (hr) Value: 6
  misc_feature: MA Experiment 20001757 PARAMETER Experiment Name: At_50mM_NH4NO3_L-to-H_P Parameter: Tissue Value: Leaf
  misc_feature: MA Experiment 20001757 PARAMETER Experiment Name: At_50mM_NH4NO3_L-to-H_P Parameter: Treatment Value: 50mM NH4NO3 vs 100mM Mannitol
  misc_feature: MA Experiment ID: 20001905 Result: Up-regulated in Transcription
  misc_feature: MA Experiment 20001905 PARAMETER Experiment Name: At_Drought_Reproduction_P Parameter: Age (day) Value: 40
  misc_feature: MA Experiment 20001905 PARAMETER Experiment Name: At_Drought_Reproduction_P Parameter: Organism Value: A. thaliana
  misc_feature: MA Experiment 20001905 PARAMETER Experiment Name: At_Drought_Reproduction_P Parameter: Plant Line Value: WS
  misc_feature: MA Experiment 20001905 PARAMETER Experiment Name: At_Drought_Reproduction_P Parameter: Timepoint (day) Value: 10
  misc_feature: MA Experiment 20001905 PARAMETER Experiment Name: At_Drought_Reproduction_P Parameter: Tissue Value: Rosettes
  misc_feature: MA Experiment 20001905 PARAMETER Experiment Name: At_Drought_Reproduction_P Parameter: Treatment Value: Drought vs. No Drought
attatttcgaaatcattgttttgctctttcttttgattcgaattcgacagaacagctcttttaagttattcataaaccttgtgtttgagttttggtccatcgagtatatgggtcgtggctcagtaacatcgctcgctcctgggtttcgttttcatcccacagacgaagaactcgttcgttactatctgaaacgaaagatctgcaataaaccttttaagttcgatgctatctctgttaccgatgtatacaaatctgagccttgggatctcccagacaagtcgaggctgaaaagtagagacttggagtggtacttcttcagtatgcttgataagaagtatagaaatggatcaaagacgaatcgtgcgactgagatgggatattggaagactacagggaaagatcgagagattcttaatggttcaaaagtcgttgggatgaagaagactcttgtttatcacaaaggtcgagctcctcgtggcgaaagaaccaattgggttatgcatgagtatcggttggttgatcaagaccttgataaaactggtgttcaccaagatgcgtttgtgctttgtaggatttttcagaagagtggctccggacctaaaaatggagagcagtacggtgctccgtttgttgaggaggagtgggaggaggaggatgatatgacatttgtacctgaccaagaagatcttggaagtgaagatcatgtttatgtccatatggatgacattgatcagaagtctgaaaactttgtggtctatgatgccattcctattccgttaaactttattcacggggagtcgagcaataatgttgaaacaaactactcagactccataaactatatacaacaaacaggaaactatatggactctggtggctactttgagcaaccagcagaatcttatgagaaagatcagaagcctatcatccgtgaccgtgatggtagccttcaaaatgaaggaattggatgtggggtccaggacaagcactcggaaactttgcaatcttctgacaacatctttgggactgatacatcatgctacaatgattttccagttgagagcaactatttgattggtgaggcgtttctggatccgaacagtaatcttctggagaatgatggtctgtacctggaaacaaatgatctcagtagtactcagcaagatggtttcgactttgaagattatcttaccttctttgatgaaacttttgatccttcgcaactgatgggaaatgaagatgtttttttcgatcaagaagagctctttcaagaggttgagactaaggaactagagaaagaggagacttcaagaagcaaacatgtggtggaagaaaaggaaaaggatgaagcatcttgttcaaaacaagttgatgcagatgcaacagagtttgagccagattacaagtacccgttactaaagaaggcaagccacatgttgggtgctattcctgctccgcttgcaaatgcttctgagttccctacaaaggatgcagctatccggttacacgcagcacaatcatcaggttcagttcatgtaaccgcaggtatgatcacgatatcagacagcaacatgggctggtcatacggcaaaaacgagaaccttgacttgatcctttctttggggttggtccaagggaataccgcccccgaaaaatcagggaatagttcagcatgggcaatgttaatattcatgtgtttctgggttcttctactctcagttagtttcaaagtgagcattttggtctcttccaggtgataggtaaccctttcttgttcaaacaagacttttgtgtttgtacattgatatagatgaacttgcagtgttcaatgttttattctctaataatattgaataaaccccatattct

SEQ ID NO: 24536 - protein, 584 aa, Arabidopsis thaliana
  peptide (1)..(584): Ceres Seq. ID no. 12439757
  misc_feature (44)..(172): Pfam Name: No apical meristem (NAM) protein Pfam Description: No apical meristem (NAM) protein
  misc_feature (213)..(556): Homolog of NCBI NO: 28188649 NR Description: unknown protein [Arabidopsis lyrata]
  misc_feature (213)..(556): Homolog of NCBI NO: 28188643 NR Description: unknown protein [Arabidopsis lyrata]
  misc_feature (355)..(512): Homolog of NCBI NO: 21105746 NR Description: nam-like protein 9 [Petunia x hybrida]
  misc_feature (38)..(340): Homolog of NCBI NO: 21105746 NR Description: nam-like protein 9 [Petunia x hybrida]
  misc_feature (227)..(584): Homolog of NCBI NO: 15237699 NR Description: putative protein
  misc_feature (36)..(581): Homolog of NCBI NO: 6456751 NR Description: NAC2 [Arabidopsis thaliana]
  misc_feature (36)..(581): Homolog of NCBI NO: 15237699 NR Description: putative protein
  misc_feature (36)..(584): Homolog of NCBI NO: 8567779 NR Description: NAC, putative [Arabidopsis thaliana]
  misc_feature (36)..(584): Homolog of NCBI NO: 21593389 NR Description: NAC, putative [Arabidopsis thaliana]
  misc_feature (36)..(584): Homolog of NCBI NO: 18398895 NR Description: expressed protein; protein id: At3g10500.1
YFEIIVLLFLLIRIRQNSSFKLFINLVFEFWSIEYMGRGSVTSLAPGFRFHPTDEELVRYYLKRKICNKPFKFDAISVTDVYKSEPWDLPDKSRLKSRDLEWYFFSMLDKKYRNGSKTNRATEMGYWKTTGKDREILNGSKVVGMKKTLVYHKGRAPRGERTNWVMHEYRLVDQDLDKTGVHQDAFVLCRIFQKSGSGPKNGEQYGAPFVEEEWEEEDDMTFVPDQEDLGSEDHVYVHMDDIDQKSENFVVYDAIPIPLNFIHGESSNNVETNYSDSINYIQQTGNYMDSGGYFEQPAESYEKDQKPIIRDRDGSLQNEGIGCGVQDKHSETLQSSDNIFGTDTSCYNDFPVESNYLIGEAFLDPNSNLLENDGLYLETNDLSSTQQDGFDFEDYLTFFDETFDPSQLMGNEDVFFDQEELFQEVETKELEKEETSRSKHVVEEKEKDEASCSKQVDADATEFEPDYKYPLLKKASHMLGAIPAPLANASEFPTKDAAIRLHAAQSSGSVHVTAGMITISDSNMGWSYGKNENLDLILSLGLVQGNTAPEKSGNSSAWAMLIFMCFWVLLLSVSFKVSILVSSR

SEQ ID NO: 24537 - protein, 549 aa, Arabidopsis thaliana
  peptide (1)..(549): Ceres Seq. ID no. 12439758
  misc_feature (9)..(137): Pfam Name: No apical meristem (NAM) protein Pfam Description: No apical meristem (NAM) protein
  misc_feature (178)..(521): Homolog of NCBI NO: 28188649 NR Description: unknown protein [Arabidopsis lyrata]
  misc_feature (178)..(521): Homolog of NCBI NO: 28188643 NR Description: unknown protein [Arabidopsis lyrata]
  misc_feature (320)..(477): Homolog of NCBI NO: 21105746 NR Description: nam-like protein 9 [Petunia x hybrida]
  misc_feature (3)..(305): Homolog of NCBI NO: 21105746 NR Description: nam-like protein 9 [Petunia x hybrida]
  misc_feature (192)..(549): Homolog of NCBI NO: 15237699 NR Description: putative protein
  misc_feature (1)..(546): Homolog of NCBI NO: 6456751 NR Description: NAC2 [Arabidopsis thaliana]
  misc_feature (1)..(546): Homolog of NCBI NO: 15237699 NR Description: putative protein
  misc_feature (1)..(549): Homolog of NCBI NO: 8567779 NR Description: NAC, putative [Arabidopsis thaliana]
  misc_feature (1)..(549): Homolog of NCBI NO: 21593389 NR Description: NAC, putative [Arabidopsis thaliana]
  misc_feature (1)..(549): Homolog of NCBI NO: 18398895 NR Description: expressed protein; protein id: At3g10500.1
MGRGSVTSLAPGFRFHPTDEELVRYYLKRKICNKPFKFDAISVTDVYKSEPWDLPDKSRLKSRDLEWYFFSMLDKKYRNGSKTNRATEMGYWKTTGKDREILNGSKVVGMKKTLVYHKGRAPRGERTNWVMHEYRLVDQDLDKTGVHQDAFVLCRIFQKSGSGPKNGEQYGAPFVEEEWEEEDDMTFVPDQEDLGSEDHVYVHMDDIDQKSENFVVYDAIPIPLNFIHGESSNNVETNYSDSINYIQQTGNYMDSGGYFEQPAESYEKDQKPIIRDRDGSLQNEGIGCGVQDKHSETLQSSDNIFGTDTSCYNDFPVESNYLIGEAFLDPNSNLLENDGLYLETNDLSSTQQDGFDFEDYLTFFDETFDPSQLMGNEDVFFDQEELFQEVETKELEKEETSRSKHVVEEKEKDEASCSKQVDADATEFEPDYKYPLLKKASHMLGAIPAPLANASEFPTKDAAIRLHAAQSSGSVHVTAGMITISDSNMGWSYGKNENLDLILSLGLVQGNTAPEKSGNSSAWAMLIFMCFWVLLLSVSFKVSILVSSR

SEQ ID NO: 24538 - protein, 478 aa, Arabidopsis thaliana
  peptide (1)..(478): Ceres Seq. ID no. 12439759
  misc_feature (1)..(66): Pfam Name: No apical meristem (NAM) protein Pfam Description: No apical meristem (NAM) protein
  misc_feature (107)..(450): Homolog of NCBI NO: 28188649 NR Description: unknown protein [Arabidopsis lyrata]
  misc_feature (107)..(450): Homolog of NCBI NO: 28188643 NR Description: unknown protein [Arabidopsis lyrata]
  misc_feature (249)..(406): Homolog of NCBI NO: 21105746 NR Description: nam-like protein 9 [Petunia x hybrida]
  misc_feature (1)..(234): Homolog of NCBI NO: 21105746 NR Description: nam-like protein 9 [Petunia x hybrida]
  misc_feature (121)..(478): Homolog of NCBI NO: 15237699 NR Description: putative protein
  misc_feature (1)..(475): Homolog of NCBI NO: 6456751 NR Description: NAC2 [Arabidopsis thaliana]
  misc_feature (1)..(475): Homolog of NCBI NO: 15237699 NR Description: putative protein
  misc_feature (1)..(478): Homolog of NCBI NO: 8567779 NR Description: NAC, putative [Arabidopsis thaliana]
  misc_feature (1)..(478): Homolog of NCBI NO: 21593389 NR Description: NAC, putative [Arabidopsis thaliana]
  misc_feature (1)..(478): Homolog of NCBI NO: 18398895 NR Description: expressed protein; protein id: At3g10500.1
MLDKKYRNGSKTNRATEMGYWKTTGKDREILNGSKVVGMKKTLVYHKGRAPRGERTNWVMHEYRLVDQDLDKTGVHQDAFVLCRIFQKSGSGPKNGEQYGAPFVEEEWEEEDDMTFVPDQEDLGSEDHVYVHMDDIDQKSENFVVYDAIPIPLNFIHGESSNNVETNYSDSINYIQQTGNYMDSGGYFEQPAESYEKDQKPIIRDRDGSLQNEGIGCGVQDKHSETLQSSDNIFGTDTSCYNDFPVESNYLIGEAFLDPNSNLLENDGLYLETNDLSSTQQDGFDFEDYLTFFDETFDPSQLMGNEDVFFDQEELFQEVETKELEKEETSRSKHVVEEKEKDEASCSKQVDADATEFEPDYKYPLLKKASHMLGAIPAPLANASEFPTKDAAIRLHAAQSSGSVHVTAGMITISDSNMGWSYGKNENLDLILSLGLVQGNTAPEKSGNSSAWAMLIFMCFWVLLLSVSFKVSILVSSR

SEQ ID NO: 24539 - DNA, 1304 bp, Arabidopsis thaliana; identical to SEQ ID NO: 24322
  misc_feature (1)..(1304): Ceres Seq. ID no. 13575209
  misc_feature: MA Experiment ID: 108488 Result: Down-regulated in Transcription
  misc_feature: MA Experiment ID: 108573 Result: Up-regulated in Transcription
  misc_feature: MA Experiment 108573 PARAMETER Experiment Name: At_Drought_cDNA_P Parameter: Timepoint (hr) Value: 6
  misc_feature: MA Experiment 108573 PARAMETER Experiment Name: At_Drought_cDNA_P Parameter: Tissue Value: Aerial
  misc_feature: MA Experiment 108573 PARAMETER Experiment Name: At_Drought_cDNA_P Parameter: Treatment Value: Drought vs. No Drought
  misc_feature: MA Experiment ID: 108577 Result: Down-regulated in Transcription
  misc_feature: MA Experiment 108577 PARAMETER Experiment Name: At_42deg_Heat_cDNA_P Parameter: Temperature (deg C) Value: 42 vs. 22
  misc_feature: MA Experiment 108577 PARAMETER Experiment Name: At_42deg_Heat_cDNA_P Parameter: Timepoint (hr) Value: 6
  misc_feature: MA Experiment 108577 PARAMETER Experiment Name: At_42deg_Heat_cDNA_P Parameter: Tissue Value: Aerial
  misc_feature: MA Experiment ID: 108595 Result: Down-regulated in Transcription
  misc_feature: MA Experiment 108595 PARAMETER Experiment Name: At_Ler-pi_Ovule_cDNA_P Parameter: Plant Line Value: null
  misc_feature: MA Experiment ID: 108668 Result: Up-regulated in Transcription
  misc_feature: MA Experiment 108668 PARAMETER Experiment Name: At_2mM_SA_cDNA_P Parameter: Plant Line Value: WS
  misc_feature: MA Experiment 108668 PARAMETER Experiment Name: At_2mM_SA_cDNA_P Parameter: Timepoint (hr) Value: 6
  misc_feature: MA Experiment 108668 PARAMETER Experiment Name: At_2mM_SA_cDNA_P Parameter: Treatment Value: 2mM SA vs. No Treatment
  misc_feature: MA Experiment ID: 20000069 Result: Up-regulated in Transcription
  misc_feature: MA Experiment 20000069 PARAMETER Experiment Name: At_100uM_ABA_Mutants_cDNA_P Parameter: Plant Line Value: CS23
  misc_feature: MA Experiment 20000069 PARAMETER Experiment Name: At_100uM_ABA_Mutants_cDNA_P Parameter: Timepoint (hr) Value: 6
  misc_feature: MA Experiment 20000069 PARAMETER Experiment Name: At_100uM_ABA_Mutants_cDNA_P Parameter: Tissue Value: Aerial
  misc_feature: MA Experiment 20000069 PARAMETER Experiment Name: At_100uM_ABA_Mutants_cDNA_P Parameter: Treatment Value: 100uM ABA vs. No Treatment
  misc_feature: MA Experiment ID: 20000070 Result: Up-regulated in Transcription
  misc_feature: MA Experiment 20000070 PARAMETER Experiment Name: At_100uM_ABA_Mutants_cDNA_P Parameter: Plant Line Value: CS24
  misc_feature: MA Experiment 20000070 PARAMETER Experiment Name: At_100uM_ABA_Mutants_cDNA_P Parameter: Timepoint (hr) Value: 6
  misc_feature: MA Experiment 20000070 PARAMETER Experiment Name: At_100uM_ABA_Mutants_cDNA_P Parameter: Tissue Value: Aerial
  misc_feature: MA Experiment 20000070 PARAMETER Experiment Name: At_100uM_ABA_Mutants_cDNA_P Parameter: Treatment Value: 100uM ABA vs. No Treatment
  misc_feature: MA Experiment ID: 20000071 Result: Up-regulated in Transcription
  misc_feature: MA Experiment 20000071 PARAMETER Experiment Name: At_100uM_ABA_Mutants_cDNA_P Parameter: Plant Line Value: CS8104
  misc_feature: MA Experiment 20000071 PARAMETER Experiment Name: At_100uM_ABA_Mutants_cDNA_P Parameter: Timepoint (hr) Value: 6
  misc_feature: MA Experiment 20000071 PARAMETER Experiment Name: At_100uM_ABA_Mutants_cDNA_P Parameter: Tissue Value: Aerial
  misc_feature: MA Experiment 20000071 PARAMETER Experiment Name: At_100uM_ABA_Mutants_cDNA_P Parameter: Treatment Value: 100uM ABA vs. No Treatment
  misc_feature: MA Experiment ID: 20000088 Result: Up-regulated in Transcription
  misc_feature: MA Experiment 20000088 PARAMETER Experiment Name: At_100uM_ABA_Mutants_cDNA_P Parameter: Plant Line Value: Landsberg
  misc_feature: MA Experiment 20000088 PARAMETER Experiment Name: At_100uM_ABA_Mutants_cDNA_P Parameter: Timepoint (hr) Value: 6
  misc_feature: MA Experiment 20000088 PARAMETER Experiment Name: At_100uM_ABA_Mutants_cDNA_P Parameter: Tissue Value: Aerial
  misc_feature: MA Experiment 20000088 PARAMETER Experiment Name: At_100uM_ABA_Mutants_cDNA_P Parameter: Treatment Value: 100uM ABA vs. No Treatment
  misc_feature: MA Experiment ID: 20000111 Result: Down-regulated in Transcription
  misc_feature: MA Experiment 20000111 PARAMETER Experiment Name: At_42deg_Heat_cDNA_P Parameter: Temperature (deg C) Value: 42 vs. 22
  misc_feature: MA Experiment 20000111 PARAMETER Experiment Name: At_42deg_Heat_cDNA_P Parameter: Timepoint (hr) Value: 6
  misc_feature: MA Experiment 20000111 PARAMETER Experiment Name: At_42deg_Heat_cDNA_P Parameter: Tissue Value: Aerial
  misc_feature: MA Experiment ID: 20000113 Result: Down-regulated in Transcription
  misc_feature: MA Experiment 20000113 PARAMETER Experiment Name: At_42deg_Heat_cDNA_P Parameter: Temperature (deg C) Value: 42 vs. 22
  misc_feature: MA Experiment 20000113 PARAMETER Experiment Name: At_42deg_Heat_cDNA_P Parameter: Timepoint (hr) Value: 8
  misc_feature: MA Experiment 20000113 PARAMETER Experiment Name: At_42deg_Heat_cDNA_P Parameter: Tissue Value: Aerial
  misc_feature: MA Experiment ID: 20000117 Result: Up-regulated in Transcription
  misc_feature: MA Experiment 20000117 PARAMETER Experiment Name: At_100uM_ABA_Mutants_cDNA_P Parameter: Plant Line Value: Columbia
  misc_feature: MA Experiment 20000117 PARAMETER Experiment Name: At_100uM_ABA_Mutants_cDNA_P Parameter: Timepoint (hr) Value: 6
  misc_feature: MA Experiment 20000117 PARAMETER Experiment Name: At_100uM_ABA_Mutants_cDNA_P Parameter: Tissue Value: Aerial
  misc_feature: MA Experiment 20000117 PARAMETER Experiment Name: At_100uM_ABA_Mutants_cDNA_P Parameter: Treatment Value: 100uM ABA vs. No Treatment
  misc_feature: MA Experiment ID: 20000182 Result: Up-regulated in Transcription
  misc_feature: MA Experiment 20000182 PARAMETER Experiment Name: At_2mM_SA_P Parameter: Age (day) Value: 14
  misc_feature: MA Experiment 20000182 PARAMETER Experiment Name: At_2mM_SA_P Parameter: Organism Value: A. thaliana
  misc_feature: MA Experiment 20000182 PARAMETER Experiment Name: At_2mM_SA_P Parameter: Plant Line Value: WS
  misc_feature: MA Experiment 20000182 PARAMETER Experiment Name: At_2mM_SA_P Parameter: Timepoint (hr) Value: 6
  misc_feature: MA Experiment 20000182 PARAMETER Experiment Name: At_2mM_SA_P Parameter: Tissue Value: Aerial
  misc_feature: MA Experiment 20000182 PARAMETER Experiment Name: At_2mM_SA_P Parameter: Treatment Value: 2mM SA vs. No Treatment
  misc_feature: MA Experiment ID: 20000184 Result: Down-regulated in Transcription
  misc_feature: MA Experiment 20000184 PARAMETER Experiment Name: At_Shoots__P Parameter: Age (day) Value: 7
  misc_feature: MA Experiment 20000184 PARAMETER Experiment Name: At_Shoots__P Parameter: Tissue Value: Shoots vs. Whole Plant
  misc_feature: MA Experiment ID: 20000794 Result: Up-regulated in Transcription
  misc_feature: MA Experiment 20000794 PARAMETER Experiment Name: At_Petals_P Parameter: Age (day) Value: 23-25 days
  misc_feature: MA Experiment 20000794 PARAMETER Experiment Name: At_Petals_P Parameter: Plant Line Value: WS
  misc_feature: MA Experiment 20000794 PARAMETER Experiment Name: At_Petals_P Parameter: Tissue Value: Petals vs. Whole plant
  misc_feature: MA Experiment ID: 20001451 Result: Down-regulated in Transcription
  misc_feature: MA Experiment 20001451 PARAMETER Experiment Name: At_Far-red-induction_P Parameter: Age (day) Value: 7
  misc_feature: MA Experiment 20001451 PARAMETER Experiment Name: At_Far-red-induction_P Parameter: Light Value: Far-red vs. White
  misc_feature: MA Experiment 20001451 PARAMETER Experiment Name: At_Far-red-induction_P Parameter: Organism Value: A. thaliana
  misc_feature: MA Experiment 20001451 PARAMETER Experiment Name: At_Far-red-induction_P Parameter: Plant Line Value: Columbia
  misc_feature: MA Experiment 20001451 PARAMETER Experiment Name: At_Far-red-induction_P Parameter: Timepoint (hr) Value: 24
  misc_feature: MA Experiment 20001451 PARAMETER Experiment Name: At_Far-red-induction_P Parameter: Tissue Value: Whole Plant

SEQ ID NO: 24540 - protein, 359 aa, Arabidopsis thaliana; identical to SEQ ID NO: 24323
  peptide (1)..(359): Ceres Seq. ID no. 13575210
  misc_feature (197)..(350): Pfam Name: Uricase Pfam Description: Uricase
  misc_feature (197)..(350): Pfam Name: Uricase Pfam Description: Uricase
  misc_feature (51)..(359): Homolog of NCBI NO: 549169 NR Description: Uricase II isozyme 1 (Urate oxidase) (Nodulin 35)
  misc_feature (51)..(359): Homolog of NCBI NO: 6175091 NR Description: Uricase II (Urate oxidase) (Nodule specific
  misc_feature (51)..(359): Homolog of NCBI NO: 4996848 NR Description: uricase (Nod-35) [Medicago sativa]
  misc_feature (51)..(359): Homolog of NCBI NO: 7242493 NR Description: urate oxidase [Cicer arietinum]
  misc_feature (51)..(359): Homolog of NCBI NO: 549169 NR Description: Uricase II isozyme 1 (Urate oxidase) (Nodulin 35)
  misc_feature (51)..(359): Homolog of NCBI NO: 4996848 NR Description: uricase (Nod-35) [Medicago sativa]
  misc_feature (51)..(359): Homolog of NCBI NO: 4996846 NR Description: uricase (Nod-35) [Medicago sativa]
  misc_feature (51)..(359): Homolog of NCBI NO: 6175090 NR Description: Uricase (Urate oxidase) (Nodulin 35 homolog)
  misc_feature (51)..(359): Homolog of NCBI NO: 15225267 NR Description: uricase subunit -related [Arabidopsis thaliana]
  misc_feature (51)..(359): Homolog of NCBI NO: 11414898 NR Description: uricase [Lotus japonicus]
  misc_feature (51)..(359): Homolog of NCBI NO: 7242493 NR Description: urate oxidase [Cicer arietinum]
  misc_feature (51)..(359): Homolog of NCBI NO: 6175091 NR Description: Uricase II (Urate oxidase) (Nodule specific
  misc_feature (51)..(359): Homolog of NCBI NO: 4996846 NR Description: uricase (Nod-35) [Medicago sativa]
  misc_feature (51)..(359): Homolog of NCBI NO: 11414898 NR Description: uricase [Lotus japonicus]
  misc_feature (51)..(359): Homolog of NCBI NO: 6175090 NR Description: Uricase (Urate oxidase) (Nodulin 35 homolog)
  misc_feature (51)..(359): Homolog of NCBI NO: 15225267 NR Description: uricase subunit -related [Arabidopsis thaliana]

SEQ ID NO: 24541 - protein, 309 aa, Arabidopsis thaliana; identical to SEQ ID NO: 24324
  peptide (1)..(309): Ceres Seq. ID no. 13575211
  misc_feature (147)..(300): Pfam Name: Uricase Pfam Description: Uricase
  misc_feature (147)..(300): Pfam Name: Uricase Pfam Description: Uricase
  misc_feature (1)..(309): Homolog of NCBI NO: 549169 NR Description: Uricase II isozyme 1 (Urate oxidase) (Nodulin 35)
  misc_feature (1)..(309): Homolog of NCBI NO: 6175091 NR Description: Uricase II (Urate oxidase) (Nodule specific
  misc_feature (1)..(309): Homolog of NCBI NO: 4996848 NR Description: uricase (Nod-35) [Medicago sativa]
  misc_feature (1)..(309): Homolog of NCBI NO: 7242493 NR Description: urate oxidase [Cicer arietinum]
  misc_feature (1)..(309): Homolog of NCBI NO: 549169 NR Description: Uricase II isozyme 1 (Urate oxidase) (Nodulin 35)
  misc_feature (1)..(309): Homolog of NCBI NO: 4996848 NR Description: uricase (Nod-35) [Medicago sativa]
  misc_feature (1)..(309): Homolog of NCBI NO: 4996846 NR Description: uricase (Nod-35) [Medicago sativa]
  misc_feature (1)..(309): Homolog of NCBI NO: 6175090 NR Description: Uricase (Urate oxidase) (Nodulin 35 homolog)
  misc_feature (1)..(309): Homolog of NCBI NO: 15225267 NR Description: uricase subunit -related [Arabidopsis thaliana]
  misc_feature (1)..(309): Homolog of NCBI NO: 11414898 NR Description: uricase [Lotus japonicus]
  misc_feature (1)..(309): Homolog of NCBI NO: 7242493 NR Description: urate oxidase [Cicer arietinum]
  misc_feature (1)..(309): Homolog of NCBI NO: 6175091 NR Description: Uricase II (Urate oxidase) (Nodule specific
  misc_feature (1)..(309): Homolog of NCBI NO: 4996846 NR Description: uricase (Nod-35) [Medicago sativa]
  misc_feature (1)..(309): Homolog of NCBI NO: 11414898 NR Description: uricase [Lotus japonicus]
  misc_feature (1)..(309): Homolog of NCBI NO: 6175090 NR Description: Uricase (Urate oxidase) (Nodulin 35 homolog)
  misc_feature (1)..(309): Homolog of NCBI NO: 15225267 NR Description: uricase subunit -related [Arabidopsis thaliana]

SEQ ID NO: 24542 - DNA, 1152 bp, Arabidopsis thaliana
  misc_feature (1)..(1152): Ceres Seq. ID no. 12328034
  misc_feature: MA Experiment ID: 108573 Result: Up-regulated in Transcription
  misc_feature: MA Experiment 108573 PARAMETER Experiment Name: At_Drought_cDNA_P Parameter: Timepoint (hr) Value: 6
  misc_feature: MA Experiment 108573 PARAMETER Experiment Name: At_Drought_cDNA_P Parameter: Tissue Value: Aerial
  misc_feature: MA Experiment 108573 PARAMETER Experiment Name: At_Drought_cDNA_P Parameter: Treatment Value: Drought vs. No Drought
  misc_feature: MA Experiment ID: 108579 Result: Down-regulated in Transcription
  misc_feature: MA Experiment 108579 PARAMETER Experiment Name: At_4deg_Cold_cDNA_P Parameter: Temperature (deg C) Value: 4 vs. 22
  misc_feature: MA Experiment 108579 PARAMETER Experiment Name: At_4deg_Cold_cDNA_P Parameter: Timepoint (hr) Value: 6
  misc_feature: MA Experiment 108579 PARAMETER Experiment Name: At_4deg_Cold_cDNA_P Parameter: Tissue Value: Aerial
  misc_feature: MA Experiment ID: 108595 Result: Down-regulated in Transcription
  misc_feature: MA Experiment 108595 PARAMETER Experiment Name: At_Ler-pi_Ovule_cDNA_P Parameter: Plant Line Value: null
  misc_feature: MA Experiment ID: 20000113 Result: Up-regulated in Transcription
  misc_feature: MA Experiment 20000113 PARAMETER Experiment Name: At_42deg_Heat_cDNA_P Parameter: Temperature (deg C) Value: 42 vs. 22
  misc_feature: MA Experiment 20000113 PARAMETER Experiment Name: At_42deg_Heat_cDNA_P Parameter: Timepoint (hr) Value: 8
  misc_feature: MA Experiment 20000113 PARAMETER Experiment Name: At_42deg_Heat_cDNA_P Parameter: Tissue Value: Aerial
  misc_feature: MA Experiment ID: 20001450 Result: Up-regulated in Transcription
  misc_feature: MA Experiment 20001450 PARAMETER Experiment Name: At_Far-red-induction_P Parameter: Age (day) Value: 7
  misc_feature: MA Experiment 20001450 PARAMETER Experiment Name: At_Far-red-induction_P Parameter: Light Value: Far-red vs. White
  misc_feature: MA Experiment 20001450 PARAMETER Experiment Name: At_Far-red-induction_P Parameter: Organism Value: A. thaliana
  misc_feature: MA Experiment 20001450 PARAMETER Experiment Name: At_Far-red-induction_P Parameter: Plant Line Value: Columbia
  misc_feature: MA Experiment 20001450 PARAMETER Experiment Name: At_Far-red-induction_P Parameter: Timepoint (hr) Value: 8
  misc_feature: MA Experiment 20001450 PARAMETER Experiment Name: At_Far-red-induction_P Parameter: Tissue Value: Whole Plant
tcgccgcaaaatttgttctccggaagagaatggattttcttaaggcaacgattatagttgccctaatttgcaatttcgcctcactggcgtcttctgttcctttcatagttctgcatggaattggggataaatgcagtaatgcaggagtgacacaattcacagagcttttaagcgattggtctggttctcaaggatattgcttggagattgggaatggctcatgggactcatggactatgcctctccttgatcagacatcagttgtttgtgagaaggtgaaaagtatgccagagcttagtgacggttacagcattgtggggctttctcagggtaacatgattggtcgagctctcattgagttttgcgatggagcaccacctgttaagagttttgtttcggtagcgggtcctcatgctggcactgcatcgattccgttccgtggtgctacctggatttgcatcatgttggacagtatgatcaaagcagagatctatagcgactatatgcaggaacatttggctcctagcggttttctcaaaatcccaactgacatagcgggttacatggaaggctgtaggtttctcccaaagctaaacaacgaacttccagtcaaaaactcgacttataaggagaggttctcgagtttggagaatcttgtgcttattatgtttgagcatgacacaatattgatacctaaagaaacctcatggtttggatattatcctgatgggtctttcaagaccattcttccgccgcaagagaccaagctatatactgaagactggattggtttgagaaccttagatgaagctggaaaagtgaagttcgttaacgtctctggaaatcatcttcagatatctcatacagacatgaagaagcatatagtgccatacctctgtgataaatcatcgtcgtcatcatccacaacaatggcagtttccggatcatcttcctcacaccagtggcttccaagtgtagggaacattattatggatcttattggtccagaagtggatcaggcttcagcttgtgctacgtcatgtgtaaatctgatgtcctgtgttgttgtttgttctcttactaaacacgatcgtctcgtgatatgtttgtaacttgaagataaaacaagaaaactgttccaaaatccctctc

SEQ ID NO: 24543 - protein, 369 aa, Arabidopsis thaliana
  peptide (1)..(369): Ceres Seq. ID no. 12328035
  misc_feature (29)..(299): Pfam Name: Palmitoyl protein thioesterase Pfam Description: Palmitoyl protein thioesterase
  misc_feature (12)..(306): Homolog of NCBI NO: 15236077 NR Description: putative protein; protein id: At4g17470.1
  misc_feature (12)..(306): Homolog of NCBI NO: 21554369 NR Description: palmitoyl-protein thioesterase precursor-like
  misc_feature (12)..(306): Homolog of NCBI NO: 15236078 NR Description: putative protein
  misc_feature (9)..(298): Homolog of NCBI NO: 15236079 NR Description: putative protein; protein id: At4g17483.1
  misc_feature (17)..(307): Homolog of NCBI NO: 28393539 NR Description: putative palmitoyl-protein thioesterase precursor
  misc_feature (17)..(307): Homolog of NCBI NO: 15238063 NR Description: palmitoyl-protein thioesterase precursor-like
  misc_feature (28)..(280): Homolog of NCBI NO: 37536884 NR Description: putative palmitoyl-protein thioesterase
  misc_feature (10)..(339): Homolog of NCBI NO: 14334718 NR Description: putative palmitoyl-protein thioesterase precursor
  misc_feature (10)..(339): Homolog of NCBI NO: 15232301 NR Description: palmitoyl-protein thioesterase precursor - like
  misc_feature (10)..(339): Homolog of NCBI NO: 21593393 NR Description: palmitoyl-protein thioesterase precursor-like
AAKFVLRKRMDFLKATIIVALICNFASLASSVPFIVLHGIGDKCSNAGVTQFTELLSDWSGSQGYCLEIGNGSWDSWTMPLLDQTSVVCEKVKSMPELSDGYSIVGLSQGNMIGRALIEFCDGAPPVKSFVSVAGPHAGTASIPFRGATWICIMLDSMIKAEIYSDYMQEHLAPSGFLKIPTDIAGYMEGCRFLPKLNNELPVKNSTYKERFSSLENLVLIMFEHDTILIPKETSWFGYYPDGSFKTILPPQETKLYTEDWIGLRTLDEAGKVKFVNVSGNHLQISHTDMKKHIVPYLCDKSSSSSSTTMAVSGSSSSHQWLPSVGNIIMDLIGPEVDQASACATSCVNLMSCVVVCSLTKHDRLVICL

SEQ ID NO: 24544 - protein, 360 aa, Arabidopsis thaliana
  peptide (1)..(360): Ceres Seq. ID no. 12328036
  misc_feature (20)..(290): Pfam Name: Palmitoyl protein thioesterase Pfam Description: Palmitoyl protein thioesterase
  misc_feature (1)..(330): Homolog of NCBI NO: 14334718 NR Description: putative palmitoyl-protein thioesterase precursor
  misc_feature (1)..(330): Homolog of NCBI NO: 15232301 NR Description: palmitoyl-protein thioesterase precursor - like
  misc_feature (3)..(297): Homolog of NCBI NO: 21554369 NR Description: palmitoyl-protein thioesterase precursor-like
  misc_feature (1)..(289): Homolog of NCBI NO: 15236079 NR Description: putative protein; protein id: At4g17483.1
  misc_feature (8)..(298): Homolog of NCBI NO: 15238063 NR Description: palmitoyl-protein thioesterase precursor-like
  misc_feature (19)..(271): Homolog of NCBI NO: 37536884 NR Description: putative palmitoyl-protein thioesterase
  misc_feature (8)..(298): Homolog of NCBI NO: 28393539 NR Description: putative palmitoyl-protein thioesterase precursor
  misc_feature (3)..(297): Homolog of NCBI NO: 15236078 NR Description: putative protein
  misc_feature (3)..(297): Homolog of NCBI NO: 15236077 NR Description: putative protein; protein id: At4g17470.1
  misc_feature (1)..(330): Homolog of NCBI NO: 21593393 NR Description: palmitoyl-protein thioesterase precursor-like
MDFLKATIIVALICNFASLASSVPFIVLHGIGDKCSNAGVTQFTELLSDWSGSQGYCLEIGNGSWDSWTMPLLDQTSVVCEKVKSMPELSDGYSIVGLSQGNMIGRALIEFCDGAPPVKSFVSVAGPHAGTASIPFRGATWICIMLDSMIKAEIYSDYMQEHLAPSGFLKIPTDIAGYMEGCRFLPKLNNELPVKNSTYKERFSSLENLVLIMFEHDTILIPKETSWFGYYPDGSFKTILPPQETKLYTEDWIGLRTLDEAGKVKFVNVSGNHLQISHTDMKKHIVPYLCDKSSSSSSTTMAVSGSSSSHQWLPSVGNIIMDLIGPEVDQASACATSCVNLMSCVVVCSLTKHDRLVICL

SEQ ID NO: 24545 - protein, 291 aa, Arabidopsis thaliana
  peptide (1)..(291): Ceres Seq. ID no. 12328037
  misc_feature (1)..(221): Pfam Name: Palmitoyl protein thioesterase Pfam Description: Palmitoyl protein thioesterase
  misc_feature (1)..(228): Homolog of NCBI NO: 15236077 NR Description: putative protein; protein id: At4g17470.1
  misc_feature (1)..(228): Homolog of NCBI NO: 21554369 NR Description: palmitoyl-protein thioesterase precursor-like
  misc_feature (1)..(228): Homolog of NCBI NO: 15236078 NR Description: putative protein
  misc_feature (1)..(220): Homolog of NCBI NO: 15236079 NR Description: putative protein; protein id: At4g17483.1
  misc_feature (1)..(229): Homolog of NCBI NO: 28393539 NR Description: putative palmitoyl-protein thioesterase precursor
  misc_feature (1)..(229): Homolog of NCBI NO: 15238063 NR Description: palmitoyl-protein thioesterase precursor-like
  misc_feature (1)..(202): Homolog of NCBI NO: 37536884 NR Description: putative palmitoyl-protein thioesterase
  misc_feature (1)..(261): Homolog of NCBI NO: 14334718 NR Description: putative palmitoyl-protein thioesterase precursor
  misc_feature (1)..(261): Homolog of NCBI NO: 15232301 NR Description: palmitoyl-protein thioesterase precursor - like
  misc_feature (1)..(261): Homolog of NCBI NO: 21593393 NR Description: palmitoyl-protein thioesterase precursor-like
MPLLDQTSVVCEKVKSMPELSDGYSIVGLSQGNMIGRALIEFCDGAPPVKSFVSVAGPHAGTASIPFRGATWICIMLDSMIKAEIYSDYMQEHLAPSGFLKIPTDIAGYMEGCRFLPKLNNELPVKNSTYKERFSSLENLVLIMFEHDTILIPKETSWFGYYPDGSFKTILPPQETKLYTEDWIGLRTLDEAGKVKFVNVSGNHLQISHTDMKKHIVPYLCDKSSSSSSTTMAVSGSSSSHQWLPSVGNIIMDLIGPEVDQASACATSCVNLMSCVVVCSLTKHDRLVICL

SEQ ID NO: 24546 - DNA, 1123 bp, Arabidopsis thaliana
  misc_feature (1)..(1123): Ceres Seq. ID no. 12396474
  misc_feature: MA Experiment ID: 108488 Result: Down-regulated in Transcription
  misc_feature: MA Experiment ID: 108595 Result: Down-regulated in Transcription
  misc_feature: MA Experiment 108595 PARAMETER Experiment Name: At_Ler-pi_Ovule_cDNA_P Parameter: Plant Line Value: null
  misc_feature: MA Experiment ID: 20000069 Result: Up-regulated in Transcription
  misc_feature: MA Experiment 20000069 PARAMETER Experiment Name: At_100uM_ABA_Mutants_cDNA_P Parameter: Plant Line Value: CS23
  misc_feature: MA Experiment 20000069 PARAMETER Experiment Name: At_100uM_ABA_Mutants_cDNA_P Parameter: Timepoint (hr) Value: 6
  misc_feature: MA Experiment 20000069 PARAMETER Experiment Name: At_100uM_ABA_Mutants_cDNA_P Parameter: Tissue Value: Aerial
  misc_feature: MA Experiment 20000069 PARAMETER Experiment Name: At_100uM_ABA_Mutants_cDNA_P Parameter: Treatment Value: 100uM ABA vs. No Treatment
  misc_feature: MA Experiment ID: 20000070 Result: Up-regulated in Transcription
  misc_feature: MA Experiment 20000070 PARAMETER Experiment Name: At_100uM_ABA_Mutants_cDNA_P Parameter: Plant Line Value: CS24
  misc_feature: MA Experiment 20000070 PARAMETER Experiment Name: At_100uM_ABA_Mutants_cDNA_P Parameter: Timepoint (hr) Value: 6
  misc_feature: MA Experiment 20000070 PARAMETER Experiment Name: At_100uM_ABA_Mutants_cDNA_P Parameter: Tissue Value: Aerial
  misc_feature: MA Experiment 20000070 PARAMETER Experiment Name: At_100uM_ABA_Mutants_cDNA_P Parameter: Treatment Value: 100uM ABA vs. No Treatment
  misc_feature: MA Experiment ID: 20000071 Result: Up-regulated in Transcription
  misc_feature: MA Experiment 20000071 PARAMETER Experiment Name: At_100uM_ABA_Mutants_cDNA_P Parameter: Plant Line Value: CS8104
  misc_feature: MA Experiment 20000071 PARAMETER Experiment Name: At_100uM_ABA_Mutants_cDNA_P Parameter: Timepoint (hr) Value: 6
  misc_feature: MA Experiment 20000071 PARAMETER Experiment Name: At_100uM_ABA_Mutants_cDNA_P Parameter: Tissue Value: Aerial
  misc_feature: MA Experiment 20000071 PARAMETER Experiment Name: At_100uM_ABA_Mutants_cDNA_P Parameter: Treatment Value: 100uM ABA vs. No Treatment
  misc_feature: MA Experiment ID: 20000086 Result: Up-regulated in Transcription
  misc_feature: MA Experiment 20000086 PARAMETER Experiment Name: At_100uM_ABA_Mutants_cDNA_P Parameter: Plant Line Value: CS22
  misc_feature: MA Experiment 20000086 PARAMETER Experiment Name: At_100uM_ABA_Mutants_cDNA_P Parameter: Timepoint (hr) Value: 6
  misc_feature: MA Experiment 20000086 PARAMETER Experiment Name: At_100uM_ABA_Mutants_cDNA_P Parameter: Tissue Value: Aerial
  misc_feature: MA Experiment 20000086 PARAMETER Experiment Name: At_100uM_ABA_Mutants_cDNA_P Parameter: Treatment Value: 100uM ABA vs. No Treatment
  misc_feature: MA Experiment ID: 20000113 Result: Down-regulated in Transcription
  misc_feature: MA Experiment 20000113 PARAMETER Experiment Name: At_42deg_Heat_cDNA_P Parameter: Temperature (deg C) Value: 42 vs. 22
  misc_feature: MA Experiment 20000113 PARAMETER Experiment Name: At_42deg_Heat_cDNA_P Parameter: Timepoint (hr) Value: 8
  misc_feature: MA Experiment 20000113 PARAMETER Experiment Name: At_42deg_Heat_cDNA_P Parameter: Tissue Value: Aerial
  misc_feature: MA Experiment ID: 20000179 Result: Up-regulated in Transcription
  misc_feature: MA Experiment 20000179 PARAMETER Experiment Name: At_Germinating_Seeds_P Parameter: Age (hr) Value: 6 vs. 0
  misc_feature: MA Experiment 20000179 PARAMETER Experiment Name: At_Germinating_Seeds_P Parameter: Tissue Value: Germinating Seeds
  misc_feature: MA Experiment ID: 20000794 Result: Up-regulated in Transcription
  misc_feature: MA Experiment 20000794 PARAMETER Experiment Name: At_Petals_P Parameter: Age (day) Value: 23-25 days
  misc_feature: MA Experiment 20000794 PARAMETER Experiment Name: At_Petals_P Parameter: Plant Line Value: WS
  misc_feature: MA Experiment 20000794 PARAMETER Experiment Name: At_Petals_P Parameter: Tissue Value: Petals vs. Whole plant
  misc_feature: MA Experiment ID: 20001905 Result: Up-regulated in Transcription
  misc_feature: MA Experiment 20001905 PARAMETER Experiment Name: At_Drought_Reproduction_P Parameter: Age (day) Value: 40
  misc_feature: MA Experiment 20001905 PARAMETER Experiment Name: At_Drought_Reproduction_P Parameter: Organism Value: A. thaliana
  misc_feature: MA Experiment 20001905 PARAMETER Experiment Name: At_Drought_Reproduction_P Parameter: Plant Line Value: WS
  misc_feature: MA Experiment 20001905 PARAMETER Experiment Name: At_Drought_Reproduction_P Parameter: Timepoint (day) Value: 10
  misc_feature: MA Experiment 20001905 PARAMETER Experiment Name: At_Drought_Reproduction_P Parameter: Tissue Value: Rosettes
  misc_feature: MA Experiment 20001905 PARAMETER Experiment Name: At_Drought_Reproduction_P Parameter: Treatment Value: Drought vs. No Drought
gcttagagagaaagaagaacaaacaaaacaatcattggaagaagcaaaagaaaaaaaaaagattgaaatggagaagaagctaccgagaagattggaaggcaaagtcgcgattgtgacggcttcgacgcaagggattggtttcggaatcactgagcgtttcggtctcgaaggcgcttccgtcgtcgtctcttcccgcaaacaggcaaatgttgatgaggcagtagcaaaactcaaatccaaagggattgatgcatatggaatcgtctgtcatgtttccaatgctcaacatcgccgcaatcttgtcgaaaagacggttcagaaatatgggaagatagatatcgttgtctgtaacgctgctgccaatccatctacagacccaatcttgtctagcaaagaagctgttcttgacaagctttgggaaatcaatgtcaaatcctctatacttctcctgcaggatatggctcctcaccttgagaagggttcttctgttatcttcataacttctattgctggattttcaccacaaggagctatggctatgtatggtgtcactaaaactgctcttctcggactaactaaggcgcttgctgctgagatggcccccgatacacgtgtgaacgcagttgcacccggttttgtgcccacacactttgcttctttcatcaccggtagctctgaagtgagggaaggtattgaagagaagactctgcttaacaggttgggaacaacgggagacatggctgctgcggctgctttcttagcatcagatgattcttcttacatcactggagaaactttggttgtcgctggaggaatgccttcaagactctaaacaatttcacatcaataatagcgtaaagaatgcaatcagggtatcaagtaagtagagatgttttttttagagttttcaactaaacaagactttaagaaacgaaagatgttccaataatatcacgaggccattggatacttgttggtcttgtaaaagataatttcttcatcagaaagactcgtttgggtttaattcagtggtagaacaataaagtttgggtttcgcatgtatgtgtatatgtaacaactagggttttattgtttgtgtaggtttacttctgtgtttatgttt

SEQ ID NO: 24547 - protein, 276 aa, Arabidopsis thaliana
  peptide (1)..(276): Ceres Seq. ID no. 12396475
  misc_feature (31)..(270): Homolog of NCBI NO: 39644649 NR Description: DHRS2 protein [Homo sapiens]
  misc_feature (31)..(276): Homolog of NCBI NO: 33337583 NR Description: Hep27-like protein [Homo sapiens]
  misc_feature (31)..(276): Homolog of NCBI NO: 11559412 NR Description: NADPH-dependent retinol dehydrogenase/reductase
  misc_feature (23)..(276): Homolog of NCBI NO: 33991766 NR Description: Unknown (protein for MGC:65987) [Danio rerio]
  misc_feature (29)..(276): Homolog of NCBI NO: 21355319 NR Description: CG10672-PA [Drosophila melanogaster]
  misc_feature (68)..(239): Homolog of NCBI NO: 27804395 NR Description: short-chain alcohol dehydrogenase
  misc_feature (68)..(238): Homolog of NCBI NO: 27804441 NR Description: short chain alcohol dehydrogenase [Arabidopsis
  misc_feature (68)..(239): Homolog of NCBI NO: 27804389 NR Description: short-chain alcohol dehydrogenase
  misc_feature (68)..(245): Homolog of NCBI NO: 20271003 NR Description: short-chain alcohol dehydrogenase
  misc_feature (23)..(276): Homolog of NCBI NO: 18412959 NR Description: coded for by A. thaliana cDNA Z18000
LREKEEQTKQSLEEAKEKKKIEMEKKLPRRLEGKVAIVTASTQGIGFGITERFGLEGASVVVSSRKQANVDEAVAKLKSKGIDAYGIVCHVSNAQHRRNLVEKTVQKYGKIDIVVCNAAANPSTDPILSSKEAVLDKLWEINVKSSILLLQDMAPHLEKGSSVIFITSIAGFSPQGAMAMYGVTKTALLGLTKALAAEMAPDTRVNAVAPGFVPTHFASFITGSSEVREGIEEKTLLNRLGTTGDMAAAAAFLASDDSSYITGETLVVAGGMPSRL

SEQ ID NO: 24548 - protein, 254 aa, Arabidopsis thaliana
  peptide (1)..(254): Ceres Seq. ID no. 12396476
  misc_feature (9)..(248): Homolog of NCBI NO: 39644649 NR Description: DHRS2 protein [Homo sapiens]
  misc_feature (9)..(254): Homolog of NCBI NO: 33337583 NR Description: Hep27-like protein [Homo sapiens]
  misc_feature (9)..(254): Homolog of NCBI NO: 11559412 NR Description: NADPH-dependent retinol dehydrogenase/reductase
  misc_feature (1)..(254): Homolog of NCBI NO: 33991766 NR Description: Unknown (protein for MGC:65987) [Danio rerio]
  misc_feature (7)..(254): Homolog of NCBI NO: 21355319 NR Description: CG10672-PA [Drosophila melanogaster]
  misc_feature (46)..(217): Homolog of NCBI NO: 27804395 NR Description: short-chain alcohol dehydrogenase
  misc_feature (46)..(216): Homolog of NCBI NO: 27804441 NR Description: short chain alcohol dehydrogenase [Arabidopsis
  misc_feature (46)..(217): Homolog of NCBI NO: 27804389 NR Description: short-chain alcohol dehydrogenase
  misc_feature (46)..(223): Homolog of NCBI NO: 20271003 NR Description: short-chain alcohol dehydrogenase
  misc_feature (1)..(254): Homolog of NCBI NO: 18412959 NR Description: coded for by A. thaliana cDNA Z18000
MEKKLPRRLEGKVAIVTASTQGIGFGITERFGLEGASVVVSSRKQANVDEAVAKLKSKGIDAYGIVCHVSNAQHRRNLVEKTVQKYGKIDIVVCNAAANPSTDPILSSKEAVLDKLWEINVKSSILLLQDMAPHLEKGSSVIFITSIAGFSPQGAMAMYGVTKTALLGLTKALAAEMAPDTRVNAVAPGFVPTHFASFITGSSEVREGIEEKTLLNRLGTTGDMAAAAAFLASDDSSYITGETLVVAGGMPSRL

SEQ ID NO: 24549 - DNA, 1182 bp, Arabidopsis thaliana
  misc_feature (1)..(1182): Ceres Seq. ID no. 12738964
  misc_feature: MA Experiment ID: 20000169 Result: Up-regulated in Transcription
  misc_feature: MA Experiment 20000169 PARAMETER Experiment Name: At_100uM_ABA_P Parameter: Age (day) Value: 14
  misc_feature: MA Experiment 20000169 PARAMETER Experiment Name: At_100uM_ABA_P Parameter: Organism Value: A. thaliana
  misc_feature: MA Experiment 20000169 PARAMETER Experiment Name: At_100uM_ABA_P Parameter: Plant Line Value: WS
  misc_feature: MA Experiment 20000169 PARAMETER Experiment Name: At_100uM_ABA_P Parameter: Timepoint (hr) Value: 6
  misc_feature: MA Experiment 20000169 PARAMETER Experiment Name: At_100uM_ABA_P Parameter: Tissue Value: Aerial
  misc_feature: MA Experiment 20000169 PARAMETER Experiment Name: At_100uM_ABA_P Parameter: Treatment Value: 100uM ABA vs. No Treatment
  misc_feature: MA Experiment ID: 20000180 Result: Up-regulated in Transcription
  misc_feature: MA Experiment 20000180 PARAMETER Experiment Name: At_Germinating_Seeds_P Parameter: Age (hr) Value: 24 vs. 0
  misc_feature: MA Experiment 20000180 PARAMETER Experiment Name: At_Germinating_Seeds_P Parameter: Tissue Value: Germinating Seeds
  misc_feature: MA Experiment ID: 20000185 Result: Up-regulated in Transcription
  misc_feature: MA Experiment 20000185 PARAMETER Experiment Name: At_Roots__P Parameter: Age (day) Value: 7 vs. 21
  misc_feature: MA Experiment 20000185 PARAMETER Experiment Name: At_Roots__P Parameter: Organism Value: A. thaliana
  misc_feature: MA Experiment 20000185 PARAMETER Experiment Name: At_Roots__P Parameter: Tissue Value: Roots vs. Whole Plant
  misc_feature: MA Experiment ID: 20000234 Result: Down-regulated in Transcription
  misc_feature: MA Experiment 20000234 PARAMETER Experiment Name: At_Siliques_P Parameter: Age (day) Value: 21
  misc_feature: MA Experiment 20000234 PARAMETER Experiment Name: At_Siliques_P Parameter: Organism Value: A. thaliana
  misc_feature: MA Experiment 20000234 PARAMETER Experiment Name: At_Siliques_P Parameter: Plant Line Value: WS
  misc_feature: MA Experiment 20000234 PARAMETER Experiment Name: At_Siliques_P Parameter: Tissue Value: Less Than 5mm Siliques vs. Whole Plant
  misc_feature: MA Experiment ID: 20000264 Result: Down-regulated in Transcription
  misc_feature: MA Experiment 20000264 PARAMETER Experiment Name: At_Open_Flower_P Parameter: Age (day) Value: 21
  misc_feature: MA Experiment 20000264 PARAMETER Experiment Name: At_Open_Flower_P Parameter: Plant Line Value: WS
  misc_feature: MA Experiment 20000264 PARAMETER Experiment Name: At_Open_Flower_P Parameter: Tissue Value: Open Flower vs. Whole Plant
  misc_feature: MA Experiment ID: 20000265 Result: Down-regulated in Transcription
  misc_feature: MA Experiment 20000265 PARAMETER Experiment Name: At_Open_Flower_P Parameter: Age (day) Value: 21
  misc_feature: MA Experiment 20000265 PARAMETER Experiment Name: At_Open_Flower_P Parameter: Plant Line Value: WS
  misc_feature: MA Experiment 20000265 PARAMETER Experiment Name: At_Open_Flower_P Parameter: Tissue Value: Closed Flower vs. Whole Plant
  misc_feature: MA Experiment ID: 20000267 Result: Up-regulated in Transcription
  misc_feature: MA Experiment 20000267 PARAMETER Experiment Name: At_Drought_P Parameter: Age (day) Value: 7
  misc_feature: MA Experiment 20000267 PARAMETER Experiment Name: At_Drought_P Parameter: Organism Value: A. thaliana
  misc_feature: MA Experiment 20000267 PARAMETER Experiment Name: At_Drought_P Parameter: Plant Line Value: WS
  misc_feature: MA Experiment 20000267 PARAMETER Experiment Name: At_Drought_P Parameter: Timepoint (hr) Value: 6
  misc_feature: MA Experiment 20000267 PARAMETER Experiment Name: At_Drought_P Parameter: Tissue Value: Whole Plant
  misc_feature: MA Experiment 20000267 PARAMETER Experiment Name: At_Drought_P Parameter: Treatment Value: Drought vs. No Drought
  misc_feature: MA Experiment ID: 20000268 Result: Up-regulated in Transcription
  misc_feature: MA Experiment 20000268 PARAMETER Experiment Name: At_100mM_NaCl__P Parameter: Age (day) Value: 14
  misc_feature: MA Experiment 20000268 PARAMETER Experiment Name: At_100mM_NaCl__P Parameter: Organism Value: A. thaliana
  misc_feature: MA Experiment 20000268 PARAMETER Experiment Name: At_100mM_NaCl__P Parameter: Plant Line Value: WS
  misc_feature: MA Experiment 20000268 PARAMETER Experiment Name: At_100mM_NaCl__P Parameter: Timepoint (hr) Value: 6
  misc_feature: MA Experiment 20000268 PARAMETER Experiment Name: At_100mM_NaCl__P Parameter: Tissue Value: Whole Plant
  misc_feature: MA Experiment 20000268 PARAMETER Experiment Name: At_100mM_NaCl__P Parameter: Treatment Value: 100mM NaCl vs. No Treatment
  misc_feature: MA Experiment ID: 20000286 Result: Down-regulated in Transcription
  misc_feature: MA Experiment 20000286 PARAMETER Experiment Name: At_Open_Flower_P Parameter: Age (day) Value: 21
  misc_feature: MA Experiment 20000286 PARAMETER Experiment Name: At_Open_Flower_P Parameter: Plant Line Value: WS
  misc_feature: MA Experiment 20000286 PARAMETER Experiment Name: At_Open_Flower_P Parameter: Tissue Value: Half Open vs. Whole Plant
  misc_feature: MA Experiment ID: 20000308 Result: Up-regulated in Transcription
  misc_feature: MA Experiment 20000308 PARAMETER Experiment Name: At_100mM_NaCl__P Parameter: Age (day) Value: 17
  misc_feature: MA Experiment 20000308 PARAMETER Experiment Name: At_100mM_NaCl__P Parameter: Organism Value: A. thaliana
  misc_feature: MA Experiment 20000308 PARAMETER Experiment Name: At_100mM_NaCl__P Parameter: Plant Line Value: WS
  misc_feature: MA Experiment 20000308 PARAMETER Experiment Name: At_100mM_NaCl__P Parameter: Timepoint (hr) Value: 72
  misc_feature: MA Experiment 20000308 PARAMETER Experiment Name: At_100mM_NaCl__P Parameter: Tissue Value: Whole Plant
  misc_feature: MA Experiment 20000308 PARAMETER Experiment Name: At_100mM_NaCl__P Parameter: Treatment Value: 100mM NaCl vs. No Treatment
  misc_feature: MA Experiment ID: 20000437 Result: Up-regulated in Transcription
  misc_feature: MA Experiment 20000437 PARAMETER Experiment Name: At_Drought_P Parameter: Age (day) Value: 8
  misc_feature: MA Experiment 20000437 PARAMETER Experiment Name: At_Drought_P Parameter: Organism Value: A. thaliana
  misc_feature: MA Experiment 20000437 PARAMETER Experiment Name: At_Drought_P Parameter: Plant Line Value: WS
  misc_feature: MA Experiment 20000437 PARAMETER Experiment Name: At_Drought_P Parameter: Timepoint (hr) Value: 24
  misc_feature: MA Experiment 20000437 PARAMETER Experiment Name: At_Drought_P Parameter: Tissue Value: Whole Plant
  misc_feature: MA Experiment 20000437 PARAMETER Experiment Name: At_Drought_P Parameter: Treatment Value: Drought vs. No Drought
  misc_feature: MA Experiment ID: 20000441 Result: Down-regulated in Transcription
  misc_feature: MA Experiment 20000441 PARAMETER Experiment Name: At_1uM_BR-BRZ__P Parameter: Tissue Value: Shoot Apices
  misc_feature: MA Experiment 20000441 PARAMETER Experiment Name: At_1uM_BR-BRZ__P Parameter: Treatment Value: 1uM BR vs. No Treatment
  misc_feature: MA Experiment ID: 20000451 Result: Up-regulated in Transcription
  misc_feature: MA Experiment 20000451 PARAMETER Experiment Name: At_CS6879_Shoots-Roots_P Parameter: Age (day) Value: 14
  misc_feature: MA Experiment 20000451 PARAMETER Experiment Name: At_CS6879_Shoots-Roots_P Parameter: Organism Value: A. thaliana
  misc_feature: MA Experiment 20000451 PARAMETER Experiment Name: At_CS6879_Shoots-Roots_P Parameter: Plant Line Value: CS6879 vs. WS
  misc_feature: MA Experiment 20000451 PARAMETER Experiment Name: At_CS6879_Shoots-Roots_P Parameter: Tissue Value: Roots
  misc_feature: MA Experiment ID: 20000452 Result: Up-regulated in Transcription
  misc_feature: MA Experiment 20000452 PARAMETER Experiment Name: At_CS6879_Shoots-Roots_P Parameter: Age (day) Value: 14
  misc_feature: MA Experiment 20000452 PARAMETER Experiment Name: At_CS6879_Shoots-Roots_P Parameter: Organism Value: A. thaliana
  misc_feature: MA Experiment 20000452 PARAMETER Experiment Name: At_CS6879_Shoots-Roots_P Parameter: Plant Line Value: CS6879 vs. WS
  misc_feature: MA Experiment 20000452 PARAMETER Experiment Name: At_CS6879_Shoots-Roots_P Parameter: Tissue Value: Shoots
  misc_feature: MA Experiment ID: 20000453 Result: Up-regulated in Transcription
  misc_feature: MA Experiment 20000453 PARAMETER Experiment Name: At_100uM_ABA_P Parameter: Age (day) Value: 15
  misc_feature: MA Experiment 20000453 PARAMETER Experiment Name: At_100uM_ABA_P Parameter: Organism Value: A. thaliana
  misc_feature: MA Experiment 20000453 PARAMETER Experiment Name: At_100uM_ABA_P Parameter: Plant Line Value: WS
  misc_feature: MA Experiment 20000453 PARAMETER Experiment Name: At_100uM_ABA_P Parameter: Timepoint (hr) Value: 24
  misc_feature: MA Experiment 20000453 PARAMETER Experiment Name: At_100uM_ABA_P Parameter: Tissue Value: Aerial
  misc_feature: MA Experiment 20000453 PARAMETER Experiment Name: At_100uM_ABA_P Parameter: Treatment Value: 100uM ABA vs. No Treatment
  misc_feature: MA Experiment ID: 20000455 Result: Up-regulated in Transcription
  misc_feature: MA Experiment 20000455 PARAMETER Experiment Name: At_100uM_ABA_P Parameter: Age (day) Value: 16
  misc_feature: MA Experiment 20000455 PARAMETER Experiment Name: At_100uM_ABA_P Parameter: Organism Value: A. thaliana
  misc_feature: MA Experiment 20000455 PARAMETER Experiment Name: At_100uM_ABA_P Parameter: Plant Line Value: WS
  misc_feature: MA Experiment 20000455 PARAMETER Experiment Name: At_100uM_ABA_P Parameter: Timepoint (hr) Value: 48
  misc_feature: MA Experiment 20000455 PARAMETER Experiment Name: At_100uM_ABA_P Parameter: Tissue Value: Aerial
  misc_feature: MA Experiment 20000455 PARAMETER Experiment Name: At_100uM_ABA_P Parameter: Treatment Value: 100uM ABA vs. No Treatment
  misc_feature: MA Experiment ID: 20000794 Result: Down-regulated in Transcription
  misc_feature: MA Experiment 20000794 PARAMETER Experiment Name: At_Petals_P Parameter: Age (day) Value: 23-25 days
  misc_feature: MA Experiment 20000794 PARAMETER Experiment Name: At_Petals_P Parameter: Plant Line Value: WS
  misc_feature: MA Experiment 20000794 PARAMETER Experiment Name: At_Petals_P Parameter: Tissue Value: Petals vs. Whole plant
  misc_feature: MA Experiment ID: 20001554 Result: Up-regulated in Transcription
  misc_feature: MA Experiment 20001554 PARAMETER Experiment Name: At_Drought_Soil_Dry_P Parameter: Age (day) Value: 21
  misc_feature: MA Experiment 20001554 PARAMETER Experiment Name: At_Drought_Soil_Dry_P Parameter: Organism Value: A. thaliana
  misc_feature: MA Experiment 20001554 PARAMETER Experiment Name: At_Drought_Soil_Dry_P Parameter: Plant Line Value: WS
  misc_feature: MA Experiment 20001554 PARAMETER Experiment Name: At_Drought_Soil_Dry_P Parameter: Post Timepoint (hr) Value: None
  misc_feature: MA Experiment 20001554 PARAMETER Experiment Name: At_Drought_Soil_Dry_P Parameter: Post-Treatment Value: None
  misc_feature: MA Experiment 20001554 PARAMETER Experiment Name: At_Drought_Soil_Dry_P Parameter: Timepoint (day) Value: 7
  misc_feature: MA Experiment 20001554 PARAMETER Experiment Name: At_Drought_Soil_Dry_P Parameter: Treatment Value: Drought vs. No Drought
  misc_feature: MA Experiment ID: 20001555 Result: Up-regulated in Transcription
  misc_feature: MA Experiment 20001555 PARAMETER Experiment Name: At_Drought_Soil_Dry_P Parameter: Age (day) Value: 24
  misc_feature: MA Experiment 20001555 PARAMETER Experiment Name: At_Drought_Soil_Dry_P Parameter: Organism Value: A. thaliana
  misc_feature: MA Experiment 20001555 PARAMETER Experiment Name: At_Drought_Soil_Dry_P Parameter: Plant Line Value: WS
  misc_feature: MA Experiment 20001555 PARAMETER Experiment Name: At_Drought_Soil_Dry_P Parameter: Post Timepoint (hr) Value: None
  misc_feature: MA Experiment 20001555 PARAMETER Experiment Name: At_Drought_Soil_Dry_P Parameter: Post-Treatment Value: None
  misc_feature: MA Experiment 20001555 PARAMETER Experiment Name: At_Drought_Soil_Dry_P Parameter: Timepoint (day) Value: 10
  misc_feature: MA Experiment 20001555 PARAMETER Experiment Name: At_Drought_Soil_Dry_P Parameter: Treatment Value: Drought vs. No Drought
  misc_feature: MA Experiment ID: 20001556 Result: Up-regulated in Transcription
  misc_feature: MA Experiment 20001556 PARAMETER Experiment Name: At_Drought_Soil_Dry_P Parameter: Age (day) Value: 26
  misc_feature: MA Experiment 20001556 PARAMETER Experiment Name: At_Drought_Soil_Dry_P Parameter: Organism Value: A. thaliana
  misc_feature: MA Experiment 20001556 PARAMETER Experiment Name: At_Drought_Soil_Dry_P Parameter: Plant Line Value: WS
  misc_feature: MA Experiment 20001556 PARAMETER Experiment Name: At_Drought_Soil_Dry_P Parameter: Post Timepoint (hr) Value: None
  misc_feature: MA Experiment 20001556 PARAMETER Experiment Name: At_Drought_Soil_Dry_P Parameter: Post-Treatment Value: None
  misc_feature: MA Experiment 20001556 PARAMETER Experiment Name: At_Drought_Soil_Dry_P Parameter: Timepoint (day) Value: 12
  misc_feature: MA Experiment 20001556 PARAMETER Experiment Name: At_Drought_Soil_Dry_P Parameter: Treatment Value: Drought vs. No Drought
  misc_feature: MA Experiment ID: 20001559 Result: Up-regulated in Transcription
  misc_feature: MA Experiment 20001559 PARAMETER Experiment Name: At_Drought_Soil_Dry_P Parameter: Age (day) Value: 28
  misc_feature: MA Experiment 20001559 PARAMETER Experiment Name: At_Drought_Soil_Dry_P Parameter: Organism Value: A. thaliana
  misc_feature: MA Experiment 20001559 PARAMETER Experiment Name: At_Drought_Soil_Dry_P Parameter: Plant Line Value: WS
  misc_feature: MA Experiment 20001559 PARAMETER Experiment Name: At_Drought_Soil_Dry_P Parameter: Post Timepoint (hr) Value: 29
  misc_feature: MA Experiment 20001559 PARAMETER Experiment Name: At_Drought_Soil_Dry_P Parameter: Post-Treatment Value: Re-Water vs. No Drought
  misc_feature: MA Experiment 20001559 PARAMETER Experiment Name: At_Drought_Soil_Dry_P Parameter: Timepoint (day) Value: 14
  misc_feature: MA Experiment 20001559 PARAMETER Experiment Name: At_Drought_Soil_Dry_P Parameter: Treatment Value: Drought vs. No Drought
  misc_feature: MA Experiment ID: 20001904 Result: Up-regulated in Transcription
  misc_feature: MA Experiment 20001904 PARAMETER Experiment Name: At_Drought_Reproduction_P Parameter: Age (day) Value: 37
  misc_feature: MA Experiment 20001904 PARAMETER Experiment Name: At_Drought_Reproduction_P Parameter: Organism Value: A. thaliana
  misc_feature: MA Experiment 20001904 PARAMETER Experiment Name: At_Drought_Reproduction_P Parameter: Plant Line Value: WS
  misc_feature: MA Experiment 20001904 PARAMETER Experiment Name: At_Drought_Reproduction_P Parameter: Timepoint (day) Value: 7
  misc_feature: MA Experiment 20001904 PARAMETER Experiment Name: At_Drought_Reproduction_P Parameter: Tissue Value: Rosettes
  misc_feature: MA Experiment 20001904 PARAMETER Experiment Name: At_Drought_Reproduction_P Parameter: Treatment Value: Drought vs. No Drought
  misc_feature: MA Experiment ID: 20001905 Result: Up-regulated in Transcription
  misc_feature: MA Experiment 20001905 PARAMETER Experiment Name: At_Drought_Reproduction_P Parameter: Age (day) Value: 40
  misc_feature: MA Experiment 20001905 PARAMETER Experiment Name: At_Drought_Reproduction_P Parameter: Organism Value: A. thaliana
  misc_feature: MA Experiment 20001905 PARAMETER Experiment Name: At_Drought_Reproduction_P Parameter: Plant Line Value: WS
  misc_feature: MA Experiment 20001905 PARAMETER Experiment Name: At_Drought_Reproduction_P Parameter: Timepoint (day) Value: 10
  misc_feature: MA Experiment 20001905 PARAMETER Experiment Name: At_Drought_Reproduction_P Parameter: Tissue Value: Rosettes
  misc_feature: MA Experiment 20001905 PARAMETER Experiment Name: At_Drought_Reproduction_P Parameter: Treatment Value: Drought vs. No Drought
  misc_feature: MA Experiment ID: 20001906 Result: Up-regulated in Transcription
  misc_feature: MA Experiment 20001906 PARAMETER Experiment Name: At_Drought_Reproduction_P Parameter: Age (day) Value: 35
  misc_feature: MA Experiment 20001906 PARAMETER Experiment Name: At_Drought_Reproduction_P Parameter: Organism Value: A. thaliana
  misc_feature: MA Experiment 20001906 PARAMETER Experiment Name: At_Drought_Reproduction_P Parameter: Plant Line Value: WS
  misc_feature: MA Experiment 20001906 PARAMETER Experiment Name: At_Drought_Reproduction_P Parameter: Timepoint (day) Value: 5
  misc_feature: MA Experiment 20001906 PARAMETER Experiment Name: At_Drought_Reproduction_P Parameter: Tissue Value: Siliques
  misc_feature: MA Experiment 20001906 PARAMETER Experiment Name: At_Drought_Reproduction_P Parameter: Treatment Value: Drought vs. No Drought
  misc_feature: MA Experiment ID: 20001910 Result: Up-regulated in Transcription
  misc_feature: MA Experiment 20001910 PARAMETER Experiment Name: At_Drought_Reproduction_P Parameter: Age (day) Value: 37
  misc_feature: MA Experiment 20001910 PARAMETER Experiment Name: At_Drought_Reproduction_P Parameter: Organism Value: A. thaliana
  misc_feature: MA Experiment 20001910 PARAMETER Experiment Name: At_Drought_Reproduction_P Parameter: Plant Line Value: WS
  misc_feature: MA Experiment 20001910 PARAMETER Experiment Name: At_Drought_Reproduction_P Parameter: Timepoint (day) Value: 7
  misc_feature: MA Experiment 20001910 PARAMETER Experiment Name: At_Drought_Reproduction_P Parameter: Tissue Value: Flowers
  misc_feature: MA Experiment 20001910 PARAMETER Experiment Name: At_Drought_Reproduction_P Parameter: Treatment Value: Drought vs. No Drought
  misc_feature: MA Experiment ID: 20001911 Result: Up-regulated in Transcription
  misc_feature: MA Experiment 20001911 PARAMETER Experiment Name: At_Drought_Reproduction_P Parameter: Age (day) Value: 40
  misc_feature: MA Experiment 20001911 PARAMETER Experiment Name: At_Drought_Reproduction_P Parameter: Organism Value: A. thaliana
  misc_feature: MA Experiment 20001911 PARAMETER Experiment Name: At_Drought_Reproduction_P Parameter: Plant Line Value: WS
  misc_feature: MA Experiment 20001911 PARAMETER Experiment Name: At_Drought_Reproduction_P Parameter: Timepoint (day) Value: 10
  misc_feature: MA Experiment 20001911 PARAMETER Experiment Name: At_Drought_Reproduction_P Parameter: Tissue Value: Flowers
  misc_feature: MA Experiment 20001911 PARAMETER Experiment Name: At_Drought_Reproduction_P Parameter: Treatment Value: Drought vs. No Drought
aacatacacaaaacactaaaagtagaagaaaaatggcgactcttaaggtttctgattctgttcctgctccttctgatgatgctgagcaattgagaaccgctttgatggggtacaaacgaggacttgatcatatcaatcttggctcacagaagtgctgaacagaggaaagtgatcaggcaagcataccatgaaacctacggtgaagaccttctcaagactcttgacaaggagctctctaacgacttcgagagagctatcttgttgtggactcttgaacccggtgagcgtgatgctttattggctaatgaagctacaaaaagatggacttcaagcaaccaagtgcttatggaagtagcttgcacaaggacatcaacgcagctgcttcacgcgaggcaagcttaccatgctcgctacaagaagtctcttgaagaggacgtggctcaccacactaccggtgacttcagaaagcttttggtctctcttgttacctcatacaggtacgaaggagatgaagtgaacatgacattggctaagcaagaagctaagctggtccatgagaaaatcaaggacaagcactacaatgatgaggatgttattagaatcttgtccacaagaagcaaagctcagatcaatgctacttttaaccgttaccaagatgatcatggcgaggaaattctcaagagtcttgaggaaggagatgatgatgacaagttccttgcacttttgaggtcaaccattcagtgcttgacaagaccagagctttactttgtcgatgttcttcgttcagcaatcaacaaaactggaactgatgaaggagcactcactagaattgtgaccacaagagctgagattgacttgaaggtcattggagaggagtaccagcgcaggaacagcattcctttggagaaagctattaccaaagacactcgtggagattacgagaagatgctcgtcgcacttctcggtgaagatgatgcttaatcaatcaatcctccacagagaaacataagctgctctacagcttctgttatctcttatctccctctctctctctttgatgagtttcaaatcgtttgattttgtttctacaaaaaccttgtttgtttctgttgtgtgttttgagttcctaaataatgcaaaagagagagacagagagaaccagtgtggtctcttaagttatat

SEQ ID NO: 24550 - protein, 211 aa, Arabidopsis thaliana
  peptide (1)..(211): Ceres Seq. ID no. 12738965
  misc_feature (62)..(130): Pfam Name: Annexin Pfam Description: Annexin
  misc_feature (1)..(207): Homolog of NCBI NO: 7441510 NR Description: annexin - upland cotton (fragment)
  misc_feature (1)..(211): Homolog of NCBI NO: 4580920 NR Description: vacuole-associated annexin VCaB42 [Nicotiana
  misc_feature (1)..(211): Homolog of NCBI NO: 3928134 NR Description: annexin P38 [Capsicum annuum]
  misc_feature (1)..(211): Homolog of NCBI NO: 2459926 NR Description: annexin [Lavatera thuringiaca]
  misc_feature (1)..(207): Homolog of NCBI NO: 33357398 NR Description: Chain A, Annexin Gh1 From Cotton
  misc_feature (1)..(207): Homolog of NCBI NO: 15214410 NR Description: annexin [Gossypium hirsutum]
  misc_feature (1)..(207): Homolog of NCBI NO: 7484723 NR Description: fiber annexin - upland cotton
  misc_feature (1)..(211): Homolog of NCBI NO: 1429207 NR Description: annexin [Arabidopsis thaliana]
  misc_feature (1)..(211): Homolog of NCBI NO: 1621539 NR Description: annexin-like protein
  misc_feature (1)..(211): Homolog of NCBI NO: 15220216 NR Description: Ca2+-dependent membrane-binding protein annexin
MEVACTRTSTQLLHARQAYHARYKKSLEEDVAHHTTGDFRKLLVSLVTSYRYEGDEVNMTLAKQEAKLVHEKIKDKHYNDEDVIRILSTRSKAQINATFNRYQDDHGEEILKSLEEGDDDDKFLALLRSTIQCLTRPELYFVDVLRSAINKTGTDEGALTRIVTTRAEIDLKVIGEEYQRRNSIPLEKAITKDTRGDYEKMLVALLGEDDA

SEQ ID NO: 24551 - protein, 153 aa, Arabidopsis thaliana
  peptide (1)..(153): Ceres Seq. ID no. 12738966
  misc_feature (4)..(72): Pfam Name: Annexin Pfam Description: Annexin
  misc_feature (1)..(149): Homolog of NCBI NO: 7441510 NR Description: annexin - upland cotton (fragment)
  misc_feature (1)..(153): Homolog of NCBI NO: 4580920 NR Description: vacuole-associated annexin VCaB42 [Nicotiana
  misc_feature (1)..(153): Homolog of NCBI NO: 3928134 NR Description: annexin P38 [Capsicum annuum]
  misc_feature (1)..(153): Homolog of NCBI NO: 2459926 NR Description: annexin [Lavatera thuringiaca]
  misc_feature (1)..(149): Homolog of NCBI NO: 33357398 NR Description: Chain A, Annexin Gh1 From Cotton
  misc_feature (1)..(149): Homolog of NCBI NO: 15214410 NR Description: annexin [Gossypium hirsutum]
  misc_feature (1)..(149): Homolog of NCBI NO: 7484723 NR Description: fiber annexin - upland cotton
  misc_feature (1)..(153): Homolog of NCBI NO: 1429207 NR Description: annexin [Arabidopsis thaliana]
  misc_feature (1)..(153): Homolog of NCBI NO: 1621539 NR Description: annexin-like protein
  misc_feature (1)..(153): Homolog of NCBI NO: 15220216 NR Description: Ca2+-dependent membrane-binding protein annexin
MTLAKQEAKLVHEKIKDKHYNDEDVIRILSTRSKAQINATFNRYQDDHGEEILKSLEEGDDDDKFLALLRSTIQCLTRPELYFVDVLRSAINKTGTDEGALTRIVTTRAEIDLKVIGEEYQRRNSIPLEKAITKDTRGDYEKMLVALLGEDDA

SEQ ID NO: 24552 - DNA, 1564 bp, Arabidopsis thaliana
  misc_feature (1)..(1564): Ceres Seq. ID no. 12439795
  misc_feature: MA Experiment ID: 108434 Result: Down-regulated in Transcription
  misc_feature: MA Experiment 108434 PARAMETER Experiment Name: At_Root_Tips_cDNA_P Parameter: Tissue Value: Root Tips
  misc_feature: MA Experiment ID: 20000072 Result: Up-regulated in Transcription
  misc_feature: MA Experiment 20000072 PARAMETER Experiment Name: At_100uM_ABA_Mutants_cDNA_P Parameter: Plant Line Value: CS8105
  misc_feature: MA Experiment 20000072 PARAMETER Experiment Name: At_100uM_ABA_Mutants_cDNA_P Parameter: Timepoint (hr) Value: 6
  misc_feature: MA Experiment 20000072 PARAMETER Experiment Name: At_100uM_ABA_Mutants_cDNA_P Parameter: Tissue Value: Aerial
  misc_feature: MA Experiment 20000072 PARAMETER Experiment Name: At_100uM_ABA_Mutants_cDNA_P Parameter: Treatment Value: 100uM ABA vs. No Treatment
  misc_feature: MA Experiment ID: 20000113 Result: Up-regulated in Transcription
  misc_feature: MA Experiment 20000113 PARAMETER Experiment Name: At_42deg_Heat_cDNA_P Parameter: Temperature (deg C) Value: 42 vs. 22
  misc_feature: MA Experiment 20000113 PARAMETER Experiment Name: At_42deg_Heat_cDNA_P Parameter: Timepoint (hr) Value: 8
  misc_feature: MA Experiment 20000113 PARAMETER Experiment Name: At_42deg_Heat_cDNA_P Parameter: Tissue Value: Aerial
  misc_feature: MA Experiment ID: 20000144 Result: Up-regulated in Transcription
  misc_feature: MA Experiment 20000144 PARAMETER Experiment Name: At_42deg_Heat_cDNA_P Parameter: Temperature (deg C) Value: 42 vs. 22
  misc_feature: MA Experiment 20000144 PARAMETER Experiment Name: At_42deg_Heat_cDNA_P Parameter: Timepoint (hr) Value: 1
  misc_feature: MA Experiment 20000144 PARAMETER Experiment Name: At_42deg_Heat_cDNA_P Parameter: Tissue Value: Aerial
  misc_feature: MA Experiment ID: 20000180 Result: Up-regulated in Transcription
  misc_feature: MA Experiment 20000180 PARAMETER Experiment Name: At_Germinating_Seeds_P Parameter: Age (hr) Value: 24 vs. 0
  misc_feature: MA Experiment 20000180 PARAMETER Experiment Name: At_Germinating_Seeds_P Parameter: Tissue Value: Germinating Seeds
  misc_feature: MA Experiment ID: 20000184 Result: Up-regulated in Transcription
  misc_feature: MA Experiment 20000184 PARAMETER Experiment Name: At_Shoots__P Parameter: Age (day) Value: 7
  misc_feature: MA Experiment 20000184 PARAMETER Experiment Name: At_Shoots__P Parameter: Tissue Value: Shoots vs. Whole Plant
  misc_feature: MA Experiment ID: 20000438 Result: Up-regulated in Transcription
  misc_feature: MA Experiment 20000438 PARAMETER Experiment Name: At_Shoots__P Parameter: Age (day) Value: 14
  misc_feature: MA Experiment 20000438 PARAMETER Experiment Name: At_Shoots__P Parameter: Tissue Value: Shoots vs. Whole Plant
  misc_feature: MA Experiment ID: 20000439 Result: Down-regulated in Transcription
  misc_feature: MA Experiment 20000439 PARAMETER Experiment Name: At_Roots__P Parameter: Age (day) Value: 14 vs. 21
  misc_feature: MA Experiment 20000439 PARAMETER Experiment Name: At_Roots__P Parameter: Organism Value: A. thaliana
  misc_feature: MA Experiment 20000439 PARAMETER Experiment Name: At_Roots__P Parameter: Tissue Value: Roots vs. Whole Plant
agtgttcaccattttttatttttctccacaaacccaatctttctacaatggttctcttcttctccactcgttttctcttcttctccatcttcttcccttgcctcatctctatcactctctaccaactcgactcattcgagccagcttcacttcccgcggactcactcatcacctctcccacttcaatcccgccacttctcaacgacagatttctcaccggagctgagtttatcggcgtcggtcttctcaataaccccgaggatatcgcctaccataaggactctaatctcatctatactggttgtgttgatggatgggtgaaacgagtcagtgttcacgactcagctaatgactcaatcgtagaggattgggtcaataccggtggtagacctctcggtatcgcttttggacttcacggcgaagtcattgtcgccgacgcaaacaagggattgttgagtataagcgatggcgggaagaagacggaattgttgacggatgaagcagacggtgttagatttaagctgacggatgcagttaccgttgctgataacggcgttttgtatttcacagatgcttcttcgaaatacgatttctatcaatttatctttgatttcttggaaggcaaaccacacggtcgtgtcatgagctttgatcctaccacacgtgccacacgtgttcttctcaaagacctctacttcgctaatggcatatcaatgtcccctgatcaaacacatttcgtcttctgcgaaaccatcatgagaagatgcagtaagtattatattagtgaggagcgtgttgaggtatttattcagggcttaccaggttatccagataacattcggtacgacggagatggacattactggattgcattgatttcggaagtaacaacgtcatggaaactctcgatgaaataccttttcttgaggaaactcatatacatggcggctaagtatggcgtggaactactgtctataaagaatgcagccgttttgcaagtggatttggatgggaatcctatcgcaatgtaccatgatcatccattctctcacataacaagcggagtcaagattgggaaccatctctattttgggagcctcttgcattcctacattactagactcgatcttttaaagtatcccgcacaaaagaagctttaaacatcaagtttaggagtattcactgtcacaaaatgtaaagtcttcgtccctggcacatcatcatgtccttttgtcttcgtccctggcacatcatgtacggttgttgtaaggtcgagttttggtgttaaggtgttgttagtttataatctttgtgaatatggttagcttcttggtgcattgcaaggttaggtgaggtgaatagaggtggcgaataggttttagtggtttcacttttcgttgagctagtgtattagtccatgtttgctcgttcgttttgcgttagttttcggagaagctataagcttctatctggaggttttgtggacggtgttgttctcggaaaactaaagtatagcagaagattgcaaaatacttcgatggtttattgatatgaattgcatgcc

SEQ ID NO: 24553 - protein, 385 aa, Arabidopsis thaliana
  peptide (1)..(385): Ceres Seq. ID no. 12439796
  misc_feature (23)..(371): Pfam Name: Strictosidine synthase Pfam Description: Strictosidine synthase
  misc_feature (67)..(376): Homolog of NCBI NO: 23059369 NR Description: hypothetical protein [Pseudomonas fluorescens
  misc_feature (85)..(366): Homolog of NCBI NO: 40063117 NR Description: strictosidine synthase family protein [uncultured
  misc_feature (25)..(384): Homolog of NCBI NO: 23237921 NR Description: contains ESTs
  misc_feature (67)..(374): Homolog of NCBI NO: 15596490 NR Description: hypothetical protein [Pseudomonas aeruginosa
  misc_feature (34)..(383): Homolog of NCBI NO: 37536558 NR Description: mucin-like protein [Oryza sativa (japonica
  misc_feature (16)..(384): Homolog of NCBI NO: 15230490 NR Description: strictosidine synthase-related
  misc_feature (16)..(384): Homolog of NCBI NO: 15230488 NR Description: strictosidine synthase-related
  misc_feature (16)..(384): Homolog of NCBI NO: 11358518 NR Description: mucin-like protein - Arabidopsis thaliana
  misc_feature (16)..(384): Homolog of NCBI NO: 18409339 NR Description: strictosidine synthase-related
  misc_feature (16)..(385): Homolog of NCBI NO: 15230477 NR Description: strictosidine synthase-related
CSPFFIFLHKPNLSTMVLFFSTRFLFFSIFFPCLISITLYQLDSFEPASLPADSLITSPTSIPPLLNDRFLTGAEFIGVGLLNNPEDIAYHKDSNLIYTGCVDGWVKRVSVHDSANDSIVEDWVNTGGRPLGIAFGLHGEVIVADANKGLLSISDGGKKTELLTDEADGVRFKLTDAVTVADNGVLYFTDASSKYDFYQFIFDFLEGKPHGRVMSFDPTTRATRVLLKDLYFANGISMSPDQTHFVFCETIMRRCSKYYISEERVEVFIQGLPGYPDNIRYDGDGHYWIALISEVTTSWKLSMKYLFLRKLIYMAAKYGVELLSIKNAAVLQVDLDGNPIAMYHDHPFSHITSGVKIGNHLYFGSLLHSYITRLDLLKYPAQKKL

SEQ ID NO: 24554 - protein, 370 aa, Arabidopsis thaliana
  peptide (1)..(370): Ceres Seq. ID no. 12439797
  misc_feature (8)..(356): Pfam Name: Strictosidine synthase Pfam Description: Strictosidine synthase
  misc_feature (52)..(361): Homolog of NCBI NO: 23059369 NR Description: hypothetical protein [Pseudomonas fluorescens
  misc_feature (70)..(351): Homolog of NCBI NO: 40063117 NR Description: strictosidine synthase family protein [uncultured
  misc_feature (10)..(369): Homolog of NCBI NO: 23237921 NR Description: contains ESTs
  misc_feature (52)..(359): Homolog of NCBI NO: 15596490 NR Description: hypothetical protein [Pseudomonas aeruginosa
  misc_feature (19)..(368): Homolog of NCBI NO: 37536558 NR Description: mucin-like protein [Oryza sativa (japonica
  misc_feature (1)..(369): Homolog of NCBI NO: 15230490 NR Description: strictosidine synthase-related
  misc_feature (1)..(369): Homolog of NCBI NO: 15230488 NR Description: strictosidine synthase-related
  misc_feature (1)..(369): Homolog of NCBI NO: 11358518 NR Description: mucin-like protein - Arabidopsis thaliana
  misc_feature (1)..(369): Homolog of NCBI NO: 18409339 NR Description: strictosidine synthase-related
  misc_feature (1)..(370): Homolog of NCBI NO: 15230477 NR Description: strictosidine synthase-related
MVLFFSTRFLFFSIFFPCLISITLYQLDSFEPASLPADSLITSPTSIPPLLNDRFLTGAEFIGVGLLNNPEDIAYHKDSNLIYTGCVDGWVKRVSVHDSANDSIVEDWVNTGGRPLGIAFGLHGEVIVADANKGLLSISDGGKKTELLTDEADGVRFKLTDAVTVADNGVLYFTDASSKYDFYQFIFDFLEGKPHGRVMSFDPTTRATRVLLKDLYFANGISMSPDQTHFVFCETIMRRCSKYYISEERVEVFIQGLPGYPDNIRYDGDGHYWIALISEVTTSWKLSMKYLFLRKLIYMAAKYGVELLSIKNAAVLQVDLDGNPIAMYHDHPFSHITSGVKIGNHLYFGSLLHSYITRLDLLKYPAQKKL

SEQ ID NO: 24555 - DNA, 1500 bp, Arabidopsis thaliana
  misc_feature (1)..(1500): Ceres Seq. ID no. 12576542
  misc_feature: MA Experiment ID: 108434 Result: Up-regulated in Transcription
  misc_feature: MA Experiment 108434 PARAMETER Experiment Name: At_Root_Tips_cDNA_P Parameter: Tissue Value: Root Tips
  misc_feature: MA Experiment ID: 108462 Result: Down-regulated in Transcription
  misc_feature: MA Experiment 108462 PARAMETER Experiment Name: At_Germinating_Seeds_cDNA_P Parameter: Age (day) Value: 2 vs. 0
  misc_feature: MA Experiment 108462 PARAMETER Experiment Name: At_Germinating_Seeds_cDNA_P Parameter: Tissue Value: Germinating Seeds
  misc_feature: MA Experiment ID: 108569 Result: Up-regulated in Transcription
  misc_feature: MA Experiment 108569 PARAMETER Experiment Name: At_0.001%_MeJA__cDNA_P Parameter: Timepoint (hr) Value: 6
  misc_feature: MA Experiment 108569 PARAMETER Experiment Name: At_0.001%_MeJA__cDNA_P Parameter: Tissue Value: Aerial
  misc_feature: MA Experiment 108569 PARAMETER Experiment Name: At_0.001%_MeJA__cDNA_P Parameter: Treatment Value: 0.001% MeJA vs. No Treatment
  misc_feature: MA Experiment ID: 108573 Result: Up-regulated in Transcription
  misc_feature: MA Experiment 108573 PARAMETER Experiment Name: At_Drought_cDNA_P Parameter: Timepoint (hr) Value: 6
  misc_feature: MA Experiment 108573 PARAMETER Experiment Name: At_Drought_cDNA_P Parameter: Tissue Value: Aerial
  misc_feature: MA Experiment 108573 PARAMETER Experiment Name: At_Drought_cDNA_P Parameter: Treatment Value: Drought vs. No Drought
  misc_feature: MA Experiment ID: 108576 Result: Up-regulated in Transcription
  misc_feature: MA Experiment 108576 PARAMETER Experiment Name: At_42deg_Heat_cDNA_P Parameter: Temperature (deg C) Value: 42 vs. 22
  misc_feature: MA Experiment 108576 PARAMETER Experiment Name: At_42deg_Heat_cDNA_P Parameter: Timepoint (hr) Value: 1
  misc_feature: MA Experiment 108576 PARAMETER Experiment Name: At_42deg_Heat_cDNA_P Parameter: Tissue Value: Aerial
  misc_feature: MA Experiment ID: 108577 Result: Up-regulated in Transcription
  misc_feature: MA Experiment 108577 PARAMETER Experiment Name: At_42deg_Heat_cDNA_P Parameter: Temperature (deg C) Value: 42 vs. 22
  misc_feature: MA Experiment 108577 PARAMETER Experiment Name: At_42deg_Heat_cDNA_P Parameter: Timepoint (hr) Value: 6
  misc_feature: MA Experiment 108577 PARAMETER Experiment Name: At_42deg_Heat_cDNA_P Parameter: Tissue Value: Aerial
  misc_feature: MA Experiment ID: 108585 Result: Up-regulated in Transcription
  misc_feature: MA Experiment 108585 PARAMETER Experiment Name: At_5mM_NaNP_cDNA_P Parameter: Timepoint (hr) Value: 6
  misc_feature: MA Experiment 108585 PARAMETER Experiment Name: At_5mM_NaNP_cDNA_P Parameter: Tissue Value: Aerial
  misc_feature: MA Experiment 108585 PARAMETER Experiment Name: At_5mM_NaNP_cDNA_P Parameter: Treatment Value: null
  misc_feature: MA Experiment ID: 20000069 Result: Down-regulated in Transcription
  misc_feature: MA Experiment 20000069 PARAMETER Experiment Name: At_100uM_ABA_Mutants_cDNA_P Parameter: Plant Line Value: CS23
  misc_feature: MA Experiment 20000069 PARAMETER Experiment Name: At_100uM_ABA_Mutants_cDNA_P Parameter: Timepoint (hr) Value: 6
  misc_feature: MA Experiment 20000069 PARAMETER Experiment Name: At_100uM_ABA_Mutants_cDNA_P Parameter: Tissue Value: Aerial
  misc_feature: MA Experiment 20000069 PARAMETER Experiment Name: At_100uM_ABA_Mutants_cDNA_P Parameter: Treatment Value: 100uM ABA vs. No Treatment
  misc_feature: MA Experiment ID: 20000087 Result: Down-regulated in Transcription
  misc_feature: MA Experiment 20000087 PARAMETER Experiment Name: At_100uM_ABA_Mutants_cDNA_P Parameter: Plant Line Value: WS
  misc_feature: MA Experiment 20000087 PARAMETER Experiment Name: At_100uM_ABA_Mutants_cDNA_P Parameter: Timepoint (hr) Value: 6
  misc_feature: MA Experiment 20000087 PARAMETER Experiment Name: At_100uM_ABA_Mutants_cDNA_P Parameter: Tissue Value: Aerial
  misc_feature: MA Experiment 20000087 PARAMETER Experiment Name: At_100uM_ABA_Mutants_cDNA_P Parameter: Treatment Value: 100uM ABA vs. No Treatment
  misc_feature: MA Experiment ID: 20000093 Result: Up-regulated in Transcription
  misc_feature: MA Experiment 20000093 PARAMETER Experiment Name: At_42deg_Heat_cDNA_P Parameter: Temperature (deg C) Value: 42 vs. 22
  misc_feature: MA Experiment 20000093 PARAMETER Experiment Name: At_42deg_Heat_cDNA_P Parameter: Timepoint (hr) Value: 0.5
  misc_feature: MA Experiment 20000093 PARAMETER Experiment Name: At_42deg_Heat_cDNA_P Parameter: Tissue Value: Aerial
  misc_feature: MA Experiment ID: 20000112 Result: Up-regulated in Transcription
  misc_feature: MA Experiment 20000112 PARAMETER Experiment Name: At_42deg_Heat_cDNA_P Parameter: Temperature (deg C) Value: 42 vs. 22
  misc_feature: MA Experiment 20000112 PARAMETER Experiment Name: At_42deg_Heat_cDNA_P Parameter: Timepoint (hr) Value: 2
  misc_feature: MA Experiment 20000112 PARAMETER Experiment Name: At_42deg_Heat_cDNA_P Parameter: Tissue Value: Aerial
  misc_feature: MA Experiment ID: 20000144 Result: Up-regulated in Transcription
  misc_feature: MA Experiment 20000144 PARAMETER Experiment Name: At_42deg_Heat_cDNA_P Parameter: Temperature (deg C) Value: 42 vs. 22
  misc_feature: MA Experiment 20000144 PARAMETER Experiment Name: At_42deg_Heat_cDNA_P Parameter: Timepoint (hr) Value: 1
  misc_feature: MA Experiment 20000144 PARAMETER Experiment Name: At_42deg_Heat_cDNA_P Parameter: Tissue Value: Aerial
  misc_feature: MA Experiment ID: 20000171 Result: Up-regulated in Transcription
  misc_feature: MA Experiment 20000171 PARAMETER Experiment Name: At_42deg_Heat_P Parameter: Age (day) Value: 14
  misc_feature: MA Experiment 20000171 PARAMETER Experiment Name: At_42deg_Heat_P Parameter: Organism Value: A. thaliana
  misc_feature: MA Experiment 20000171 PARAMETER Experiment Name: At_42deg_Heat_P Parameter: Plant Line Value: WS
  misc_feature: MA Experiment 20000171 PARAMETER Experiment Name: At_42deg_Heat_P Parameter: Temperature (deg C) Value: 42 vs. 22
  misc_feature: MA Experiment 20000171 PARAMETER Experiment Name: At_42deg_Heat_P Parameter: Timepoint (hr) Value: 1
  misc_feature: MA Experiment 20000171 PARAMETER Experiment Name: At_42deg_Heat_P Parameter: Tissue Value: Aerial
  misc_feature: MA Experiment ID: 20000173 Result: Up-regulated in Transcription
  misc_feature: MA Experiment 20000173 PARAMETER Experiment Name: At_42deg_Heat_P Parameter: Age (day) Value: 14
  misc_feature: MA Experiment 20000173 PARAMETER Experiment Name: At_42deg_Heat_P Parameter: Organism Value: A. thaliana
  misc_feature: MA Experiment 20000173 PARAMETER Experiment Name: At_42deg_Heat_P Parameter: Plant Line Value: WS
  misc_feature: MA Experiment 20000173 PARAMETER Experiment Name: At_42deg_Heat_P Parameter: Temperature (deg C) Value: 42 vs. 22
  misc_feature: MA Experiment 20000173 PARAMETER Experiment Name: At_42deg_Heat_P Parameter: Timepoint (hr) Value: 6
  misc_feature: MA Experiment 20000173 PARAMETER Experiment Name: At_42deg_Heat_P Parameter: Tissue Value: Aerial
  misc_feature: MA Experiment ID: 20000179 Result: Down-regulated in Transcription
  misc_feature: MA Experiment 20000179 PARAMETER Experiment Name: At_Germinating_Seeds_P Parameter: Age (hr) Value: 6 vs. 0
  misc_feature: MA Experiment 20000179 PARAMETER Experiment Name: At_Germinating_Seeds_P Parameter: Tissue Value: Germinating Seeds
  misc_feature: MA Experiment ID: 20000184 Result: Up-regulated in Transcription
  misc_feature: MA Experiment 20000184 PARAMETER Experiment Name: At_Shoots__P Parameter: Age (day) Value: 7
  misc_feature: MA Experiment 20000184 PARAMETER Experiment Name: At_Shoots__P Parameter: Tissue Value: Shoots vs. Whole Plant
  misc_feature: MA Experiment ID: 20000185 Result: Up-regulated in Transcription
  misc_feature: MA Experiment 20000185 PARAMETER Experiment Name: At_Roots__P Parameter: Age (day) Value: 7 vs. 21
  misc_feature: MA Experiment 20000185 PARAMETER Experiment Name: At_Roots__P Parameter: Organism Value: A. thaliana
  misc_feature: MA Experiment 20000185 PARAMETER Experiment Name: At_Roots__P Parameter: Tissue Value: Roots vs. Whole Plant
  misc_feature: MA Experiment ID: 20000234 Result: Up-regulated in Transcription
  misc_feature: MA Experiment 20000234 PARAMETER Experiment Name: At_Siliques_P Parameter: Age (day) Value: 21
  misc_feature: MA Experiment 20000234 PARAMETER Experiment Name: At_Siliques_P Parameter: Organism Value: A. thaliana
  misc_feature: MA Experiment 20000234 PARAMETER Experiment Name: At_Siliques_P Parameter: Plant Line Value: WS
  misc_feature: MA Experiment 20000234 PARAMETER Experiment Name: At_Siliques_P Parameter: Tissue Value: Less Than 5mm Siliques vs. Whole Plant
  misc_feature: MA Experiment ID: 20000439 Result: Up-regulated in Transcription
  misc_feature: MA Experiment 20000439 PARAMETER Experiment Name: At_Roots__P Parameter: Age (day) Value: 14 vs. 21
  misc_feature: MA Experiment 20000439 PARAMETER Experiment Name: At_Roots__P Parameter: Organism Value: A. thaliana
  misc_feature: MA Experiment 20000439 PARAMETER Experiment Name: At_Roots__P Parameter: Tissue Value: Roots vs. Whole Plant
  misc_feature: MA Experiment ID: 20000794 Result: Up-regulated in Transcription
  misc_feature: MA Experiment 20000794 PARAMETER Experiment Name: At_Petals_P Parameter: Age (day) Value: 23-25 days
  misc_feature: MA Experiment 20000794 PARAMETER Experiment Name: At_Petals_P Parameter: Plant Line Value: WS
  misc_feature: MA Experiment 20000794 PARAMETER Experiment Name: At_Petals_P Parameter: Tissue Value: Petals vs. Whole plant
  misc_feature: MA Experiment ID: 20001248 Result: Down-regulated in Transcription
  misc_feature: MA Experiment 20001248 PARAMETER Experiment Name: At_Far-red-induction_P Parameter: Age (day) Value: 7
  misc_feature: MA Experiment 20001248 PARAMETER Experiment Name: At_Far-red-induction_P Parameter: Light Value: Far-red vs. White
  misc_feature: MA Experiment 20001248 PARAMETER Experiment Name: At_Far-red-induction_P Parameter: Organism Value: A. thaliana
  misc_feature: MA Experiment 20001248 PARAMETER Experiment Name: At_Far-red-induction_P Parameter: Plant Line Value: Columbia
  misc_feature: MA Experiment 20001248 PARAMETER Experiment Name: At_Far-red-induction_P Parameter: Timepoint (hr) Value: 4
  misc_feature: MA Experiment 20001248 PARAMETER Experiment Name: At_Far-red-induction_P Parameter: Tissue Value: Whole Plant
  misc_feature: MA Experiment ID: 20001450 Result: Down-regulated in Transcription
  misc_feature: MA Experiment 20001450 PARAMETER Experiment Name: At_Far-red-induction_P Parameter: Age (day) Value: 7
  misc_feature: MA Experiment 20001450 PARAMETER Experiment Name: At_Far-red-induction_P Parameter: Light Value: Far-red vs. White
  misc_feature: MA Experiment 20001450 PARAMETER Experiment Name: At_Far-red-induction_P Parameter: Organism Value: A. thaliana
  misc_feature: MA Experiment 20001450 PARAMETER Experiment Name: At_Far-red-induction_P Parameter: Plant Line Value: Columbia
  misc_feature: MA Experiment 20001450 PARAMETER Experiment Name: At_Far-red-induction_P Parameter: Timepoint (hr) Value: 8
  misc_feature: MA Experiment 20001450 PARAMETER Experiment Name: At_Far-red-induction_P Parameter: Tissue Value: Whole Plant
  misc_feature: MA Experiment ID: 20001451 Result: Down-regulated in Transcription
  misc_feature: MA Experiment 20001451 PARAMETER Experiment Name: At_Far-red-induction_P Parameter: Age (day) Value: 7
  misc_feature: MA Experiment 20001451 PARAMETER Experiment Name: At_Far-red-induction_P Parameter: Light Value: Far-red vs. White
  misc_feature: MA Experiment 20001451 PARAMETER Experiment Name: At_Far-red-induction_P Parameter: Organism Value: A. thaliana
  misc_feature: MA Experiment 20001451 PARAMETER Experiment Name: At_Far-red-induction_P Parameter: Plant Line Value: Columbia
  misc_feature: MA Experiment 20001451 PARAMETER Experiment Name: At_Far-red-induction_P Parameter: Timepoint (hr) Value: 24
  misc_feature: MA Experiment 20001451 PARAMETER Experiment Name: At_Far-red-induction_P Parameter: Tissue Value: Whole Plant
gaaagatccattcaccaactctttataccagcctctgtaacgttcgatcatcttgtatttcatttcaaccactcattgtttttagtttgttttacgaagaatcaactatggcgacgaagagaagcgttggaactttgaaggaagcggatctgaagggaaagagtgtgttcgtgagggttgatctcaacgttcctttggatgataactctaacatcaccgatgacaccaggattcgtgccgctgttcccaccatcaagtacttgatgggtaatggatctagggttgttctctgcagtcacttgggccgcccaaaaggtgttactcctaagtacagcttaaagcctcttgtgcccagattgtctgaacttcttggtgttgaggttgtaatggcaaatgactctattggtgaggaagtccagaagttggttgcaggactacctgaaggtggtgttttgctcttggagaatgtgaggttctacgccgaggaagagaagaatgatcctgaatttgcaaagaagcttgctgctcttgccgatgtttacgttaatgatgccttcggaactgctcacagagctcatgcttccactgagggagttgccaaattcttgaagccttcagttgctggtttcctcatgcagaaggaacttgattaccttgtcggagctgtggcaaaccccaagaagccttttgctgccattgttggaggctcaaaggtttcaacaaagattggtgtcattgagtctctcttgaacacagttgacatcctcctgctcggtggaggtatgatttttactttctacaaggcacaaggactctcagtcggatcttcccttgtggaggaggacaagcttgacttggcaaagtcactcatggagaaagcaaaggccaaaggtgtctctctcttgctcccaaccgatgtggttattgctgacaagtttgctcccgatgctaacagcaagatagtgccagccactgccatccctgatggctggatgggtctagatattggtccagactccatcaagacattcagcgaagctctggacacaaccaaaaccatcatctggaatggtcccatgggtgtgtttgaattcgataagtttgctgctggaactgaggccgtagcaaagcagcttgcagaactaagcggaaagggagtaaccacaatcattggaggaggtgactctgttgctgccgtcgagaaggttggtttggcagacaagatgagccacatctctaccggaggcggtgctagtttggagcttcttgagggtaagccacttccaggagtcctcgctctcgacgaagcttgaaaatcctcacgttggatttcatcgctattttgtgttgttatatgtataacaagtcgtctggttatcttgtgaccagacgagcaagccattatttatcagcttgagattttcgtctacggctctctttttatgagttttttagtttggagcctttttttaataataagagatgaaactctgattgacg

SEQ ID NO: 24556 - protein, 436 aa, Arabidopsis thaliana
  peptide (1)..(436): Ceres Seq. ID no. 12576543
  misc_feature (38)..(436): Pfam Name: Phosphoglycerate kinase Pfam Description: Phosphoglycerate kinase
  misc_feature (35)..(436): Homolog of NCBI NO: 7434544 NR Description: phosphoglycerate kinase (EC 2.7.2.3) precursor,
  misc_feature (34)..(436): Homolog of NCBI NO: 2499497 NR Description: Phosphoglycerate kinase, chloroplast precursor
  misc_feature (36)..(436): Homolog of NCBI NO: 129916 NR Description: Phosphoglycerate kinase, cytosolic
  misc_feature (36)..(436): Homolog of NCBI NO: 3738259 NR Description: cytosolic phosphoglycerate kinase 1 [Populus
  misc_feature (36)..(436): Homolog of NCBI NO: 29124969 NR Description: 3-phosphoglycerate kinase [Populus tremuloides]
  misc_feature (36)..(436): Homolog of NCBI NO: 9230771 NR Description: cytosolic phosphoglycerate kinase [Pisum sativum]
  misc_feature (36)..(436): Homolog of NCBI NO: 2499498 NR Description: Phosphoglycerate kinase, cytosolic
  misc_feature (36)..(436): Homolog of NCBI NO: 3738257 NR Description: cytosolic phosphoglycerate kinase 1 [Populus
  misc_feature (36)..(436): Homolog of NCBI NO: 21536853 NR Description: phosphoglycerate kinase, putative [Arabidopsis
  misc_feature (36)..(436): Homolog of NCBI NO: 15219412 NR Description: phosphoglycerate kinase, putative
KIHSPTLYTSLCNVRSSCISFQPLIVFSLFYEESTMATKRSVGTLKEADLKGKSVFVRVDLNVPLDDNSNITDDTRIRAAVPTIKYLMGNGSRVVLCSHLGRPKGVTPKYSLKPLVPRLSELLGVEVVMANDSIGEEVQKLVAGLPEGGVLLLENVRFYAEEEKNDPEFAKKLAALADVYVNDAFGTAHRAHASTEGVAKFLKPSVAGFLMQKELDYLVGAVANPKKPFAAIVGGSKVSTKIGVIESLLNTVDILLLGGGMIFTFYKAQGLSVGSSLVEEDKLDLAKSLMEKAKAKGVSLLLPTDVVIADKFAPDANSKIVPATAIPDGWMGLDIGPDSIKTFSEALDTTKTIIWNGPMGVFEFDKFAAGTEAVAKQLAELSGKGVTTIIGGGDSVAAVEKVGLADKMSHISTGGGASLELLEGKPLPGVLALDEA

SEQ ID NO: 24557 - protein, 401 aa, Arabidopsis thaliana
  peptide (1)..(401): Ceres Seq. ID no. 12576544
  misc_feature (3)..(401): Pfam Name: Phosphoglycerate kinase Pfam Description: Phosphoglycerate kinase
  misc_feature (1)..(401): Homolog of NCBI NO: 15219412 NR Description: phosphoglycerate kinase, putative
  misc_feature (1)..(401): Homolog of NCBI NO: 3738257 NR Description: cytosolic phosphoglycerate kinase 1 [Populus
  misc_feature (1)..(401): Homolog of NCBI NO: 21536853 NR Description: phosphoglycerate kinase, putative [Arabidopsis
  misc_feature (1)..(401): Homolog of NCBI NO: 7434544 NR Description: phosphoglycerate kinase (EC 2.7.2.3) precursor,
  misc_feature (1)..(401): Homolog of NCBI NO: 2499497 NR Description: Phosphoglycerate kinase, chloroplast precursor
  misc_feature (1)..(401): Homolog of NCBI NO: 129916 NR Description: Phosphoglycerate kinase, cytosolic
  misc_feature (1)..(401): Homolog of NCBI NO: 3738259 NR Description: cytosolic phosphoglycerate kinase 1 [Populus
  misc_feature (1)..(401): Homolog of NCBI NO: 29124969 NR Description: 3-phosphoglycerate kinase [Populus tremuloides]
  misc_feature (1)..(401): Homolog of NCBI NO: 9230771 NR Description: cytosolic phosphoglycerate kinase [Pisum sativum]
  misc_feature (1)..(401): Homolog of NCBI NO: 2499498 NR Description: Phosphoglycerate kinase, cytosolic
MATKRSVGTLKEADLKGKSVFVRVDLNVPLDDNSNITDDTRIRAAVPTIKYLMGNGSRVVLCSHLGRPKGVTPKYSLKPLVPRLSELLGVEVVMANDSIGEEVQKLVAGLPEGGVLLLENVRFYAEEEKNDPEFAKKLAALADVYVNDAFGTAHRAHASTEGVAKFLKPSVAGFLMQKELDYLVGAVANPKKPFAAIVGGSKVSTKIGVIESLLNTVDILLLGGGMIFTFYKAQGLSVGSSLVEEDKLDLAKSLMEKAKAKGVSLLLPTDVVIADKFAPDANSKIVPATAIPDGWMGLDIGPDSIKTFSEALDTTKTIIWNGPMGVFEFDKFAAGTEAVAKQLAELSGKGVTTIIGGGDSVAAVEKVGLADKMSHISTGGGASLELLEGKPLPGVLALDEA

SEQ ID NO: 24558 - protein, 349 aa, Arabidopsis thaliana
  peptide (1)..(349): Ceres Seq. ID no. 12576545
  misc_feature (1)..(349): Pfam Name: Phosphoglycerate kinase Pfam Description: Phosphoglycerate kinase
  misc_feature (1)..(349): Homolog of NCBI NO: 7434544 NR Description: phosphoglycerate kinase (EC 2.7.2.3) precursor,
  misc_feature (1)..(349): Homolog of NCBI NO: 2499497 NR Description: Phosphoglycerate kinase, chloroplast precursor
  misc_feature (1)..(349): Homolog of NCBI NO: 129916 NR Description: Phosphoglycerate kinase, cytosolic
  misc_feature (1)..(349): Homolog of NCBI NO: 3738259 NR Description: cytosolic phosphoglycerate kinase 1 [Populus
  misc_feature (1)..(349): Homolog of NCBI NO: 29124969 NR Description: 3-phosphoglycerate kinase [Populus tremuloides]
  misc_feature (1)..(349): Homolog of NCBI NO: 9230771 NR Description: cytosolic phosphoglycerate kinase [Pisum sativum]
  misc_feature (1)..(349): Homolog of NCBI NO: 2499498 NR Description: Phosphoglycerate kinase, cytosolic
  misc_feature (1)..(349): Homolog of NCBI NO: 3738257 NR Description: cytosolic phosphoglycerate kinase 1 [Populus
  misc_feature (1)..(349): Homolog of NCBI NO: 21536853 NR Description: phosphoglycerate kinase, putative [Arabidopsis
  misc_feature (1)..(349): Homolog of NCBI NO: 15219412 NR Description: phosphoglycerate kinase, putative
MGNGSRVVLCSHLGRPKGVTPKYSLKPLVPRLSELLGVEVVMANDSIGEEVQKLVAGLPEGGVLLLENVRFYAEEEKNDPEFAKKLAALADVYVNDAFGTAHRAHASTEGVAKFLKPSVAGFLMQKELDYLVGAVANPKKPFAAIVGGSKVSTKIGVIESLLNTVDILLLGGGMIFTFYKAQGLSVGSSLVEEDKLDLAKSLMEKAKAKGVSLLLPTDVVIADKFAPDANSKIVPATAIPDGWMGLDIGPDSIKTFSEALDTTKTIIWNGPMGVFEFDKFAAGTEAVAKQLAELSGKGVTTIIGGGDSVAAVEKVGLADKMSHISTGGGASLELLEGKPLPGVLALDEA

SEQ ID NO: 24559 - DNA, 1208 bp, Arabidopsis thaliana
  misc_feature (1)..(1208): Ceres Seq. ID no. 12384855
  misc_feature: MA Experiment ID: 108576 Result: Up-regulated in Transcription
  misc_feature: MA Experiment 108576 PARAMETER Experiment Name: At_42deg_Heat_cDNA_P Parameter: Temperature (deg C) Value: 42 vs. 22
  misc_feature: MA Experiment 108576 PARAMETER Experiment Name: At_42deg_Heat_cDNA_P Parameter: Timepoint (hr) Value: 1
  misc_feature: MA Experiment 108576 PARAMETER Experiment Name: At_42deg_Heat_cDNA_P Parameter: Tissue Value: Aerial
  misc_feature: MA Experiment ID: 20000180 Result: Down-regulated in Transcription
  misc_feature: MA Experiment 20000180 PARAMETER Experiment Name: At_Germinating_Seeds_P Parameter: Age (hr) Value: 24 vs. 0
  misc_feature: MA Experiment 20000180 PARAMETER Experiment Name: At_Germinating_Seeds_P Parameter: Tissue Value: Germinating Seeds
aaagacaaatatataacaattgaaacacatgtgtgttatcaggagaatttgtatggcttgaggaggtgtgcatcatccgtctatcaataccctgacaaggaaaaccctaattttttttggcccaaagggttttatactttaatctcatactccgattcattgtcgaaaaacgatgatgcataattcaaccgaagaatcggaatgggaggtgagacctggtggtatgctcgtccaacgaagagacgacgccgcttcctccgaccacaaacctctccaggatcccgactctgcttccgccgcttttgctcaaaccatcagaatcactgtttctcatggctcatcgcaccacgatcttcatatttctgctcacgccactttcggggatgtaaagaaagctcttgttcagaaaactggattggaagctagtgaattgaagatcttgttcagaggagttgagagagatgatgctgaacaattgcaagctgctggtgttaaggatgcgtctaagcttgttgttgttgttgaggatacgaataagagagtggaacaacagcctcctgtggtaactaaagagatggaaaaagctattgctgctgttaacgcggttacaggagaggtcgataagctctcggatagagttgttgctttagaagttgctgtgaatggagggacgcaagttgcggtgcgggagtttgacatggctgcagagcttcttatgaggcagctgctcaaattggatggcattgaggctgaaggggacgctaaagtacagcgtaaggctgaggtacgtagaatccaaaacttgcaggaggctgtggataagttgaaggcaagatgttcaaatccgtttgtggatcagagcaaagctgcagctgtaagcactgagtgggaatcgttcggaaacggtgtcggaagcttgaaccctcctccgccagcttcgccttcggccaatgtaactcaagattgggagaaatttgactgacattttagtactgctacgttgccttggaaaaaaatgcttattgaaactgtttatctttttgattattgttaaatattggaaaacgaccatcgtctttatcttctaatgtatagatatatagtatcggaaatctacatctctgtacgaaatgttggaataatccctgggaatagtctttgatgtctctcagtctctgtcgtgcctaattggcttatgtcgtagtacc

SEQ ID NO: 24560 - protein, 269 aa, Arabidopsis thaliana
  peptide (1)..(269): Ceres Seq. ID no. 12384856
  misc_feature (138)..(219): Pfam Name: BAG domain Pfam Description: BAG domain
  misc_feature (12)..(223): Homolog of NCBI NO: 15242267 NR Description: putative protein; protein id: At5g52060.1
  misc_feature (7)..(242): Homolog of NCBI NO: 6624711 NR Description: hypothetical protein [Oryza sativa (indica
  misc_feature (1)..(232): Homolog of NCBI NO: 15240726 NR Description: putative protein
  misc_feature (1)..(232): Homolog of NCBI NO: 21537107 NR Description: unknown [Arabidopsis thaliana]
  misc_feature (8)..(221): Homolog of NCBI NO: 34898024 NR Description: ESTs AU082174(S13676),AU032395(R3986) correspond a region of the predicted gene.~Similar to Arabidopsis thaliana
  misc_feature (8)..(221): Homolog of NCBI NO: 25553557 NR Description: OSJNBa0038F22.4 [Oryza sativa (japonica
  misc_feature (8)..(269): Homolog of NCBI NO: 34907972 NR Description: P0446G04.18 [Oryza sativa (japonica
  misc_feature (2)..(269): Homolog of NCBI NO: 21554254 NR Description: unknown [Arabidopsis thaliana]
  misc_feature (1)..(269): Homolog of NCBI NO: 15231035 NR Description: putative protein
  misc_feature (1)..(269): Homolog of NCBI NO: 19699283 NR Description: At3g51780/ORF3 [Arabidopsis thaliana]
MMHNSTEESEWEVRPGGMLVQRRDDAASSDHKPLQDPDSASAAFAQTIRITVSHGSSHHDLHISAHATFGDVKKALVQKTGLEASELKILFRGVERDDAEQLQAAGVKDASKLVVVVEDTNKRVEQQPPVVTKEMEKAIAAVNAVTGEVDKLSDRVVALEVAVNGGTQVAVREFDMAAELLMRQLLKLDGIEAEGDAKVQRKAEVRRIQNLQEAVDKLKARCSNPFVDQSKAAAVSTEWESFGNGVGSLNPPPPASPSANVTQDWEKFD

SEQ ID NO: 24561 - protein, 268 aa, Arabidopsis thaliana
  peptide (1)..(268): Ceres Seq. ID no. 12384857
  misc_feature (137)..(218): Pfam Name: BAG domain Pfam Description: BAG domain
  misc_feature (11)..(222): Homolog of NCBI NO: 15242267 NR Description: putative protein; protein id: At5g52060.1
  misc_feature (6)..(241): Homolog of NCBI NO: 6624711 NR Description: hypothetical protein [Oryza sativa (indica
  misc_feature (1)..(231): Homolog of NCBI NO: 15240726 NR Description: putative protein
  misc_feature (1)..(231): Homolog of NCBI NO: 21537107 NR Description: unknown [Arabidopsis thaliana]
  misc_feature (7)..(220): Homolog of NCBI NO: 34898024 NR Description: ESTs AU082174(S13676),AU032395(R3986) correspond a region of the predicted gene.~Similar to Arabidopsis thaliana
  misc_feature (7)..(220): Homolog of NCBI NO: 25553557 NR Description: OSJNBa0038F22.4 [Oryza sativa (japonica
  misc_feature (7)..(268): Homolog of NCBI NO: 34907972 NR Description: P0446G04.18 [Oryza sativa (japonica
  misc_feature (1)..(268): Homolog of NCBI NO: 21554254 NR Description: unknown [Arabidopsis thaliana]
  misc_feature (1)..(268): Homolog of NCBI NO: 15231035 NR Description: putative protein
  misc_feature (1)..(268): Homolog of NCBI NO: 19699283 NR Description: At3g51780/ORF3 [Arabidopsis thaliana]
MHNSTEESEWEVRPGGMLVQRRDDAASSDHKPLQDPDSASAAFAQTIRITVSHGSSHHDLHISAHATFGDVKKALVQKTGLEASELKILFRGVERDDAEQLQAAGVKDASKLVVVVEDTNKRVEQQPPVVTKEMEKAIAAVNAVTGEVDKLSDRVVALEVAVNGGTQVAVREFDMAAELLMRQLLKLDGIEAEGDAKVQRKAEVRRIQNLQEAVDKLKARCSNPFVDQSKAAAVSTEWESFGNGVGSLNPPPPASPSANVTQDWEKFD

SEQ ID NO: 24562 - protein, 252 aa, Arabidopsis thaliana
  peptide (1)..(252): Ceres Seq. ID no. 12384858
  misc_feature (121)..(202): Pfam Name: BAG domain Pfam Description: BAG domain
  misc_feature (1)..(206): Homolog of NCBI NO: 15242267 NR Description: putative protein; protein id: At5g52060.1
  misc_feature (1)..(225): Homolog of NCBI NO: 6624711 NR Description: hypothetical protein [Oryza sativa (indica
  misc_feature (1)..(215): Homolog of NCBI NO: 15240726 NR Description: putative protein
  misc_feature (1)..(215): Homolog of NCBI NO: 21537107 NR Description: unknown [Arabidopsis thaliana]
  misc_feature (1)..(204): Homolog of NCBI NO: 34898024 NR Description: ESTs AU082174(S13676),AU032395(R3986) correspond a region of the predicted gene.~Similar to Arabidopsis thaliana
  misc_feature (1)..(204): Homolog of NCBI NO: 25553557 NR Description: OSJNBa0038F22.4 [Oryza sativa (japonica
  misc_feature (1)..(252): Homolog of NCBI NO: 34907972 NR Description: P0446G04.18 [Oryza sativa (japonica
  misc_feature (1)..(252): Homolog of NCBI NO: 21554254 NR Description: unknown [Arabidopsis thaliana]
  misc_feature (1)..(252): Homolog of NCBI NO: 15231035 NR Description: putative protein
  misc_feature (1)..(252): Homolog of NCBI NO: 19699283 NR Description: At3g51780/ORF3 [Arabidopsis thaliana]
MLVQRRDDAASSDHKPLQDPDSASAAFAQTIRITVSHGSSHHDLHISAHATFGDVKKALVQKTGLEASELKILFRGVERDDAEQLQAAGVKDASKLVVVVEDTNKRVEQQPPVVTKEMEKAIAAVNAVTGEVDKLSDRVVALEVAVNGGTQVAVREFDMAAELLMRQLLKLDGIEAEGDAKVQRKAEVRRIQNLQEAVDKLKARCSNPFVDQSKAAAVSTEWESFGNGVGSLNPPPPASPSANVTQDWEKFD

SEQ ID NO: 24563 - DNA, 1742 bp, Arabidopsis thaliana
  misc_feature (1)..(1742): Ceres Seq. ID no. 12377355
  misc_feature: MA Experiment ID: 108461 Result: Up-regulated in Transcription
  misc_feature: MA Experiment 108461 PARAMETER Experiment Name: At_Germinating_Seeds_cDNA_P Parameter: Age (day) Value: 1 vs. 0
  misc_feature: MA Experiment 108461 PARAMETER Experiment Name: At_Germinating_Seeds_cDNA_P Parameter: Tissue Value: Germinating Seeds
  misc_feature: MA Experiment ID: 20000088 Result: Up-regulated in Transcription
  misc_feature: MA Experiment 20000088 PARAMETER Experiment Name: At_100uM_ABA_Mutants_cDNA_P Parameter: Plant Line Value: Landsberg
  misc_feature: MA Experiment 20000088 PARAMETER Experiment Name: At_100uM_ABA_Mutants_cDNA_P Parameter: Timepoint (hr) Value: 6
  misc_feature: MA Experiment 20000088 PARAMETER Experiment Name: At_100uM_ABA_Mutants_cDNA_P Parameter: Tissue Value: Aerial
  misc_feature: MA Experiment 20000088 PARAMETER Experiment Name: At_100uM_ABA_Mutants_cDNA_P Parameter: Treatment Value: 100uM ABA vs. No Treatment
  misc_feature: MA Experiment ID: 20000794 Result: Up-regulated in Transcription
  misc_feature: MA Experiment 20000794 PARAMETER Experiment Name: At_Petals_P Parameter: Age (day) Value: 23-25 days
  misc_feature: MA Experiment 20000794 PARAMETER Experiment Name: At_Petals_P Parameter: Plant Line Value: WS
  misc_feature: MA Experiment 20000794 PARAMETER Experiment Name: At_Petals_P Parameter: Tissue Value: Petals vs. Whole plant
atcattcttagaaccaaaaaggaaagtcccaacgatcccattttactccttttcaccacctctagtagcagagagagagagagagtatggcgattacggtgccgagacggcaactcttcatcggcggtcaatggactgagcccgttctccgtaaaactctccctgttgtcaatcccgccaccgaagacatcatcggttatattccagctgcaacttctgaagatgtggagcttgctgtggaagctgctaggaaagcatttactaggaacaacggaaaggattgggctagagcaactggtgctgttcgtgccaaatacttgcgcgctattgcagctaaggtaatagagaggaagtctgaactagctaatcttgaggctattgattgcggtaaacctctagatgaagcagcatgggacatggatgatgttgctggatgttttgaatattatgctgacctagctgaaggcttggatgcaaagcagaagactcctctttctcttccgatggatacttttaagggttatattctcaaggaacccattggcgtagttggcatgattactccatggaactatccgttattgatggctgtctggaaagtcgctccttcacttgctgctgggtgcacggctatactgaaaccttcagagttggcctccctgacatgtttggagctcgctgatatttgccgcgaggtgggtctaccacctggtgttcttaatattctgactggtttaggaactgaagcaggtgctccactggcatcgcatccacatgttgacaagattgtattcactggaagcacaacaactggaagcagcattatgacttccgctgccaaattggtgaaaccagtttccttggagcttgggggtaaaagccctatcattgtctttgatgatgtcgatattgataaagctgtggaatggactatgtttggttgtttctggacgaatgggcagatttgtagtgccacatctcgacttcttgtgcatgaaaggattgctgacgagtttttggacaagctggtaaagtggaccaagaacattaagatttcagatccttttgaagaaggctgtaggcttggtcctgttgtcagtaaaggacagtacgagagagttctaaagtttgtctcaaacgctaggaatgaaggtgcaactgttctttgtggaggagttcgtcctgagcatttaaagaagggatactttgttgaacctgcgattgtttcaaatgtgactacttcaatggaaatctggagagaggaagtctttggtcctgctctgtgtgtgaaaacattctccaccgaggatgaggcaattcagcttgcaaatgactctcaatatggattagcaggcgcagtattatcaaatgatctggagcggtgtgatcgtgttagtaaggctttccaggcgggaatagtgtgggtcaactgctctcagccatgcttctgccaagctccatggggtggaaccaaacgcagtggatttggccgtgaattgggagaatggggacttgagaactacttgagtgtgaagcaggtgactcagtatatctctgatgaaccatggggatggtacaaacctccttccaagctctgagacaaacactagttcctgatatttccttaaaacatgtactcatgagaatataccaataaagcaagagacccttctgtaagagaaatggtattgctactttaaattcttgaaaaaaatgaaaaataagatgagatgatatttctt

SEQ ID NO: 24564 - protein, 503 aa, Arabidopsis thaliana
  peptide (1)..(503): Ceres Seq. ID no. 12377356
  misc_feature (1)..(500): Homolog of NCBI NO: 20135572 NR Description: betaine aldehyde dehydrogenase BADH1 [Atriplex
  misc_feature (1)..(503): Homolog of NCBI NO: 17221346 NR Description: aminoaldehyde dehydrogenase [Pisum sativum]
  misc_feature (5)..(503): Homolog of NCBI NO: 3913464 NR Description: Betaine-aldehyde dehydrogenase (BADH)
  misc_feature (1)..(503): Homolog of NCBI NO: 30698520 NR Description: betaine aldehyde dehydrogenase
  misc_feature (1)..(500): Homolog of NCBI NO: 2811031 NR Description: Betaine-aldehyde dehydrogenase, chloroplast
  misc_feature (1)..(503): Homolog of NCBI NO: 11414910 NR Description: betaine aldehyde dehydrogenase [Avicennia marina]
  misc_feature (1)..(503): Homolog of NCBI NO: 15131692 NR Description: putative aminoaldehyde dehydrogenase [Pisum
  misc_feature (1)..(500): Homolog of NCBI NO: 11251896 NR Description: betaine-aldehyde dehydrogenase (EC 1.2.1.8)
  misc_feature (1)..(501): Homolog of NCBI NO: 18410730 NR Description: betaine aldehyde dehydrogenase, putative
  misc_feature (1)..(503): Homolog of NCBI NO: 15228346 NR Description: betaine aldehyde dehydrogenase-like protein
  misc_feature (1)..(500): Homolog of NCBI NO: 20135572 NR Description: betaine aldehyde dehydrogenase BADH1 [Atriplex
  misc_feature (1)..(503): Homolog of NCBI NO: 17221346 NR Description: aminoaldehyde dehydrogenase [Pisum sativum]
  misc_feature (5)..(503): Homolog of NCBI NO: 3913464 NR Description: Betaine-aldehyde dehydrogenase (BADH)
  misc_feature (1)..(503): Homolog of NCBI NO: 30698520 NR Description: betaine aldehyde dehydrogenase
  misc_feature (1)..(500): Homolog of NCBI NO: 2811031 NR Description: Betaine-aldehyde dehydrogenase, chloroplast
  misc_feature (1)..(503): Homolog of NCBI NO: 11414910 NR Description: betaine aldehyde dehydrogenase [Avicennia marina]
  misc_feature (1)..(503): Homolog of NCBI NO: 15131692 NR Description: putative aminoaldehyde dehydrogenase [Pisum
  misc_feature (1)..(500): Homolog of NCBI NO: 11251896 NR Description: betaine-aldehyde dehydrogenase (EC 1.2.1.8)
  misc_feature (1)..(501): Homolog of NCBI NO: 18410730 NR Description: betaine aldehyde dehydrogenase, putative
  misc_feature (1)..(503): Homolog of NCBI NO: 15228346 NR Description: betaine aldehyde dehydrogenase-like protein
MAITVPRRQLFIGGQWTEPVLRKTLPVVNPATEDIIGYIPAATSEDVELAVEAARKAFTRNNGKDWARATGAVRAKYLRAIAAKVIERKSELANLEAIDCGKPLDEAAWDMDDVAGCFEYYADLAEGLDAKQKTPLSLPMDTFKGYILKEPIGVVGMITPWNYPLLMAVWKVAPSLAAGCTAILKPSELASLTCLELADICREVGLPPGVLNILTGLGTEAGAPLASHPHVDKIVFTGSTTTGSSIMTSAAKLVKPVSLELGGKSPIIVFDDVDIDKAVEWTMFGCFWTNGQICSATSRLLVHERIADEFLDKLVKWTKNIKISDPFEEGCRLGPVVSKGQYERVLKFVSNARNEGATVLCGGVRPEHLKKGYFVEPAIVSNVTTSMEIWREEVFGPALCVKTFSTEDEAIQLANDSQYGLAGAVLSNDLERCDRVSKAFQAGIVWVNCSQPCFCQAPWGGTKRSGFGRELGEWGLENYLSVKQVTQYISDEPWGWYKPPSKL

SEQ ID NO: 24565 - protein, 393 aa, Arabidopsis thaliana
  peptide (1)..(393): Ceres Seq. ID no. 12377357
  misc_feature (1)..(390): Homolog of NCBI NO: 20135572 NR Description: betaine aldehyde dehydrogenase BADH1 [Atriplex
  misc_feature (1)..(393): Homolog of NCBI NO: 17221346 NR Description: aminoaldehyde dehydrogenase [Pisum sativum]
  misc_feature (1)..(393): Homolog of NCBI NO: 3913464 NR Description: Betaine-aldehyde dehydrogenase (BADH)
  misc_feature (1)..(393): Homolog of NCBI NO: 30698520 NR Description: betaine aldehyde dehydrogenase
  misc_feature (1)..(390): Homolog of NCBI NO: 2811031 NR Description: Betaine-aldehyde dehydrogenase, chloroplast
  misc_feature (1)..(393): Homolog of NCBI NO: 11414910 NR Description: betaine aldehyde dehydrogenase [Avicennia marina]
  misc_feature (1)..(393): Homolog of NCBI NO: 15131692 NR Description: putative aminoaldehyde dehydrogenase [Pisum
  misc_feature (1)..(390): Homolog of NCBI NO: 11251896 NR Description: betaine-aldehyde dehydrogenase (EC 1.2.1.8)
  misc_feature (1)..(391): Homolog of NCBI NO: 18410730 NR Description: betaine aldehyde dehydrogenase, putative
  misc_feature (1)..(393): Homolog of NCBI NO: 15228346 NR Description: betaine aldehyde dehydrogenase-like protein
  misc_feature (1)..(390): Homolog of NCBI NO: 20135572 NR Description: betaine aldehyde dehydrogenase BADH1 [Atriplex
  misc_feature (1)..(393): Homolog of NCBI NO: 17221346 NR Description: aminoaldehyde dehydrogenase [Pisum sativum]
  misc_feature (1)..(393): Homolog of NCBI NO: 3913464 NR Description: Betaine-aldehyde dehydrogenase (BADH)
  misc_feature (1)..(393): Homolog of NCBI NO: 30698520 NR Description: betaine aldehyde dehydrogenase
  misc_feature (1)..(390): Homolog of NCBI NO: 2811031 NR Description: Betaine-aldehyde dehydrogenase, chloroplast
  misc_feature (1)..(393): Homolog of NCBI NO: 11414910 NR Description: betaine aldehyde dehydrogenase [Avicennia marina]
  misc_feature (1)..(393): Homolog of NCBI NO: 15131692 NR Description: putative aminoaldehyde dehydrogenase [Pisum
  misc_feature (1)..(390): Homolog of NCBI NO: 11251896 NR Description: betaine-aldehyde dehydrogenase (EC 1.2.1.8)
  misc_feature (1)..(391): Homolog of NCBI NO: 18410730 NR Description: betaine aldehyde dehydrogenase, putative
  misc_feature (1)..(393): Homolog of NCBI NO: 15228346 NR Description: betaine aldehyde dehydrogenase-like protein
MDDVAGCFEYYADLAEGLDAKQKTPLSLPMDTFKGYILKEPIGVVGMITPWNYPLLMAVWKVAPSLAAGCTAILKPSELASLTCLELADICREVGLPPGVLNILTGLGTEAGAPLASHPHVDKIVFTGSTTTGSSIMTSAAKLVKPVSLELGGKSPIIVFDDVDIDKAVEWTMFGCFWTNGQICSATSRLLVHERIADEFLDKLVKWTKNIKISDPFEEGCRLGPVVSKGQYERVLKFVSNARNEGATVLCGGVRPEHLKKGYFVEPAIVSNVTTSMEIWREEVFGPALCVKTFSTEDEAIQLANDSQYGLAGAVLSNDLERCDRVSKAFQAGIVWVNCSQPCFCQAPWGGTKRSGFGRELGEWGLENYLSVKQVTQYISDEPWGWYKPPSKL

SEQ ID NO: 24566 - protein, 364 aa, Arabidopsis thaliana
  peptide (1)..(364): Ceres Seq. ID no. 12377358
  misc_feature (1)..(361): Homolog of NCBI NO: 20135572 NR Description: betaine aldehyde dehydrogenase BADH1 [Atriplex
  misc_feature (1)..(364): Homolog of NCBI NO: 17221346 NR Description: aminoaldehyde dehydrogenase [Pisum sativum]
  misc_feature (1)..(364): Homolog of NCBI NO: 3913464 NR Description: Betaine-aldehyde dehydrogenase (BADH)
  misc_feature (1)..(364): Homolog of NCBI NO: 30698520 NR Description: betaine aldehyde dehydrogenase
  misc_feature (1)..(361): Homolog of NCBI NO: 2811031 NR Description: Betaine-aldehyde dehydrogenase, chloroplast
  misc_feature (1)..(364): Homolog of NCBI NO: 11414910 NR Description: betaine aldehyde dehydrogenase [Avicennia marina]
  misc_feature (1)..(364): Homolog of NCBI NO: 15131692 NR Description: putative aminoaldehyde dehydrogenase [Pisum
  misc_feature (1)..(361): Homolog of NCBI NO: 11251896 NR Description: betaine-aldehyde dehydrogenase (EC 1.2.1.8)
  misc_feature (1)..(362): Homolog of NCBI NO: 18410730 NR Description: betaine aldehyde dehydrogenase, putative
  misc_feature (1)..(364): Homolog of NCBI NO: 15228346 NR Description: betaine aldehyde dehydrogenase-like protein
  misc_feature (1)..(361): Homolog of NCBI NO: 20135572 NR Description: betaine aldehyde dehydrogenase BADH1 [Atriplex
  misc_feature (1)..(364): Homolog of NCBI NO: 17221346 NR Description: aminoaldehyde dehydrogenase [Pisum sativum]
  misc_feature (1)..(364): Homolog of NCBI NO: 3913464 NR Description: Betaine-aldehyde dehydrogenase (BADH)
  misc_feature (1)..(364): Homolog of NCBI NO: 30698520 NR Description: betaine aldehyde dehydrogenase
  misc_feature (1)..(361): Homolog of NCBI NO: 2811031 NR Description: Betaine-aldehyde dehydrogenase, chloroplast
  misc_feature (1)..(364): Homolog of NCBI NO: 11414910 NR Description: betaine aldehyde dehydrogenase [Avicennia marina]
  misc_feature (1)..(364): Homolog of NCBI NO: 15131692 NR Description: putative aminoaldehyde dehydrogenase [Pisum
  misc_feature (1)..(361): Homolog of NCBI NO: 11251896 NR Description: betaine-aldehyde dehydrogenase (EC 1.2.1.8)
  misc_feature (1)..(362): Homolog of NCBI NO: 18410730 NR Description: betaine aldehyde dehydrogenase, putative
  misc_feature (1)..(364): Homolog of NCBI NO: 15228346 NR Description: betaine aldehyde dehydrogenase-like protein
MDTFKGYILKEPIGVVGMITPWNYPLLMAVWKVAPSLAAGCTAILKPSELASLTCLELADICREVGLPPGVLNILTGLGTEAGAPLASHPHVDKIVFTGSTTTGSSIMTSAAKLVKPVSLELGGKSPIIVFDDVDIDKAVEWTMFGCFWTNGQICSATSRLLVHERIADEFLDKLVKWTKNIKISDPFEEGCRLGPVVSKGQYERVLKFVSNARNEGATVLCGGVRPEHLKKGYFVEPAIVSNVTTSMEIWREEVFGPALCVKTFSTEDEAIQLANDSQYGLAGAVLSNDLERCDRVSKAFQAGIVWVNCSQPCFCQAPWGGTKRSGFGRELGEWGLENYLSVKQVTQYISDEPWGWYKPPSKL

SEQ ID NO: 24567 - DNA, 1654 bp, Arabidopsis thaliana
  misc_feature (1)..(1654): Ceres Seq. ID no. 12321803
  misc_feature: MA Experiment ID: 108488 Result: Down-regulated in Transcription
  misc_feature: MA Experiment ID: 108573 Result: Down-regulated in Transcription
  misc_feature: MA Experiment 108573 PARAMETER Experiment Name: At_Drought_cDNA_P Parameter: Timepoint (hr) Value: 6
  misc_feature: MA Experiment 108573 PARAMETER Experiment Name: At_Drought_cDNA_P Parameter: Tissue Value: Aerial
  misc_feature: MA Experiment 108573 PARAMETER Experiment Name: At_Drought_cDNA_P Parameter: Treatment Value: Drought vs. No Drought
  misc_feature: MA Experiment ID: 20000071 Result: Up-regulated in Transcription
  misc_feature: MA Experiment 20000071 PARAMETER Experiment Name: At_100uM_ABA_Mutants_cDNA_P Parameter: Plant Line Value: CS8104
  misc_feature: MA Experiment 20000071 PARAMETER Experiment Name: At_100uM_ABA_Mutants_cDNA_P Parameter: Timepoint (hr) Value: 6
  misc_feature: MA Experiment 20000071 PARAMETER Experiment Name: At_100uM_ABA_Mutants_cDNA_P Parameter: Tissue Value: Aerial
  misc_feature: MA Experiment 20000071 PARAMETER Experiment Name: At_100uM_ABA_Mutants_cDNA_P Parameter: Treatment Value: 100uM ABA vs. No Treatment
  misc_feature: MA Experiment ID: 20000171 Result: Down-regulated in Transcription
  misc_feature: MA Experiment 20000171 PARAMETER Experiment Name: At_42deg_Heat_P Parameter: Age (day) Value: 14
  misc_feature: MA Experiment 20000171 PARAMETER Experiment Name: At_42deg_Heat_P Parameter: Organism Value: A. thaliana
  misc_feature: MA Experiment 20000171 PARAMETER Experiment Name: At_42deg_Heat_P Parameter: Plant Line Value: WS
  misc_feature: MA Experiment 20000171 PARAMETER Experiment Name: At_42deg_Heat_P Parameter: Temperature (deg C) Value: 42 vs. 22
  misc_feature: MA Experiment 20000171 PARAMETER Experiment Name: At_42deg_Heat_P Parameter: Timepoint (hr) Value: 1
  misc_feature: MA Experiment 20000171 PARAMETER Experiment Name: At_42deg_Heat_P Parameter: Tissue Value: Aerial
  misc_feature: MA Experiment ID: 20000173 Result: Down-regulated in Transcription
  misc_feature: MA Experiment 20000173 PARAMETER Experiment Name: At_42deg_Heat_P Parameter: Age (day) Value: 14
  misc_feature: MA Experiment 20000173 PARAMETER Experiment Name: At_42deg_Heat_P Parameter: Organism Value: A. thaliana
  misc_feature: MA Experiment 20000173 PARAMETER Experiment Name: At_42deg_Heat_P Parameter: Plant Line Value: WS
  misc_feature: MA Experiment 20000173 PARAMETER Experiment Name: At_42deg_Heat_P Parameter: Temperature (deg C) Value: 42 vs. 22
  misc_feature: MA Experiment 20000173 PARAMETER Experiment Name: At_42deg_Heat_P Parameter: Timepoint (hr) Value: 6
  misc_feature: MA Experiment 20000173 PARAMETER Experiment Name: At_42deg_Heat_P Parameter: Tissue Value: Aerial
  misc_feature: MA Experiment ID: 20000180 Result: Up-regulated in Transcription
  misc_feature: MA Experiment 20000180 PARAMETER Experiment Name: At_Germinating_Seeds_P Parameter: Age (hr) Value: 24 vs. 0
  misc_feature: MA Experiment 20000180 PARAMETER Experiment Name: At_Germinating_Seeds_P Parameter: Tissue Value: Germinating Seeds
  misc_feature: MA Experiment ID: 20000182 Result: Down-regulated in Transcription
  misc_feature: MA Experiment 20000182 PARAMETER Experiment Name: At_2mM_SA_P Parameter: Age (day) Value: 14
  misc_feature: MA Experiment 20000182 PARAMETER Experiment Name: At_2mM_SA_P Parameter: Organism Value: A. thaliana
  misc_feature: MA Experiment 20000182 PARAMETER Experiment Name: At_2mM_SA_P Parameter: Plant Line Value: WS
  misc_feature: MA Experiment 20000182 PARAMETER Experiment Name: At_2mM_SA_P Parameter: Timepoint (hr) Value: 6
  misc_feature: MA Experiment 20000182 PARAMETER Experiment Name: At_2mM_SA_P Parameter: Tissue Value: Aerial
  misc_feature: MA Experiment 20000182 PARAMETER Experiment Name: At_2mM_SA_P Parameter: Treatment Value: 2mM SA vs. No Treatment
  misc_feature: MA Experiment ID: 20000184 Result: Up-regulated in Transcription
  misc_feature: MA Experiment 20000184 PARAMETER Experiment Name: At_Shoots__P Parameter: Age (day) Value: 7
  misc_feature: MA Experiment 20000184 PARAMETER Experiment Name: At_Shoots__P Parameter: Tissue Value: Shoots vs. Whole Plant
  misc_feature: MA Experiment ID: 20000214 Result: Down-regulated in Transcription
  misc_feature: MA Experiment 20000214 PARAMETER Experiment Name: At_4deg_Cold_P Parameter: Timepoint (hr) Value: 6
  misc_feature: MA Experiment ID: 20000227 Result: Up-regulated in Transcription
  misc_feature: MA Experiment 20000227 PARAMETER Experiment Name: At_Root-Tips-vs-Tops_P Parameter: Tissue Value: Root Tips vs. Root Tops
  misc_feature: MA Experiment ID: 20000436 Result: Down-regulated in Transcription
  misc_feature: MA Experiment 20000436 PARAMETER Experiment Name: At_Drought_P Parameter: Age (day) Value: 7
  misc_feature: MA Experiment 20000436 PARAMETER Experiment Name: At_Drought_P Parameter: Organism Value: A. thaliana
  misc_feature: MA Experiment 20000436 PARAMETER Experiment Name: At_Drought_P Parameter: Plant Line Value: WS
  misc_feature: MA Experiment 20000436 PARAMETER Experiment Name: At_Drought_P Parameter: Timepoint (hr) Value: 12
  misc_feature: MA Experiment 20000436 PARAMETER Experiment Name: At_Drought_P Parameter: Tissue Value: Whole Plant
  misc_feature: MA Experiment 20000436 PARAMETER Experiment Name: At_Drought_P Parameter: Treatment Value: Drought vs. No Drought
  misc_feature: MA Experiment ID: 20000437 Result: Down-regulated in Transcription
  misc_feature: MA Experiment 20000437 PARAMETER Experiment Name: At_Drought_P Parameter: Age (day) Value: 8
  misc_feature: MA Experiment 20000437 PARAMETER Experiment Name: At_Drought_P Parameter: Organism Value: A. thaliana
  misc_feature: MA Experiment 20000437 PARAMETER Experiment Name: At_Drought_P Parameter: Plant Line Value: WS
  misc_feature: MA Experiment 20000437 PARAMETER Experiment Name: At_Drought_P Parameter: Timepoint (hr) Value: 24
  misc_feature: MA Experiment 20000437 PARAMETER Experiment Name: At_Drought_P Parameter: Tissue Value: Whole Plant
  misc_feature: MA Experiment 20000437 PARAMETER Experiment Name: At_Drought_P Parameter: Treatment Value: Drought vs. No Drought
  misc_feature: MA Experiment ID: 20000438 Result: Up-regulated in Transcription
  misc_feature: MA Experiment 20000438 PARAMETER Experiment Name: At_Shoots__P Parameter: Age (day) Value: 14
  misc_feature: MA Experiment 20000438 PARAMETER Experiment Name: At_Shoots__P Parameter: Tissue Value: Shoots vs. Whole Plant
  misc_feature: MA Experiment ID: 20000794 Result: Down-regulated in Transcription
  misc_feature: MA Experiment 20000794 PARAMETER Experiment Name: At_Petals_P Parameter: Age (day) Value: 23-25 days
  misc_feature: MA Experiment 20000794 PARAMETER Experiment Name: At_Petals_P Parameter: Plant Line Value: WS
  misc_feature: MA Experiment 20000794 PARAMETER Experiment Name: At_Petals_P Parameter: Tissue Value: Petals vs. Whole plant
  misc_feature: MA Experiment ID: 20001554 Result: Down-regulated in Transcription
  misc_feature: MA Experiment 20001554 PARAMETER Experiment Name: At_Drought_Soil_Dry_P Parameter: Age (day) Value: 21
  misc_feature: MA Experiment 20001554 PARAMETER Experiment Name: At_Drought_Soil_Dry_P Parameter: Organism Value: A. thaliana
  misc_feature: MA Experiment 20001554 PARAMETER Experiment Name: At_Drought_Soil_Dry_P Parameter: Plant Line Value: WS
  misc_feature: MA Experiment 20001554 PARAMETER Experiment Name: At_Drought_Soil_Dry_P Parameter: Post Timepoint (hr) Value: None
  misc_feature: MA Experiment 20001554 PARAMETER Experiment Name: At_Drought_Soil_Dry_P Parameter: Post-Treatment Value: None
  misc_feature: MA Experiment 20001554 PARAMETER Experiment Name: At_Drought_Soil_Dry_P Parameter: Timepoint (day) Value: 7
  misc_feature: MA Experiment 20001554 PARAMETER Experiment Name: At_Drought_Soil_Dry_P Parameter: Treatment Value: Drought vs. No Drought
  misc_feature: MA Experiment ID: 20001555 Result: Down-regulated in Transcription
  misc_feature: MA Experiment 20001555 PARAMETER Experiment Name: At_Drought_Soil_Dry_P Parameter: Age (day) Value: 24
  misc_feature: MA Experiment 20001555 PARAMETER Experiment Name: At_Drought_Soil_Dry_P Parameter: Organism Value: A. thaliana
  misc_feature: MA Experiment 20001555 PARAMETER Experiment Name: At_Drought_Soil_Dry_P Parameter: Plant Line Value: WS
  misc_feature: MA Experiment 20001555 PARAMETER Experiment Name: At_Drought_Soil_Dry_P Parameter: Post Timepoint (hr) Value: None
  misc_feature: MA Experiment 20001555 PARAMETER Experiment Name: At_Drought_Soil_Dry_P Parameter: Post-Treatment Value: None
  misc_feature: MA Experiment 20001555 PARAMETER Experiment Name: At_Drought_Soil_Dry_P Parameter: Timepoint (day) Value: 10
  misc_feature: MA Experiment 20001555 PARAMETER Experiment Name: At_Drought_Soil_Dry_P Parameter: Treatment Value: Drought vs. No Drought
  misc_feature: MA Experiment ID: 20001556 Result: Down-regulated in Transcription
  misc_feature: MA Experiment 20001556 PARAMETER Experiment Name: At_Drought_Soil_Dry_P Parameter: Age (day) Value: 26
  misc_feature: MA Experiment 20001556 PARAMETER Experiment Name: At_Drought_Soil_Dry_P Parameter: Organism Value: A. thaliana
  misc_feature: MA Experiment 20001556 PARAMETER Experiment Name: At_Drought_Soil_Dry_P Parameter: Plant Line Value: WS
  misc_feature: MA Experiment 20001556 PARAMETER Experiment Name: At_Drought_Soil_Dry_P Parameter: Post Timepoint (hr) Value: None
  misc_feature: MA Experiment 20001556 PARAMETER Experiment Name: At_Drought_Soil_Dry_P Parameter: Post-Treatment Value: None
  misc_feature: MA Experiment 20001556 PARAMETER Experiment Name: At_Drought_Soil_Dry_P Parameter: Timepoint (day) Value: 12
  misc_feature: MA Experiment 20001556 PARAMETER Experiment Name: At_Drought_Soil_Dry_P Parameter: Treatment Value: Drought vs. No Drought
  misc_feature: MA Experiment ID: 20001558 Result: Up-regulated in Transcription
  misc_feature: MA Experiment 20001558 PARAMETER Experiment Name: At_Drought_Soil_Dry_P Parameter: Age (day) Value: 27
  misc_feature: MA Experiment 20001558 PARAMETER Experiment Name: At_Drought_Soil_Dry_P Parameter: Organism Value: A. thaliana
  misc_feature: MA Experiment 20001558 PARAMETER Experiment Name: At_Drought_Soil_Dry_P Parameter: Plant Line Value: WS
  misc_feature: MA Experiment 20001558 PARAMETER Experiment Name: At_Drought_Soil_Dry_P Parameter: Post Timepoint (hr) Value: 6
  misc_feature: MA Experiment 20001558 PARAMETER Experiment Name: At_Drought_Soil_Dry_P Parameter: Post-Treatment Value: Re-Water vs. No Drought
  misc_feature: MA Experiment 20001558 PARAMETER Experiment Name: At_Drought_Soil_Dry_P Parameter: Timepoint (day) Value: 13
  misc_feature: MA Experiment 20001558 PARAMETER Experiment Name: At_Drought_Soil_Dry_P Parameter: Treatment Value: Drought vs. No Drought
  misc_feature: MA Experiment ID: 20001559 Result: Down-regulated in Transcription
  misc_feature: MA Experiment 20001559 PARAMETER Experiment Name: At_Drought_Soil_Dry_P Parameter: Age (day) Value: 28
  misc_feature: MA Experiment 20001559 PARAMETER Experiment Name: At_Drought_Soil_Dry_P Parameter: Organism Value: A. thaliana
  misc_feature: MA Experiment 20001559 PARAMETER Experiment Name: At_Drought_Soil_Dry_P Parameter: Plant Line Value: WS
  misc_feature: MA Experiment 20001559 PARAMETER Experiment Name: At_Drought_Soil_Dry_P Parameter: Post Timepoint (hr) Value: 29
  misc_feature: MA Experiment 20001559 PARAMETER Experiment Name: At_Drought_Soil_Dry_P Parameter: Post-Treatment Value: Re-Water vs. No Drought
  misc_feature: MA Experiment 20001559 PARAMETER Experiment Name: At_Drought_Soil_Dry_P Parameter: Timepoint (day) Value: 14
  misc_feature: MA Experiment 20001559 PARAMETER Experiment Name: At_Drought_Soil_Dry_P Parameter: Treatment Value: Drought vs. No Drought
  misc_feature: MA Experiment ID: 20001560 Result: Up-regulated in Transcription
  misc_feature: MA Experiment 20001560 PARAMETER Experiment Name: At_Drought_Soil_Dry_P Parameter: Age (day) Value: 28
  misc_feature: MA Experiment 20001560 PARAMETER Experiment Name: At_Drought_Soil_Dry_P Parameter: Organism Value: A. thaliana
  misc_feature: MA Experiment 20001560 PARAMETER Experiment Name: At_Drought_Soil_Dry_P Parameter: Plant Line Value: WS
  misc_feature: MA Experiment 20001560 PARAMETER Experiment Name: At_Drought_Soil_Dry_P Parameter: Post Timepoint (hr) Value: None
  misc_feature: MA Experiment 20001560 PARAMETER Experiment Name: At_Drought_Soil_Dry_P Parameter: Post-Treatment Value: None
  misc_feature: MA Experiment 20001560 PARAMETER Experiment Name: At_Drought_Soil_Dry_P Parameter: Timepoint (day) Value: 14
  misc_feature: MA Experiment 20001560 PARAMETER Experiment Name: At_Drought_Soil_Dry_P Parameter: Treatment Value: Drought vs. No Drought
  misc_feature: MA Experiment ID: 20001904 Result: Down-regulated in Transcription
  misc_feature: MA Experiment 20001904 PARAMETER Experiment Name: At_Drought_Reproduction_P Parameter: Age (day) Value: 37
  misc_feature: MA Experiment 20001904 PARAMETER Experiment Name: At_Drought_Reproduction_P Parameter: Organism Value: A. thaliana
  misc_feature: MA Experiment 20001904 PARAMETER Experiment Name: At_Drought_Reproduction_P Parameter: Plant Line Value: WS
  misc_feature: MA Experiment 20001904 PARAMETER Experiment Name: At_Drought_Reproduction_P Parameter: Timepoint (day) Value: 7
  misc_feature: MA Experiment 20001904 PARAMETER Experiment Name: At_Drought_Reproduction_P Parameter: Tissue Value: Rosettes
  misc_feature: MA Experiment 20001904 PARAMETER Experiment Name: At_Drought_Reproduction_P Parameter: Treatment Value: Drought vs. No Drought
  misc_feature: MA Experiment ID: 20001906 Result: Down-regulated in Transcription
  misc_feature: MA Experiment 20001906 PARAMETER Experiment Name: At_Drought_Reproduction_P Parameter: Age (day) Value: 35
  misc_feature: MA Experiment 20001906 PARAMETER Experiment Name: At_Drought_Reproduction_P Parameter: Organism Value: A. thaliana
  misc_feature: MA Experiment 20001906 PARAMETER Experiment Name: At_Drought_Reproduction_P Parameter: Plant Line Value: WS
  misc_feature: MA Experiment 20001906 PARAMETER Experiment Name: At_Drought_Reproduction_P Parameter: Timepoint (day) Value: 5
  misc_feature: MA Experiment 20001906 PARAMETER Experiment Name: At_Drought_Reproduction_P Parameter: Tissue Value: Siliques
  misc_feature: MA Experiment 20001906 PARAMETER Experiment Name: At_Drought_Reproduction_P Parameter: Treatment Value: Drought vs. No Drought
  misc_feature: MA Experiment ID: 20001911 Result: Down-regulated in Transcription
  misc_feature: MA Experiment 20001911 PARAMETER Experiment Name: At_Drought_Reproduction_P Parameter: Age (day) Value: 40
  misc_feature: MA Experiment 20001911 PARAMETER Experiment Name: At_Drought_Reproduction_P Parameter: Organism Value: A. thaliana
  misc_feature: MA Experiment 20001911 PARAMETER Experiment Name: At_Drought_Reproduction_P Parameter: Plant Line Value: WS
  misc_feature: MA Experiment 20001911 PARAMETER Experiment Name: At_Drought_Reproduction_P Parameter: Timepoint (day) Value: 10
  misc_feature: MA Experiment 20001911 PARAMETER Experiment Name: At_Drought_Reproduction_P Parameter: Tissue Value: Flowers
  misc_feature: MA Experiment 20001911 PARAMETER Experiment Name: At_Drought_Reproduction_P Parameter: Treatment Value: Drought vs. No Drought
ctttttgcttctctcttaactaccattacattacatacctcttctttctaggtggtaacaatcttgatactggcattaaccagtgttattcccatttacgcaaacgttcacggcgccgggaaaatatgcgacgaacttggccggcgatcattgagtacaagaccacacagtgtctccattacagattttggagctgttggagatggcaaaacgctcaacactcttgcgtttcaaaacgccgttttctatcttatgtctttcgccgacaaaggtggggcccagctctatgttccgccgggacattggctcaccgggagttttagcctcaccagccacctcactctctttctcgaaaacgacgccgttatagtcgcttctcaggatccatcgcattgggaagtggttgatcctttaccttcatacggaaggggaattgatttgcctgggaagcgatacaagagtttgatcaacggtaacaagctacatgatgttgttgtaacaggtgataatggaactatagatggtcaaggcttggtttggtgggatcggtttacttctcattccttaaagtataaccgtcctcacctcatcgagtttctttcttctgaaaatgtaattgtctccaatcttacgttcttgaatgctcctgcttattcaatctattcaatctactctagccatgtatatattcataagatattggcccattcttctcctaaatctccttatacaatcggtattgtaccagattcttctgattacgtctgcatccaaaactctaccattaacgtggggtatgacgcgatttccctcaaaagcggttgggatgaatatggaattgcctattctcgtcccactgaaaatgttcatataagaaatgtgtaccttcgaggagcttctggttcctctatctcctttggcagtgaaatgtctggtggaatatctgatgtcgtggttgataacgctcatatacactactcgttaaccggcattgcctttagaaccacaaaaggcagaggtggttatatcaaagagatcgatatttcaaacatcgatatgttgagaataggtactgccattgttgctaatggtagctttggatctcaccctgatgataaatatgatgtgaatgctctcccacttgtgagtcacatcagattaagcaacatttctggagagaacattggcattgcggggaaattgtttgggatcaaagaatctccatttagctcagtgactttgtcgaatgtttctttgtcgatgagctcaggttcttctgtttcttggcaatgctcctacgtttacgggtcctcggagtcagtcattcctgaaccgtgtcccgagctgaagagagatgctgatgcttacggtagagctgcagtctagtgaaacagactgcaaaagaaaaaagaaaaaaaaagcaagaaacatatcttgggattctttgataggattcaattcatcaatcatttcatattttgtggagttagagaaggtcagattctttcctcaagtaaaccacattgtctttagatcatacatgttcctttcggttattctggtttcctatttttatgttgtttgcatattctgagataagaaatctgtacaggttcatttcttcattcatgtgtaaacaaagaaattttgtttc

SEQ ID NO: 24568 - protein, 377 aa, Arabidopsis thaliana
  peptide (1)..(377): Ceres Seq. ID no. 12321804
  misc_feature (6)..(362): Pfam Name: Glycosyl hydrolases family 28 Pfam Description: Glycosyl hydrolases family 28
  misc_feature (1)..(368): Homolog of NCBI NO: 40714685 NR Description: putative polygalacturonase
  misc_feature (1)..(365): Homolog of NCBI NO: 21553827 NR Description: polygalacturonase, putative [Arabidopsis thaliana]
  misc_feature (1)..(365): Homolog of NCBI NO: 15228881 NR Description: polygalacturonase, putative
  misc_feature (1)..(365): Homolog of NCBI NO: 7939578 NR Description: polygalacturonase-like protein [Arabidopsis
  misc_feature (1)..(366): Homolog of NCBI NO: 11263971 NR Description: hypothetical protein T17J13.70 - Arabidopsis
  misc_feature (1)..(366): Homolog of NCBI NO: 18412253 NR Description: polygalacturonase, putative
  misc_feature (1)..(375): Homolog of NCBI NO: 22327662 NR Description: Expressed protein
  misc_feature (1)..(377): Homolog of NCBI NO: 18397713 NR Description: polygalacturonase, putative
  misc_feature (1)..(377): Homolog of NCBI NO: 21593399 NR Description: polygalacturonase-like protein [Arabidopsis
  misc_feature (1)..(377): Homolog of NCBI NO: 30679999 NR Description: polygalacturonase, putative [Arabidopsis
MSFADKGGAQLYVPPGHWLTGSFSLTSHLTLFLENDAVIVASQDPSHWEVVDPLPSYGRGIDLPGKRYKSLINGNKLHDVVVTGDNGTIDGQGLVWWDRFTSHSLKYNRPHLIEFLSSENVIVSNLTFLNAPAYSIYSIYSSHVYIHKILAHSSPKSPYTIGIVPDSSDYVCIQNSTINVGYDAISLKSGWDEYGIAYSRPTENVHIRNVYLRGASGSSISFGSEMSGGISDVVVDNAHIHYSLTGIAFRTTKGRGGYIKEIDISNIDMLRIGTAIVANGSFGSHPDDKYDVNALPLVSHIRLSNISGENIGIAGKLFGIKESPFSSVTLSNVSLSMSSGSSVSWQCSYVYGSSESVIPEPCPELKRDADAYGRAAV

SEQ ID NO: 24569 - DNA, 1115 bp, Arabidopsis thaliana
  misc_feature (1)..(1115): Ceres Seq. ID no. 12336070
  misc_feature: MA Experiment ID: 108434 Result: Down-regulated in Transcription
  misc_feature: MA Experiment 108434 PARAMETER Experiment Name: At_Root_Tips_cDNA_P Parameter: Tissue Value: Root Tips
  misc_feature: MA Experiment ID: 108461 Result: Up-regulated in Transcription
  misc_feature: MA Experiment 108461 PARAMETER Experiment Name: At_Germinating_Seeds_cDNA_P Parameter: Age (day) Value: 1 vs. 0
  misc_feature: MA Experiment 108461 PARAMETER Experiment Name: At_Germinating_Seeds_cDNA_P Parameter: Tissue Value: Germinating Seeds
  misc_feature: MA Experiment ID: 108462 Result: Up-regulated in Transcription
  misc_feature: MA Experiment 108462 PARAMETER Experiment Name: At_Germinating_Seeds_cDNA_P Parameter: Age (day) Value: 2 vs. 0
  misc_feature: MA Experiment 108462 PARAMETER Experiment Name: At_Germinating_Seeds_cDNA_P Parameter: Tissue Value: Germinating Seeds
  misc_feature: MA Experiment ID: 108464 Result: Up-regulated in Transcription
  misc_feature: MA Experiment 108464 PARAMETER Experiment Name: At_Germinating_Seeds_cDNA_P Parameter: Age (day) Value: 4 vs. 0
  misc_feature: MA Experiment 108464 PARAMETER Experiment Name: At_Germinating_Seeds_cDNA_P Parameter: Tissue Value: Germinating Seeds
  misc_feature: MA Experiment ID: 108569 Result: Up-regulated in Transcription
  misc_feature: MA Experiment 108569 PARAMETER Experiment Name: At_0.001%_MeJA__cDNA_P Parameter: Timepoint (hr) Value: 6
  misc_feature: MA Experiment 108569 PARAMETER Experiment Name: At_0.001%_MeJA__cDNA_P Parameter: Tissue Value: Aerial
  misc_feature: MA Experiment 108569 PARAMETER Experiment Name: At_0.001%_MeJA__cDNA_P Parameter: Treatment Value: 0.001% MeJA vs. No Treatment
  misc_feature: MA Experiment ID: 108607 Result: Up-regulated in Transcription
  misc_feature: MA Experiment 108607 PARAMETER Experiment Name: At_100uM_ABA_cDNA_P Parameter: Timepoint (hr) Value: 4
  misc_feature: MA Experiment 108607 PARAMETER Experiment Name: At_100uM_ABA_cDNA_P Parameter: Tissue Value: Aerial
  misc_feature: MA Experiment 108607 PARAMETER Experiment Name: At_100uM_ABA_cDNA_P Parameter: Treatment Value: 100uM ABA vs. No Treatment
  misc_feature: MA Experiment ID: 108608 Result: Up-regulated in Transcription
  misc_feature: MA Experiment 108608 PARAMETER Experiment Name: At_100uM_ABA_cDNA_P Parameter: Timepoint (hr) Value: 1
  misc_feature: MA Experiment 108608 PARAMETER Experiment Name: At_100uM_ABA_cDNA_P Parameter: Tissue Value: Aerial
  misc_feature: MA Experiment 108608 PARAMETER Experiment Name: At_100uM_ABA_cDNA_P Parameter: Treatment Value: 100uM ABA vs. No Treatment
  misc_feature: MA Experiment ID: 108609 Result: Up-regulated in Transcription
  misc_feature: MA Experiment 108609 PARAMETER Experiment Name: At_100uM_ABA_cDNA_P Parameter: Timepoint (hr) Value: 24
  misc_feature: MA Experiment 108609 PARAMETER Experiment Name: At_100uM_ABA_cDNA_P Parameter: Tissue Value: Aerial
  misc_feature: MA Experiment 108609 PARAMETER Experiment Name: At_100uM_ABA_cDNA_P Parameter: Treatment Value: 100uM ABA vs. No Treatment
  misc_feature: MA Experiment ID: 108668 Result: Up-regulated in Transcription
  misc_feature: MA Experiment 108668 PARAMETER Experiment Name: At_2mM_SA_cDNA_P Parameter: Plant Line Value: WS
  misc_feature: MA Experiment 108668 PARAMETER Experiment Name: At_2mM_SA_cDNA_P Parameter: Timepoint (hr) Value: 6
  misc_feature: MA Experiment 108668 PARAMETER Experiment Name: At_2mM_SA_cDNA_P Parameter: Treatment Value: 2mM SA vs. No Treatment
  misc_feature: MA Experiment ID: 20000069 Result: Up-regulated in Transcription
  misc_feature: MA Experiment 20000069 PARAMETER Experiment Name: At_100uM_ABA_Mutants_cDNA_P Parameter: Plant Line Value: CS23
  misc_feature: MA Experiment 20000069 PARAMETER Experiment Name: At_100uM_ABA_Mutants_cDNA_P Parameter: Timepoint (hr) Value: 6
  misc_feature: MA Experiment 20000069 PARAMETER Experiment Name: At_100uM_ABA_Mutants_cDNA_P Parameter: Tissue Value: Aerial
  misc_feature: MA Experiment 20000069 PARAMETER Experiment Name: At_100uM_ABA_Mutants_cDNA_P Parameter: Treatment Value: 100uM ABA vs. No Treatment
  misc_feature: MA Experiment ID: 20000070 Result: Up-regulated in Transcription
  misc_feature: MA Experiment 20000070 PARAMETER Experiment Name: At_100uM_ABA_Mutants_cDNA_P Parameter: Plant Line Value: CS24
  misc_feature: MA Experiment 20000070 PARAMETER Experiment Name: At_100uM_ABA_Mutants_cDNA_P Parameter: Timepoint (hr) Value: 6
  misc_feature: MA Experiment 20000070 PARAMETER Experiment Name: At_100uM_ABA_Mutants_cDNA_P Parameter: Tissue Value: Aerial
  misc_feature: MA Experiment 20000070 PARAMETER Experiment Name: At_100uM_ABA_Mutants_cDNA_P Parameter: Treatment Value: 100uM ABA vs. No Treatment
  misc_feature: MA Experiment ID: 20000071 Result: Up-regulated in Transcription
  misc_feature: MA Experiment 20000071 PARAMETER Experiment Name: At_100uM_ABA_Mutants_cDNA_P Parameter: Plant Line Value: CS8104
  misc_feature: MA Experiment 20000071 PARAMETER Experiment Name: At_100uM_ABA_Mutants_cDNA_P Parameter: Timepoint (hr) Value: 6
  misc_feature: MA Experiment 20000071 PARAMETER Experiment Name: At_100uM_ABA_Mutants_cDNA_P Parameter: Tissue Value: Aerial
  misc_feature: MA Experiment 20000071 PARAMETER Experiment Name: At_100uM_ABA_Mutants_cDNA_P Parameter: Treatment Value: 100uM ABA vs. No Treatment
  misc_feature: MA Experiment ID: 20000086 Result: Up-regulated in Transcription
  misc_feature: MA Experiment 20000086 PARAMETER Experiment Name: At_100uM_ABA_Mutants_cDNA_P Parameter: Plant Line Value: CS22
  misc_feature: MA Experiment 20000086 PARAMETER Experiment Name: At_100uM_ABA_Mutants_cDNA_P Parameter: Timepoint (hr) Value: 6
  misc_feature: MA Experiment 20000086 PARAMETER Experiment Name: At_100uM_ABA_Mutants_cDNA_P Parameter: Tissue Value: Aerial
  misc_feature: MA Experiment 20000086 PARAMETER Experiment Name: At_100uM_ABA_Mutants_cDNA_P Parameter: Treatment Value: 100uM ABA vs. No Treatment
  misc_feature: MA Experiment ID: 20000111 Result: Up-regulated in Transcription
  misc_feature: MA Experiment 20000111 PARAMETER Experiment Name: At_42deg_Heat_cDNA_P Parameter: Temperature (deg C) Value: 42 vs. 22
  misc_feature: MA Experiment 20000111 PARAMETER Experiment Name: At_42deg_Heat_cDNA_P Parameter: Timepoint (hr) Value: 6
  misc_feature: MA Experiment 20000111 PARAMETER Experiment Name: At_42deg_Heat_cDNA_P Parameter: Tissue Value: Aerial
  misc_feature: MA Experiment ID: 20000112 Result: Up-regulated in Transcription
  misc_feature: MA Experiment 20000112 PARAMETER Experiment Name: At_42deg_Heat_cDNA_P Parameter: Temperature (deg C) Value: 42 vs. 22
  misc_feature: MA Experiment 20000112 PARAMETER Experiment Name: At_42deg_Heat_cDNA_P Parameter: Timepoint (hr) Value: 2
  misc_feature: MA Experiment 20000112 PARAMETER Experiment Name: At_42deg_Heat_cDNA_P Parameter: Tissue Value: Aerial
  misc_feature: MA Experiment ID: 20000117 Result: Up-regulated in Transcription
  misc_feature: MA Experiment 20000117 PARAMETER Experiment Name: At_100uM_ABA_Mutants_cDNA_P Parameter: Plant Line Value: Columbia
  misc_feature: MA Experiment 20000117 PARAMETER Experiment Name: At_100uM_ABA_Mutants_cDNA_P Parameter: Timepoint (hr) Value: 6
  misc_feature: MA Experiment 20000117 PARAMETER Experiment Name: At_100uM_ABA_Mutants_cDNA_P Parameter: Tissue Value: Aerial
  misc_feature: MA Experiment 20000117 PARAMETER Experiment Name: At_100uM_ABA_Mutants_cDNA_P Parameter: Treatment Value: 100uM ABA vs. No Treatment
  misc_feature: MA Experiment ID: 20000171 Result: Up-regulated in Transcription
  misc_feature: MA Experiment 20000171 PARAMETER Experiment Name: At_42deg_Heat_P Parameter: Age (day) Value: 14
  misc_feature: MA Experiment 20000171 PARAMETER Experiment Name: At_42deg_Heat_P Parameter: Organism Value: A. thaliana
  misc_feature: MA Experiment 20000171 PARAMETER Experiment Name: At_42deg_Heat_P Parameter: Plant Line Value: WS
  misc_feature: MA Experiment 20000171 PARAMETER Experiment Name: At_42deg_Heat_P Parameter: Temperature (deg C) Value: 42 vs. 22
  misc_feature: MA Experiment 20000171 PARAMETER Experiment Name: At_42deg_Heat_P Parameter: Timepoint (hr) Value: 1
  misc_feature: MA Experiment 20000171 PARAMETER Experiment Name: At_42deg_Heat_P Parameter: Tissue Value: Aerial
  misc_feature: MA Experiment ID: 20000173 Result: Up-regulated in Transcription
  misc_feature: MA Experiment 20000173 PARAMETER Experiment Name: At_42deg_Heat_P Parameter: Age (day) Value: 14
  misc_feature: MA Experiment 20000173 PARAMETER Experiment Name: At_42deg_Heat_P Parameter: Organism Value: A. thaliana
  misc_feature: MA Experiment 20000173 PARAMETER Experiment Name: At_42deg_Heat_P Parameter: Plant Line Value: WS
  misc_feature: MA Experiment 20000173 PARAMETER Experiment Name: At_42deg_Heat_P Parameter: Temperature (deg C) Value: 42 vs. 22
  misc_feature: MA Experiment 20000173 PARAMETER Experiment Name: At_42deg_Heat_P Parameter: Timepoint (hr) Value: 6
  misc_feature: MA Experiment 20000173 PARAMETER Experiment Name: At_42deg_Heat_P Parameter: Tissue Value: Aerial
  misc_feature: MA Experiment ID: 20000180 Result: Up-regulated in Transcription
  misc_feature: MA Experiment 20000180 PARAMETER Experiment Name: At_Germinating_Seeds_P Parameter: Age (hr) Value: 24 vs. 0
  misc_feature: MA Experiment 20000180 PARAMETER Experiment Name: At_Germinating_Seeds_P Parameter: Tissue Value: Germinating Seeds
  misc_feature: MA Experiment ID: 20000185 Result: Down-regulated in Transcription
  misc_feature: MA Experiment 20000185 PARAMETER Experiment Name: At_Roots__P Parameter: Age (day) Value: 7 vs. 21
  misc_feature: MA Experiment 20000185 PARAMETER Experiment Name: At_Roots__P Parameter: Organism Value: A. thaliana
  misc_feature: MA Experiment 20000185 PARAMETER Experiment Name: At_Roots__P Parameter: Tissue Value: Roots vs. Whole Plant
  misc_feature: MA Experiment ID: 20000224 Result: Down-regulated in Transcription
  misc_feature: MA Experiment ID: 20000234 Result: Down-regulated in Transcription
  misc_feature: MA Experiment 20000234 PARAMETER Experiment Name: At_Siliques_P Parameter: Age (day) Value: 21
  misc_feature: MA Experiment 20000234 PARAMETER Experiment Name: At_Siliques_P Parameter: Organism Value: A. thaliana
  misc_feature: MA Experiment 20000234 PARAMETER Experiment Name: At_Siliques_P Parameter: Plant Line Value: WS
  misc_feature: MA Experiment 20000234 PARAMETER Experiment Name: At_Siliques_P Parameter: Tissue Value: Less Than 5mm Siliques vs. Whole Plant
  misc_feature: MA Experiment ID: 20000235 Result: Down-regulated in Transcription
  misc_feature: MA Experiment 20000235 PARAMETER Experiment Name: At_Siliques_P Parameter: Age (day) Value: 21
  misc_feature: MA Experiment 20000235 PARAMETER Experiment Name: At_Siliques_P Parameter: Organism Value: A. thaliana
  misc_feature: MA Experiment 20000235 PARAMETER Experiment Name: At_Siliques_P Parameter: Plant Line Value: WS
  misc_feature: MA Experiment 20000235 PARAMETER Experiment Name: At_Siliques_P Parameter: Tissue Value: 5-10mm Siliques vs. Whole Plant
  misc_feature: MA Experiment ID: 20000265 Result: Down-regulated in Transcription
  misc_feature: MA Experiment 20000265 PARAMETER Experiment Name: At_Open_Flower_P Parameter: Age (day) Value: 21
  misc_feature: MA Experiment 20000265 PARAMETER Experiment Name: At_Open_Flower_P Parameter: Plant Line Value: WS
  misc_feature: MA Experiment 20000265 PARAMETER Experiment Name: At_Open_Flower_P Parameter: Tissue Value: Closed Flower vs. Whole Plant
  misc_feature: MA Experiment ID: 20000286 Result: Down-regulated in Transcription
  misc_feature: MA Experiment 20000286 PARAMETER Experiment Name: At_Open_Flower_P Parameter: Age (day) Value: 21
  misc_feature: MA Experiment 20000286 PARAMETER Experiment Name: At_Open_Flower_P Parameter: Plant Line Value: WS
  misc_feature: MA Experiment 20000286 PARAMETER Experiment Name: At_Open_Flower_P Parameter: Tissue Value: Half Open vs. Whole Plant
  misc_feature: MA Experiment ID: 20000438 Result: Down-regulated in Transcription
  misc_feature: MA Experiment 20000438 PARAMETER Experiment Name: At_Shoots__P Parameter: Age (day) Value: 14
  misc_feature: MA Experiment 20000438 PARAMETER Experiment Name: At_Shoots__P Parameter: Tissue Value: Shoots vs. Whole Plant
  misc_feature: MA Experiment ID: 20000439 Result: Down-regulated in Transcription
  misc_feature: MA Experiment 20000439 PARAMETER Experiment Name: At_Roots__P Parameter: Age (day) Value: 14 vs. 21
  misc_feature: MA Experiment 20000439 PARAMETER Experiment Name: At_Roots__P Parameter: Organism Value: A. thaliana
  misc_feature: MA Experiment 20000439 PARAMETER Experiment Name: At_Roots__P Parameter: Tissue Value: Roots vs. Whole Plant
  misc_feature: MA Experiment ID: 20000441 Result: Up-regulated in Transcription
  misc_feature: MA Experiment 20000441 PARAMETER Experiment Name: At_1uM_BR-BRZ__P Parameter: Tissue Value: Shoot Apices
  misc_feature: MA Experiment 20000441 PARAMETER Experiment Name: At_1uM_BR-BRZ__P Parameter: Treatment Value: 1uM BR vs. No Treatment
  misc_feature: MA Experiment ID: 20000443 Result: Up-regulated in Transcription
  misc_feature: MA Experiment 20000443 PARAMETER Experiment Name: At_1uM_BR-BRZ__P Parameter: Tissue Value: Shoot Apices
  misc_feature: MA Experiment 20000443 PARAMETER Experiment Name: At_1uM_BR-BRZ__P Parameter: Treatment Value: 1uM BRZ vs. No Treatment
  misc_feature: MA Experiment ID: 20000495 Result: Down-regulated in Transcription
  misc_feature: MA Experiment 20000495 PARAMETER Experiment Name: At_Guard_Cells_P Parameter: Harvest Date Value: 8/2/2002
  misc_feature: MA Experiment 20000495 PARAMETER Experiment Name: At_Guard_Cells_P Parameter: Organism Value: A. thaliana
  misc_feature: MA Experiment 20000495 PARAMETER Experiment Name: At_Guard_Cells_P Parameter: Tissue Value: Guard Cells vs. Leaves
  misc_feature: MA Experiment ID: 20000573 Result: Up-regulated in Transcription
  misc_feature: MA Experiment 20000573 PARAMETER Experiment Name: At_100uM_ABA_Mutants__P Parameter: Organism Value: A. thaliana
  misc_feature: MA Experiment 20000573 PARAMETER Experiment Name: At_100uM_ABA_Mutants__P Parameter: Plant Line Value: CS22 vs. Ler wt
  misc_feature: MA Experiment 20000573 PARAMETER Experiment Name: At_100uM_ABA_Mutants__P Parameter: Timepoint (hr) Value: N/A
  misc_feature: MA Experiment 20000573 PARAMETER Experiment Name: At_100uM_ABA_Mutants__P Parameter: Tissue Value: Whole Plant
  misc_feature: MA Experiment 20000573 PARAMETER Experiment Name: At_100uM_ABA_Mutants__P Parameter: Treatment Value: None
  misc_feature: MA Experiment ID: 20001248 Result: Up-regulated in Transcription
  misc_feature: MA Experiment 20001248 PARAMETER Experiment Name: At_Far-red-induction_P Parameter: Age (day) Value: 7
  misc_feature: MA Experiment 20001248 PARAMETER Experiment Name: At_Far-red-induction_P Parameter: Light Value: Far-red vs. White
  misc_feature: MA Experiment 20001248 PARAMETER Experiment Name: At_Far-red-induction_P Parameter: Organism Value: A. thaliana
  misc_feature: MA Experiment 20001248 PARAMETER Experiment Name: At_Far-red-induction_P Parameter: Plant Line Value: Columbia
  misc_feature: MA Experiment 20001248 PARAMETER Experiment Name: At_Far-red-induction_P Parameter: Timepoint (hr) Value: 4
  misc_feature: MA Experiment 20001248 PARAMETER Experiment Name: At_Far-red-induction_P Parameter: Tissue Value: Whole Plant
  misc_feature: MA Experiment ID: 20001450 Result: Up-regulated in Transcription
  misc_feature: MA Experiment 20001450 PARAMETER Experiment Name: At_Far-red-induction_P Parameter: Age (day) Value: 7
  misc_feature: MA Experiment 20001450 PARAMETER Experiment Name: At_Far-red-induction_P Parameter: Light Value: Far-red vs. White
  misc_feature: MA Experiment 20001450 PARAMETER Experiment Name: At_Far-red-induction_P Parameter: Organism Value: A. thaliana
  misc_feature: MA Experiment 20001450 PARAMETER Experiment Name: At_Far-red-induction_P Parameter: Plant Line Value: Columbia
  misc_feature: MA Experiment 20001450 PARAMETER Experiment Name: At_Far-red-induction_P Parameter: Timepoint (hr) Value: 8
  misc_feature: MA Experiment 20001450 PARAMETER Experiment Name: At_Far-red-induction_P Parameter: Tissue Value: Whole Plant
  misc_feature: MA Experiment ID: 20001451 Result: Up-regulated in Transcription
  misc_feature: MA Experiment 20001451 PARAMETER Experiment Name: At_Far-red-induction_P Parameter: Age (day) Value: 7
  misc_feature: MA Experiment 20001451 PARAMETER Experiment Name: At_Far-red-induction_P Parameter: Light Value: Far-red vs. White
  misc_feature: MA Experiment 20001451 PARAMETER Experiment Name: At_Far-red-induction_P Parameter: Organism Value: A. thaliana
  misc_feature: MA Experiment 20001451 PARAMETER Experiment Name: At_Far-red-induction_P Parameter: Plant Line Value: Columbia
  misc_feature: MA Experiment 20001451 PARAMETER Experiment Name: At_Far-red-induction_P Parameter: Timepoint (hr) Value: 24
  misc_feature: MA Experiment 20001451 PARAMETER Experiment Name: At_Far-red-induction_P Parameter: Tissue Value: Whole Plant
  misc_feature: MA Experiment ID: 20001555 Result: Down-regulated in Transcription
  misc_feature: MA Experiment 20001555 PARAMETER Experiment Name: At_Drought_Soil_Dry_P Parameter: Age (day) Value: 24
  misc_feature: MA Experiment 20001555 PARAMETER Experiment Name: At_Drought_Soil_Dry_P Parameter: Organism Value: A. thaliana
  misc_feature: MA Experiment 20001555 PARAMETER Experiment Name: At_Drought_Soil_Dry_P Parameter: Plant Line Value: WS
  misc_feature: MA Experiment 20001555 PARAMETER Experiment Name: At_Drought_Soil_Dry_P Parameter: Post Timepoint (hr) Value: None
  misc_feature: MA Experiment 20001555 PARAMETER Experiment Name: At_Drought_Soil_Dry_P Parameter: Post-Treatment Value: None
  misc_feature: MA Experiment 20001555 PARAMETER Experiment Name: At_Drought_Soil_Dry_P Parameter: Timepoint (day) Value: 10
  misc_feature: MA Experiment 20001555 PARAMETER Experiment Name: At_Drought_Soil_Dry_P Parameter: Treatment Value: Drought vs. No Drought
  misc_feature: MA Experiment ID: 20001556 Result: Down-regulated in Transcription
  misc_feature: MA Experiment 20001556 PARAMETER Experiment Name: At_Drought_Soil_Dry_P Parameter: Age (day) Value: 26
  misc_feature: MA Experiment 20001556 PARAMETER Experiment Name: At_Drought_Soil_Dry_P Parameter: Organism Value: A. thaliana
  misc_feature: MA Experiment 20001556 PARAMETER Experiment Name: At_Drought_Soil_Dry_P Parameter: Plant Line Value: WS
  misc_feature: MA Experiment 20001556 PARAMETER Experiment Name: At_Drought_Soil_Dry_P Parameter: Post Timepoint (hr) Value: None
  misc_feature: MA Experiment 20001556 PARAMETER Experiment Name: At_Drought_Soil_Dry_P Parameter: Post-Treatment Value: None
  misc_feature: MA Experiment 20001556 PARAMETER Experiment Name: At_Drought_Soil_Dry_P Parameter: Timepoint (day) Value: 12
  misc_feature: MA Experiment 20001556 PARAMETER Experiment Name: At_Drought_Soil_Dry_P Parameter: Treatment Value: Drought vs. No Drought
  misc_feature: MA Experiment ID: 20001559 Result: Down-regulated in Transcription
  misc_feature: MA Experiment 20001559 PARAMETER Experiment Name: At_Drought_Soil_Dry_P Parameter: Age (day) Value: 28
  misc_feature: MA Experiment 20001559 PARAMETER Experiment Name: At_Drought_Soil_Dry_P Parameter: Organism Value: A. thaliana
  misc_feature: MA Experiment 20001559 PARAMETER Experiment Name: At_Drought_Soil_Dry_P Parameter: Plant Line Value: WS
  misc_feature: MA Experiment 20001559 PARAMETER Experiment Name: At_Drought_Soil_Dry_P Parameter: Post Timepoint (hr) Value: 29
  misc_feature: MA Experiment 20001559 PARAMETER Experiment Name: At_Drought_Soil_Dry_P Parameter: Post-Treatment Value: Re-Water vs. No Drought
  misc_feature: MA Experiment 20001559 PARAMETER Experiment Name: At_Drought_Soil_Dry_P Parameter: Timepoint (day) Value: 14
  misc_feature: MA Experiment 20001559 PARAMETER Experiment Name: At_Drought_Soil_Dry_P Parameter: Treatment Value: Drought vs. No Drought
  misc_feature: MA Experiment ID: 20001906 Result: Down-regulated in Transcription
  misc_feature: MA Experiment 20001906 PARAMETER Experiment Name: At_Drought_Reproduction_P Parameter: Age (day) Value: 35
  misc_feature: MA Experiment 20001906 PARAMETER Experiment Name: At_Drought_Reproduction_P Parameter: Organism Value: A. thaliana
  misc_feature: MA Experiment 20001906 PARAMETER Experiment Name: At_Drought_Reproduction_P Parameter: Plant Line Value: WS
  misc_feature: MA Experiment 20001906 PARAMETER Experiment Name: At_Drought_Reproduction_P Parameter: Timepoint (day) Value: 5
  misc_feature: MA Experiment 20001906 PARAMETER Experiment Name: At_Drought_Reproduction_P Parameter: Tissue Value: Siliques
  misc_feature: MA Experiment 20001906 PARAMETER Experiment Name: At_Drought_Reproduction_P Parameter: Treatment Value: Drought vs. No Drought
  misc_feature: MA Experiment ID: 20001908 Result: Down-regulated in Transcription
  misc_feature: MA Experiment 20001908 PARAMETER Experiment Name: At_Drought_Reproduction_P Parameter: Age (day) Value: 40
  misc_feature: MA Experiment 20001908 PARAMETER Experiment Name: At_Drought_Reproduction_P Parameter: Organism Value: A. thaliana
  misc_feature: MA Experiment 20001908 PARAMETER Experiment Name: At_Drought_Reproduction_P Parameter: Plant Line Value: WS
  misc_feature: MA Experiment 20001908 PARAMETER Experiment Name: At_Drought_Reproduction_P Parameter: Timepoint (day) Value: 10
  misc_feature: MA Experiment 20001908 PARAMETER Experiment Name: At_Drought_Reproduction_P Parameter: Tissue Value: Siliques
  misc_feature: MA Experiment 20001908 PARAMETER Experiment Name: At_Drought_Reproduction_P Parameter: Treatment Value: Drought vs. No Drought
atattcaaaaacagaacacaacctctcttctcactctatatactcccaaaatggcttataactaccgttttgccattcttctcgttctcctctccgccaccgtcggctttaccgcagccgcgttgaagcctccggttcgaaccttgaacggaaacattactcttaatctcatttggtacggaaaattcaccccaatccaacggtccataatcgtcgatttcatccgctctatcagttctgtcaccgccgccaaaggtccatccgtcgcgtcgtggtggaagacgacggagaagtacaaaaccggcgtttcaactcttgttgtcggtaaacagctcctccttgagaattaccctctcggaaaatccctaaagagcccttaccttcgtgctctgtcaagcaaacttaacgctggtggtgctcggtcaataaccgtcgtcttaacggcgaaagacgtcaccgttgagggactctgtatgaaccgatgcgggactcacgggtcaaagtcaagttccgttaacagtggagcttacgtgtgggtcggaaactctgaaacgcagtgtcctggttactgcgcgtggccgtttcatcagcctatctacggacctcagtctccgccgttagtcgcacctaacggcgacgtcggagttgacggaatgattataaacatcgcgactcttcttgttaacaccgtaacgaatccgtctccagaagctgtctcggcttgtaccgggatattcggttcgggtgcttacccgggttacgcgggtcgggttctcgtagacaagacgagtggagcgagttacaacgctttgggtctcgccggtagaaaatatctattgccggcgttgtgggatcctcagacttcgacgtgtaaaactatggtttgaattttagatggtctgtgaacgagacacgtggctagaattgatggtgattaaaagcttgttgtagtcaaagaaagtttgtagatatctatcgcgtctggttcggagtttggggaaagggatgtgtttgttttgttattttgttatgccctgtgtaaattcgatctttggaaatatgtgaaagatagattcatatatctattttaataataacgatttgtagtttccacc

SEQ ID NO: 24570 - protein, 294 aa, Arabidopsis thaliana
  peptide (1)..(294): Ceres Seq. ID no. 12336071
  misc_feature (41)..(294): Pfam Name: Phosphate-induced protein 1 conserved region Pfam Description: Phosphate-induced protein 1 conserved region
  misc_feature (48)..(290): Homolog of NCBI NO: 21592873 NR Description: unknown [Arabidopsis thaliana]
  misc_feature (133)..(293): Homolog of NCBI NO: 13194680 NR Description: phosphate-induced protein 1-like protein
  misc_feature (17)..(233): Homolog of NCBI NO: 11762144 NR Description: At1g35140 [Arabidopsis thaliana]
  misc_feature (48)..(294): Homolog of NCBI NO: 21593043 NR Description: putative phi-1-like phosphate-induced protein
  misc_feature (48)..(294): Homolog of NCBI NO: 15236667 NR Description: putative phi-1-like phosphate-induced protein
  misc_feature (17)..(293): Homolog of NCBI NO: 15219504 NR Description: phosphate-induced (phi-1) protein, putative
  misc_feature (48)..(294): Homolog of NCBI NO: 3759184 NR Description: phi-1 [Nicotiana tabacum]
  misc_feature (24)..(294): Homolog of NCBI NO: 31074969 NR Description: erg-1 [Solanum tuberosum]
  misc_feature (17)..(294): Homolog of NCBI NO: 15237656 NR Description: phi-1-like protein
  misc_feature (17)..(294): Homolog of NCBI NO: 15242420 NR Description: putative protein
IQKQNTTSLLTLYTPKMAYNYRFAILLVLLSATVGFTAAALKPPVRTLNGNITLNLIWYGKFTPIQRSIIVDFIRSISSVTAAKGPSVASWWKTTEKYKTGVSTLVVGKQLLLENYPLGKSLKSPYLRALSSKLNAGGARSITVVLTAKDVTVEGLCMNRCGTHGSKSSSVNSGAYVWVGNSETQCPGYCAWPFHQPIYGPQSPPLVAPNGDVGVDGMIINIATLLVNTVTNPSPEAVSACTGIFGSGAYPGYAGRVLVDKTSGASYNALGLAGRKYLLPALWDPQTSTCKTMV

SEQ ID NO: 24571 - protein, 278 aa, Arabidopsis thaliana
  peptide (1)..(278): Ceres Seq. ID no. 12336072
  misc_feature (25)..(278): Pfam Name: Phosphate-induced protein 1 conserved region Pfam Description: Phosphate-induced protein 1 conserved region
  misc_feature (32)..(274): Homolog of NCBI NO: 21592873 NR Description: unknown [Arabidopsis thaliana]
  misc_feature (117)..(277): Homolog of NCBI NO: 13194680 NR Description: phosphate-induced protein 1-like protein
  misc_feature (1)..(217): Homolog of NCBI NO: 11762144 NR Description: At1g35140 [Arabidopsis thaliana]
  misc_feature (32)..(278): Homolog of NCBI NO: 21593043 NR Description: putative phi-1-like phosphate-induced protein
  misc_feature (32)..(278): Homolog of NCBI NO: 15236667 NR Description: putative phi-1-like phosphate-induced protein
  misc_feature (1)..(277): Homolog of NCBI NO: 15219504 NR Description: phosphate-induced (phi-1) protein, putative
  misc_feature (32)..(278): Homolog of NCBI NO: 3759184 NR Description: phi-1 [Nicotiana tabacum]
  misc_feature (8)..(278): Homolog of NCBI NO: 31074969 NR Description: erg-1 [Solanum tuberosum]
  misc_feature (1)..(278): Homolog of NCBI NO: 15237656 NR Description: phi-1-like protein
  misc_feature (1)..(278): Homolog of NCBI NO: 15242420 NR Description: putative protein
MAYNYRFAILLVLLSATVGFTAAALKPPVRTLNGNITLNLIWYGKFTPIQRSIIVDFIRSISSVTAAKGPSVASWWKTTEKYKTGVSTLVVGKQLLLENYPLGKSLKSPYLRALSSKLNAGGARSITVVLTAKDVTVEGLCMNRCGTHGSKSSSVNSGAYVWVGNSETQCPGYCAWPFHQPIYGPQSPPLVAPNGDVGVDGMIINIATLLVNTVTNPSPEAVSACTGIFGSGAYPGYAGRVLVDKTSGASYNALGLAGRKYLLPALWDPQTSTCKTMV

SEQ ID NO: 24572 - DNA, 1334 bp, Arabidopsis thaliana
  misc_feature (1)..(1334): Ceres Seq. ID no. 12324375
  misc_feature: MA Experiment ID: 108573 Result: Up-regulated in Transcription
  misc_feature: MA Experiment 108573 PARAMETER Experiment Name: At_Drought_cDNA_P Parameter: Timepoint (hr) Value: 6
  misc_feature: MA Experiment 108573 PARAMETER Experiment Name: At_Drought_cDNA_P Parameter: Tissue Value: Aerial
  misc_feature: MA Experiment 108573 PARAMETER Experiment Name: At_Drought_cDNA_P Parameter: Treatment Value: Drought vs. No Drought
  misc_feature: MA Experiment ID: 20000185 Result: Down-regulated in Transcription
  misc_feature: MA Experiment 20000185 PARAMETER Experiment Name: At_Roots__P Parameter: Age (day) Value: 7 vs. 21
  misc_feature: MA Experiment 20000185 PARAMETER Experiment Name: At_Roots__P Parameter: Organism Value: A. thaliana
  misc_feature: MA Experiment 20000185 PARAMETER Experiment Name: At_Roots__P Parameter: Tissue Value: Roots vs. Whole Plant
  misc_feature: MA Experiment ID: 20000439 Result: Down-regulated in Transcription
  misc_feature: MA Experiment 20000439 PARAMETER Experiment Name: At_Roots__P Parameter: Age (day) Value: 14 vs. 21
  misc_feature: MA Experiment 20000439 PARAMETER Experiment Name: At_Roots__P Parameter: Organism Value: A. thaliana
  misc_feature: MA Experiment 20000439 PARAMETER Experiment Name: At_Roots__P Parameter: Tissue Value: Roots vs. Whole Plant
aaaatttcgtgtgattttctaagacttgagtaatcttgttttccgaaattttctcaccaagctcgaacacaaagatcggccatggctacgctcttcaccgtcgctcgtccttcttcactcctctatgtttcctccataaatccaagcaagaccttctctccttctatctccctaaaacttaactctctctctttctcttttggttatcgtcccaagccactccggttttctaaaatccgatcttctctgccctcggaatctgaatcggaatccgacctagatgcgtctgcagttacagatgaatggggtgagaaacctggagatgcaaatgagcccgactctcagccagataatgtgaccgtgaatgtgattacggacgaatggggcgagaaatccggacccgaacttgaggaatccgggacccggtttatggaatcggatcctccaaggaacgaagacgagtggggaggagaaattggaggagaaactgaagccgacgctggaaatggaagtgcggtgtctgacccgacttgggagctgaaaaggtgtttggcggattcggtgtacggaactgaattaggtttcaaagctgggtcagaagtccgagcggaggttttggagcttgtgaatcaactggaagctctgaatcctactccggctccgttagagaatccagaacttctcgacggcaactgggttttgctgtacactgctttctctgagttgattcctctactagctgcgggttcgacacctttgttgaaagttaaaagcataagtcagtcaatagacacaaacaatctcattatcgacaactccactacactctccagcccttttgcagacttctccttcagtgctactgcttcatttgaagttcgaagcccttcaagaattgaggtttctttcaaagaaggcacgctaaaacccccggtgatcaaatcaagtgtagatctcccagagagtgtgggcgtctttgggcagcagattagcctttcgttgttaaagcagtctttgaaccccttacaagatgtggcagcaaacatttcacgggcactctctggtcagccacctctcaagcttccgtttccaggaaaccgaggcagctcttggctcttgaccacttatctcgacaaggatctcaggatttctagaggagatggtggccttttcgtgcttgccagagaaggaagctctctgcttgagctctgaaatatttgataaagtatatatatagcaggcttcatgtaaaaaccgtaaccactacagtagagacatcttcagaataatgctgaatgcagattattgggcctaatcttaaattttaattatgt

SEQ ID NO: 24573 - protein, 376 aa, Arabidopsis thaliana
  peptide (1)..(376): Ceres Seq. ID no. 12324376
  misc_feature (151)..(367): Pfam Name: PAP_fibrillin Pfam Description: PAP_fibrillin
  misc_feature (125)..(375): Homolog of NCBI NO: 7489179 NR Description: plastid-lipid-associated protein pap - common
  misc_feature (125)..(374): Homolog of NCBI NO: 15233357 NR Description: putative fibrillin
  misc_feature (92)..(374): Homolog of NCBI NO: 14248554 NR Description: plastid-lipid associated protein PAP1 [Brassica
  misc_feature (92)..(374): Homolog of NCBI NO: 14248548 NR Description: plastid-lipid associated protein PAP1 [Brassica
  misc_feature (14)..(375): Homolog of NCBI NO: 4105180 NR Description: plastoglobule associated protein PG1 precursor
  misc_feature (28)..(375): Homolog of NCBI NO: 37537108 NR Description: putative plastid-lipid associated protein
  misc_feature (1)..(376): Homolog of NCBI NO: 14248558 NR Description: plastid-lipid associated protein PAP3 [Brassica
  misc_feature (1)..(376): Homolog of NCBI NO: 14248552 NR Description: plastid-lipid associated protein PAP3 [Brassica
  misc_feature (1)..(376): Homolog of NCBI NO: 14596235 NR Description: putative fibrillin [Arabidopsis thaliana]
  misc_feature (1)..(376): Homolog of NCBI NO: 15227428 NR Description: putative fibrillin
MATLFTVARPSSLLYVSSINPSKTFSPSISLKLNSLSFSFGYRPKPLRFSKIRSSLPSESESESDLDASAVTDEWGEKPGDANEPDSQPDNVTVNVITDEWGEKSGPELEESGTRFMESDPPRNEDEWGGEIGGETEADAGNGSAVSDPTWELKRCLADSVYGTELGFKAGSEVRAEVLELVNQLEALNPTPAPLENPELLDGNWVLLYTAFSELIPLLAAGSTPLLKVKSISQSIDTNNLIIDNSTTLSSPFADFSFSATASFEVRSPSRIEVSFKEGTLKPPVIKSSVDLPESVGVFGQQISLSLLKQSLNPLQDVAANISRALSGQPPLKLPFPGNRGSSWLLTTYLDKDLRISRGDGGLFVLAREGSSLLEL

SEQ ID NO: 24574 - protein, 260 aa, Arabidopsis thaliana
  peptide (1)..(260): Ceres Seq. ID no. 12324377
  misc_feature (35)..(251): Pfam Name: PAP_fibrillin Pfam Description: PAP_fibrillin
  misc_feature (9)..(259): Homolog of NCBI NO: 7489179 NR Description: plastid-lipid-associated protein pap - common
  misc_feature (9)..(258): Homolog of NCBI NO: 15233357 NR Description: putative fibrillin
  misc_feature (1)..(258): Homolog of NCBI NO: 14248554 NR Description: plastid-lipid associated protein PAP1 [Brassica
  misc_feature (1)..(258): Homolog of NCBI NO: 14248548 NR Description: plastid-lipid associated protein PAP1 [Brassica
  misc_feature (1)..(259): Homolog of NCBI NO: 4105180 NR Description: plastoglobule associated protein PG1 precursor
  misc_feature (1)..(259): Homolog of NCBI NO: 37537108 NR Description: putative plastid-lipid associated protein
  misc_feature (1)..(260): Homolog of NCBI NO: 14248558 NR Description: plastid-lipid associated protein PAP3 [Brassica
  misc_feature (1)..(260): Homolog of NCBI NO: 14248552 NR Description: plastid-lipid associated protein PAP3 [Brassica
  misc_feature (1)..(260): Homolog of NCBI NO: 14596235 NR Description: putative fibrillin [Arabidopsis thaliana]
  misc_feature (1)..(260): Homolog of NCBI NO: 15227428 NR Description: putative fibrillin
MESDPPRNEDEWGGEIGGETEADAGNGSAVSDPTWELKRCLADSVYGTELGFKAGSEVRAEVLELVNQLEALNPTPAPLENPELLDGNWVLLYTAFSELIPLLAAGSTPLLKVKSISQSIDTNNLIIDNSTTLSSPFADFSFSATASFEVRSPSRIEVSFKEGTLKPPVIKSSVDLPESVGVFGQQISLSLLKQSLNPLQDVAANISRALSGQPPLKLPFPGNRGSSWLLTTYLDKDLRISRGDGGLFVLAREGSSLLEL

SEQ ID NO: 24575 - DNA, 789 bp, Arabidopsis thaliana
  misc_feature (1)..(789): Ceres Seq. ID no. 12482926
  misc_feature: MA Experiment ID: 108435 Result: Up-regulated in Transcription
  misc_feature: MA Experiment 108435 PARAMETER Experiment Name: At_stm_Mutants_cDNA_P Parameter: Plant Line Value: wt Landsburg vs stm
  misc_feature: MA Experiment 108435 PARAMETER Experiment Name: At_stm_Mutants_cDNA_P Parameter: Tissue Value: Shoot Apical Meristem Region
  misc_feature: MA Experiment ID: 108461 Result: Down-regulated in Transcription
  misc_feature: MA Experiment 108461 PARAMETER Experiment Name: At_Germinating_Seeds_cDNA_P Parameter: Age (day) Value: 1 vs. 0
  misc_feature: MA Experiment 108461 PARAMETER Experiment Name: At_Germinating_Seeds_cDNA_P Parameter: Tissue Value: Germinating Seeds
  misc_feature: MA Experiment ID: 108462 Result: Down-regulated in Transcription
  misc_feature: MA Experiment 108462 PARAMETER Experiment Name: At_Germinating_Seeds_cDNA_P Parameter: Age (day) Value: 2 vs. 0
  misc_feature: MA Experiment 108462 PARAMETER Experiment Name: At_Germinating_Seeds_cDNA_P Parameter: Tissue Value: Germinating Seeds
  misc_feature: MA Experiment ID: 108463 Result: Down-regulated in Transcription
  misc_feature: MA Experiment 108463 PARAMETER Experiment Name: At_Germinating_Seeds_cDNA_P Parameter: Age (day) Value: 3 vs. 0
  misc_feature: MA Experiment 108463 PARAMETER Experiment Name: At_Germinating_Seeds_cDNA_P Parameter: Tissue Value: Germinating Seeds
  misc_feature: MA Experiment ID: 108573 Result: Up-regulated in Transcription
  misc_feature: MA Experiment 108573 PARAMETER Experiment Name: At_Drought_cDNA_P Parameter: Timepoint (hr) Value: 6
  misc_feature: MA Experiment 108573 PARAMETER Experiment Name: At_Drought_cDNA_P Parameter: Tissue Value: Aerial
  misc_feature: MA Experiment 108573 PARAMETER Experiment Name: At_Drought_cDNA_P Parameter: Treatment Value: Drought vs. No Drought
  misc_feature: MA Experiment ID: 108579 Result: Up-regulated in Transcription
  misc_feature: MA Experiment 108579 PARAMETER Experiment Name: At_4deg_Cold_cDNA_P Parameter: Temperature (deg C) Value: 4 vs. 22
  misc_feature: MA Experiment 108579 PARAMETER Experiment Name: At_4deg_Cold_cDNA_P Parameter: Timepoint (hr) Value: 6
  misc_feature: MA Experiment 108579 PARAMETER Experiment Name: At_4deg_Cold_cDNA_P Parameter: Tissue Value: Aerial
  misc_feature: MA Experiment ID: 108585 Result: Up-regulated in Transcription
  misc_feature: MA Experiment 108585 PARAMETER Experiment Name: At_5mM_NaNP_cDNA_P Parameter: Timepoint (hr) Value: 6
  misc_feature: MA Experiment 108585 PARAMETER Experiment Name: At_5mM_NaNP_cDNA_P Parameter: Tissue Value: Aerial
  misc_feature: MA Experiment 108585 PARAMETER Experiment Name: At_5mM_NaNP_cDNA_P Parameter: Treatment Value: null
  misc_feature: MA Experiment ID: 108595 Result: Up-regulated in Transcription
  misc_feature: MA Experiment 108595 PARAMETER Experiment Name: At_Ler-pi_Ovule_cDNA_P Parameter: Plant Line Value: null
aaaaccgacctacaaaatcccttcttcttcctcttcactctttctcattttccaccattaaaaaacctctctactctctcctcaaaaactcaaaagagcaaaaaaaagagaagaagaatcaaaatcccacacaatggcaacacactcttccttcaccgcaacaacacctctctttctcatcgttcttctatccctatcctccgtctcagttctcggcgcatctcaccaccacgcaacggcgccggctccgtctgtagactgttcgactctcatactcaacatggctgactgtttatccttcgtttcgagcggaggcacggtggcgaaaccggaaggtacatgttgctctggtcttaagacggtgcttaaagctgactctcagtgtctatgtgaagcgtttaagagcagtgcttctcttggagttactttgaatatcactaaggcttctactcttcccgccgcatgcaagcttcacgctccttctatcgctacttgtggattgtctgttgctccaagtactgctccaggagtagctgctgctggacctgagacagccggatttctagctccaaatccttcttcagggaacgatggatcttctttgattccgacctcgttcacaactgtactcagtgccgtactgttcgttttgttcttctctagtgcgtaaaaaaaaaactgaatcttttttcaccagctagatttggctgtatgaaattgattaatggtttttattagggttaatctatgtatgttttggagtgttctgttttgagaccatatcggttt

SEQ ID NO: 24576 - protein, 178 aa, Arabidopsis thaliana
  peptide (1)..(178): Ceres Seq. ID no. 12482927
  misc_feature (43)..(121): Pfam Name: Protease inhibitor/seed storage/LTP family Pfam Description: Protease inhibitor/seed storage/LTP family
  misc_feature (13)..(149): Homolog of NCBI NO: 15220327 NR Description: non-specific lipid transfer protein, putative
  misc_feature (14)..(164): Homolog of NCBI NO: 30680828 NR Description: protease inhibitor/seed storage/lipid transfer
  misc_feature (7)..(137): Homolog of NCBI NO: 18415958 NR Description: putative lipid transfer protein
  misc_feature (14)..(177): Homolog of NCBI NO: 7487610 NR Description: hypothetical protein T3F12.2 - Arabidopsis
  misc_feature (7)..(170): Homolog of NCBI NO: 30682659 NR Description: lipid transfer protein family [Arabidopsis
  misc_feature (14)..(176): Homolog of NCBI NO: 27765012 NR Description: At2g13820 [Arabidopsis thaliana]
  misc_feature (14)..(176): Homolog of NCBI NO: 15225509 NR Description: putative nonspecific lipid-transfer protein
  misc_feature (1)..(178): Homolog of NCBI NO: 10176956 NR Description: contains similarity to nonspecific lipid-transfer
  misc_feature (1)..(178): Homolog of NCBI NO: 21618136 NR Description: nonspecific lipid-transfer protein-like protein
  misc_feature (1)..(178): Homolog of NCBI NO: 18424785 NR Description: putative protein
MATHSSFTATTPLFLIVLLSLSSVSVLGASHHHATAPAPSVDCSTLILNMADCLSFVSSGGTVAKPEGTCCSGLKTVLKADSQCLCEAFKSSASLGVTLNITKASTLPAACKLHAPSIATCGLSVAPSTAPGVAAAGPETAGFLAPNPSSGNDGSSLIPTSFTTVLSAVLFVLFFSSA

SEQ ID NO: 24577 - protein, 129 aa, Arabidopsis thaliana
  peptide (1)..(129): Ceres Seq. ID no. 12482928
  misc_feature (1)..(72): Pfam Name: Protease inhibitor/seed storage/LTP family Pfam Description: Protease inhibitor/seed storage/LTP family
  misc_feature (1)..(100): Homolog of NCBI NO: 15220327 NR Description: non-specific lipid transfer protein, putative
  misc_feature (1)..(115): Homolog of NCBI NO: 30680828 NR Description: protease inhibitor/seed storage/lipid transfer
  misc_feature (1)..(88): Homolog of NCBI NO: 18415958 NR Description: putative lipid transfer protein
  misc_feature (1)..(128): Homolog of NCBI NO: 7487610 NR Description: hypothetical protein T3F12.2 - Arabidopsis
  misc_feature (1)..(121): Homolog of NCBI NO: 30682659 NR Description: lipid transfer protein family [Arabidopsis
  misc_feature (1)..(127): Homolog of NCBI NO: 27765012 NR Description: At2g13820 [Arabidopsis thaliana]
  misc_feature (1)..(127): Homolog of NCBI NO: 15225509 NR Description: putative nonspecific lipid-transfer protein
  misc_feature (1)..(129): Homolog of NCBI NO: 10176956 NR Description: contains similarity to nonspecific lipid-transfer
  misc_feature (1)..(129): Homolog of NCBI NO: 21618136 NR Description: nonspecific lipid-transfer protein-like protein
  misc_feature (1)..(129): Homolog of NCBI NO: 18424785 NR Description: putative protein
MADCLSFVSSGGTVAKPEGTCCSGLKTVLKADSQCLCEAFKSSASLGVTLNITKASTLPAACKLHAPSIATCGLSVAPSTAPGVAAAGPETAGFLAPNPSSGNDGSSLIPTSFTTVLSAVLFVLFFSSA

SEQ ID NO: 24578 - protein, 95 aa, Arabidopsis thaliana
  peptide (1)..(95): Ceres Seq. ID no. 12482929
KTDLQNPFFFLFTLSHFPPLKNLSTLSSKTQKSKKKRRRIKIPHNGNTLFLHRNNTSLSHRSSIPILRLSSRRISPPRNGAGSVCRLFDSHTQHG

SEQ ID NO: 24579 - DNA, 2099 bp, Arabidopsis thaliana
  misc_feature (1)..(2099): Ceres Seq. ID no. 12396181
  misc_feature: MA Experiment ID: 108434 Result: Up-regulated in Transcription
  misc_feature: MA Experiment 108434 PARAMETER Experiment Name: At_Root_Tips_cDNA_P Parameter: Tissue Value: Root Tips
  misc_feature: MA Experiment ID: 108461 Result: Up-regulated in Transcription
  misc_feature: MA Experiment 108461 PARAMETER Experiment Name: At_Germinating_Seeds_cDNA_P Parameter: Age (day) Value: 1 vs. 0
  misc_feature: MA Experiment 108461 PARAMETER Experiment Name: At_Germinating_Seeds_cDNA_P Parameter: Tissue Value: Germinating Seeds
  misc_feature: MA Experiment ID: 108462 Result: Up-regulated in Transcription
  misc_feature: MA Experiment 108462 PARAMETER Experiment Name: At_Germinating_Seeds_cDNA_P Parameter: Age (day) Value: 2 vs. 0
  misc_feature: MA Experiment 108462 PARAMETER Experiment Name: At_Germinating_Seeds_cDNA_P Parameter: Tissue Value: Germinating Seeds
  misc_feature: MA Experiment ID: 108573 Result: Down-regulated in Transcription
  misc_feature: MA Experiment 108573 PARAMETER Experiment Name: At_Drought_cDNA_P Parameter: Timepoint (hr) Value: 6
  misc_feature: MA Experiment 108573 PARAMETER Experiment Name: At_Drought_cDNA_P Parameter: Tissue Value: Aerial
  misc_feature: MA Experiment 108573 PARAMETER Experiment Name: At_Drought_cDNA_P Parameter: Treatment Value: Drought vs. No Drought
  misc_feature: MA Experiment ID: 108576 Result: Down-regulated in Transcription
  misc_feature: MA Experiment 108576 PARAMETER Experiment Name: At_42deg_Heat_cDNA_P Parameter: Temperature (deg C) Value: 42 vs. 22
  misc_feature: MA Experiment 108576 PARAMETER Experiment Name: At_42deg_Heat_cDNA_P Parameter: Timepoint (hr) Value: 1
  misc_feature: MA Experiment 108576 PARAMETER Experiment Name: At_42deg_Heat_cDNA_P Parameter: Tissue Value: Aerial
  misc_feature: MA Experiment ID: 108579 Result: Up-regulated in Transcription
  misc_feature: MA Experiment 108579 PARAMETER Experiment Name: At_4deg_Cold_cDNA_P Parameter: Temperature (deg C) Value: 4 vs. 22
  misc_feature: MA Experiment 108579 PARAMETER Experiment Name: At_4deg_Cold_cDNA_P Parameter: Timepoint (hr) Value: 6
  misc_feature: MA Experiment 108579 PARAMETER Experiment Name: At_4deg_Cold_cDNA_P Parameter: Tissue Value: Aerial
  misc_feature: MA Experiment ID: 108595 Result: Up-regulated in Transcription
  misc_feature: MA Experiment 108595 PARAMETER Experiment Name: At_Ler-pi_Ovule_cDNA_P Parameter: Plant Line Value: null
  misc_feature: MA Experiment ID: 20000069 Result: Down-regulated in Transcription
  misc_feature: MA Experiment 20000069 PARAMETER Experiment Name: At_100uM_ABA_Mutants_cDNA_P Parameter: Plant Line Value: CS23
  misc_feature: MA Experiment 20000069 PARAMETER Experiment Name: At_100uM_ABA_Mutants_cDNA_P Parameter: Timepoint (hr) Value: 6
  misc_feature: MA Experiment 20000069 PARAMETER Experiment Name: At_100uM_ABA_Mutants_cDNA_P Parameter: Tissue Value: Aerial
  misc_feature: MA Experiment 20000069 PARAMETER Experiment Name: At_100uM_ABA_Mutants_cDNA_P Parameter: Treatment Value: 100uM ABA vs. No Treatment
  misc_feature: MA Experiment ID: 20000070 Result: Down-regulated in Transcription
  misc_feature: MA Experiment 20000070 PARAMETER Experiment Name: At_100uM_ABA_Mutants_cDNA_P Parameter: Plant Line Value: CS24
  misc_feature: MA Experiment 20000070 PARAMETER Experiment Name: At_100uM_ABA_Mutants_cDNA_P Parameter: Timepoint (hr) Value: 6
  misc_feature: MA Experiment 20000070 PARAMETER Experiment Name: At_100uM_ABA_Mutants_cDNA_P Parameter: Tissue Value: Aerial
  misc_feature: MA Experiment 20000070 PARAMETER Experiment Name: At_100uM_ABA_Mutants_cDNA_P Parameter: Treatment Value: 100uM ABA vs. No Treatment
  misc_feature: MA Experiment ID: 20000071 Result: Down-regulated in Transcription
  misc_feature: MA Experiment 20000071 PARAMETER Experiment Name: At_100uM_ABA_Mutants_cDNA_P Parameter: Plant Line Value: CS8104
  misc_feature: MA Experiment 20000071 PARAMETER Experiment Name: At_100uM_ABA_Mutants_cDNA_P Parameter: Timepoint (hr) Value: 6
  misc_feature: MA Experiment 20000071 PARAMETER Experiment Name: At_100uM_ABA_Mutants_cDNA_P Parameter: Tissue Value: Aerial
  misc_feature: MA Experiment 20000071 PARAMETER Experiment Name: At_100uM_ABA_Mutants_cDNA_P Parameter: Treatment Value: 100uM ABA vs. No Treatment
  misc_feature: MA Experiment ID: 20000072 Result: Down-regulated in Transcription
  misc_feature: MA Experiment 20000072 PARAMETER Experiment Name: At_100uM_ABA_Mutants_cDNA_P Parameter: Plant Line Value: CS8105
  misc_feature: MA Experiment 20000072 PARAMETER Experiment Name: At_100uM_ABA_Mutants_cDNA_P Parameter: Timepoint (hr) Value: 6
  misc_feature: MA Experiment 20000072 PARAMETER Experiment Name: At_100uM_ABA_Mutants_cDNA_P Parameter: Tissue Value: Aerial
  misc_feature: MA Experiment 20000072 PARAMETER Experiment Name: At_100uM_ABA_Mutants_cDNA_P Parameter: Treatment Value: 100uM ABA vs. No Treatment
  misc_feature: MA Experiment ID: 20000086 Result: Down-regulated in Transcription
  misc_feature: MA Experiment 20000086 PARAMETER Experiment Name: At_100uM_ABA_Mutants_cDNA_P Parameter: Plant Line Value: CS22
  misc_feature: MA Experiment 20000086 PARAMETER Experiment Name: At_100uM_ABA_Mutants_cDNA_P Parameter: Timepoint (hr) Value: 6
  misc_feature: MA Experiment 20000086 PARAMETER Experiment Name: At_100uM_ABA_Mutants_cDNA_P Parameter: Tissue Value: Aerial
  misc_feature: MA Experiment 20000086 PARAMETER Experiment Name: At_100uM_ABA_Mutants_cDNA_P Parameter: Treatment Value: 100uM ABA vs. No Treatment
  misc_feature: MA Experiment ID: 20000087 Result: Down-regulated in Transcription
  misc_feature: MA Experiment 20000087 PARAMETER Experiment Name: At_100uM_ABA_Mutants_cDNA_P Parameter: Plant Line Value: WS
  misc_feature: MA Experiment 20000087 PARAMETER Experiment Name: At_100uM_ABA_Mutants_cDNA_P Parameter: Timepoint (hr) Value: 6
  misc_feature: MA Experiment 20000087 PARAMETER Experiment Name: At_100uM_ABA_Mutants_cDNA_P Parameter: Tissue Value: Aerial
  misc_feature: MA Experiment 20000087 PARAMETER Experiment Name: At_100uM_ABA_Mutants_cDNA_P Parameter: Treatment Value: 100uM ABA vs. No Treatment
  misc_feature: MA Experiment ID: 20000090 Result: Down-regulated in Transcription
  misc_feature: MA Experiment ID: 20000093 Result: Down-regulated in Transcription
  misc_feature: MA Experiment 20000093 PARAMETER Experiment Name: At_42deg_Heat_cDNA_P Parameter: Temperature (deg C) Value: 42 vs. 22
  misc_feature: MA Experiment 20000093 PARAMETER Experiment Name: At_42deg_Heat_cDNA_P Parameter: Timepoint (hr) Value: 0.5
  misc_feature: MA Experiment 20000093 PARAMETER Experiment Name: At_42deg_Heat_cDNA_P Parameter: Tissue Value: Aerial
  misc_feature: MA Experiment ID: 20000111 Result: Down-regulated in Transcription
  misc_feature: MA Experiment 20000111 PARAMETER Experiment Name: At_42deg_Heat_cDNA_P Parameter: Temperature (deg C) Value: 42 vs. 22
  misc_feature: MA Experiment 20000111 PARAMETER Experiment Name: At_42deg_Heat_cDNA_P Parameter: Timepoint (hr) Value: 6
  misc_feature: MA Experiment 20000111 PARAMETER Experiment Name: At_42deg_Heat_cDNA_P Parameter: Tissue Value: Aerial
  misc_feature: MA Experiment ID: 20000112 Result: Down-regulated in Transcription
  misc_feature: MA Experiment 20000112 PARAMETER Experiment Name: At_42deg_Heat_cDNA_P Parameter: Temperature (deg C) Value: 42 vs. 22
  misc_feature: MA Experiment 20000112 PARAMETER Experiment Name: At_42deg_Heat_cDNA_P Parameter: Timepoint (hr) Value: 2
  misc_feature: MA Experiment 20000112 PARAMETER Experiment Name: At_42deg_Heat_cDNA_P Parameter: Tissue Value: Aerial
  misc_feature: MA Experiment ID: 20000113 Result: Down-regulated in Transcription
  misc_feature: MA Experiment 20000113 PARAMETER Experiment Name: At_42deg_Heat_cDNA_P Parameter: Temperature (deg C) Value: 42 vs. 22
  misc_feature: MA Experiment 20000113 PARAMETER Experiment Name: At_42deg_Heat_cDNA_P Parameter: Timepoint (hr) Value: 8
  misc_feature: MA Experiment 20000113 PARAMETER Experiment Name: At_42deg_Heat_cDNA_P Parameter: Tissue Value: Aerial
  misc_feature: MA Experiment ID: 20000117 Result: Down-regulated in Transcription
  misc_feature: MA Experiment 20000117 PARAMETER Experiment Name: At_100uM_ABA_Mutants_cDNA_P Parameter: Plant Line Value: Columbia
  misc_feature: MA Experiment 20000117 PARAMETER Experiment Name: At_100uM_ABA_Mutants_cDNA_P Parameter: Timepoint (hr) Value: 6
  misc_feature: MA Experiment 20000117 PARAMETER Experiment Name: At_100uM_ABA_Mutants_cDNA_P Parameter: Tissue Value: Aerial
  misc_feature: MA Experiment 20000117 PARAMETER Experiment Name: At_100uM_ABA_Mutants_cDNA_P Parameter: Treatment Value: 100uM ABA vs. No Treatment
  misc_feature: MA Experiment ID: 20000144 Result: Down-regulated in Transcription
  misc_feature: MA Experiment 20000144 PARAMETER Experiment Name: At_42deg_Heat_cDNA_P Parameter: Temperature (deg C) Value: 42 vs. 22
  misc_feature: MA Experiment 20000144 PARAMETER Experiment Name: At_42deg_Heat_cDNA_P Parameter: Timepoint (hr) Value: 1
  misc_feature: MA Experiment 20000144 PARAMETER Experiment Name: At_42deg_Heat_cDNA_P Parameter: Tissue Value: Aerial
  misc_feature: MA Experiment ID: 20000171 Result: Down-regulated in Transcription
  misc_feature: MA Experiment 20000171 PARAMETER Experiment Name: At_42deg_Heat_P Parameter: Age (day) Value: 14
  misc_feature: MA Experiment 20000171 PARAMETER Experiment Name: At_42deg_Heat_P Parameter: Organism Value: A. thaliana
  misc_feature: MA Experiment 20000171 PARAMETER Experiment Name: At_42deg_Heat_P Parameter: Plant Line Value: WS
  misc_feature: MA Experiment 20000171 PARAMETER Experiment Name: At_42deg_Heat_P Parameter: Temperature (deg C) Value: 42 vs. 22
  misc_feature: MA Experiment 20000171 PARAMETER Experiment Name: At_42deg_Heat_P Parameter: Timepoint (hr) Value: 1
  misc_feature: MA Experiment 20000171 PARAMETER Experiment Name: At_42deg_Heat_P Parameter: Tissue Value: Aerial
  misc_feature: MA Experiment ID: 20000180 Result: Up-regulated in Transcription
  misc_feature: MA Experiment 20000180 PARAMETER Experiment Name: At_Germinating_Seeds_P Parameter: Age (hr) Value: 24 vs. 0
  misc_feature: MA Experiment 20000180 PARAMETER Experiment Name: At_Germinating_Seeds_P Parameter: Tissue Value: Germinating Seeds
  misc_feature: MA Experiment ID: 20000184 Result: Up-regulated in Transcription
  misc_feature: MA Experiment 20000184 PARAMETER Experiment Name: At_Shoots__P Parameter: Age (day) Value: 7
  misc_feature: MA Experiment 20000184 PARAMETER Experiment Name: At_Shoots__P Parameter: Tissue Value: Shoots vs. Whole Plant
  misc_feature: MA Experiment ID: 20000185 Result: Down-regulated in Transcription
  misc_feature: MA Experiment 20000185 PARAMETER Experiment Name: At_Roots__P Parameter: Age (day) Value: 7 vs. 21
  misc_feature: MA Experiment 20000185 PARAMETER Experiment Name: At_Roots__P Parameter: Organism Value: A. thaliana
  misc_feature: MA Experiment 20000185 PARAMETER Experiment Name: At_Roots__P Parameter: Tissue Value: Roots vs. Whole Plant
  misc_feature: MA Experiment ID: 20000224 Result: Up-regulated in Transcription
  misc_feature: MA Experiment ID: 20000234 Result: Up-regulated in Transcription
  misc_feature: MA Experiment 20000234 PARAMETER Experiment Name: At_Siliques_P Parameter: Age (day) Value: 21
  misc_feature: MA Experiment 20000234 PARAMETER Experiment Name: At_Siliques_P Parameter: Organism Value: A. thaliana
  misc_feature: MA Experiment 20000234 PARAMETER Experiment Name: At_Siliques_P Parameter: Plant Line Value: WS
  misc_feature: MA Experiment 20000234 PARAMETER Experiment Name: At_Siliques_P Parameter: Tissue Value: Less Than 5mm Siliques vs. Whole Plant
  misc_feature: MA Experiment ID: 20000235 Result: Up-regulated in Transcription
  misc_feature: MA Experiment 20000235 PARAMETER Experiment Name: At_Siliques_P Parameter: Age (day) Value: 21
  misc_feature: MA Experiment 20000235 PARAMETER Experiment Name: At_Siliques_P Parameter: Organism Value: A. thaliana
  misc_feature: MA Experiment 20000235 PARAMETER Experiment Name: At_Siliques_P Parameter: Plant Line Value: WS
  misc_feature: MA Experiment 20000235 PARAMETER Experiment Name: At_Siliques_P Parameter: Tissue Value: 5-10mm Siliques vs. Whole Plant
  misc_feature: MA Experiment ID: 20000264 Result: Up-regulated in Transcription
  misc_feature: MA Experiment 20000264 PARAMETER Experiment Name: At_Open_Flower_P Parameter: Age (day) Value: 21
  misc_feature: MA Experiment 20000264 PARAMETER Experiment Name: At_Open_Flower_P Parameter: Plant Line Value: WS
  misc_feature: MA Experiment 20000264 PARAMETER Experiment Name: At_Open_Flower_P Parameter: Tissue Value: Open Flower vs. Whole Plant
  misc_feature: MA Experiment ID: 20000265 Result: Up-regulated in Transcription
  misc_feature: MA Experiment 20000265 PARAMETER Experiment Name: At_Open_Flower_P Parameter: Age (day) Value: 21
  misc_feature: MA Experiment 20000265 PARAMETER Experiment Name: At_Open_Flower_P Parameter: Plant Line Value: WS
  misc_feature: MA Experiment 20000265 PARAMETER Experiment Name: At_Open_Flower_P Parameter: Tissue Value: Closed Flower vs. Whole Plant
  misc_feature: MA Experiment ID: 20000286 Result: Up-regulated in Transcription
  misc_feature: MA Experiment 20000286 PARAMETER Experiment Name: At_Open_Flower_P Parameter: Age (day) Value: 21
  misc_feature: MA Experiment 20000286 PARAMETER Experiment Name: At_Open_Flower_P Parameter: Plant Line Value: WS
  misc_feature: MA Experiment 20000286 PARAMETER Experiment Name: At_Open_Flower_P Parameter: Tissue Value: Half Open vs. Whole Plant
  misc_feature: MA Experiment ID: 20000436 Result: Down-regulated in Transcription
  misc_feature: MA Experiment 20000436 PARAMETER Experiment Name: At_Drought_P Parameter: Age (day) Value: 7
  misc_feature: MA Experiment 20000436 PARAMETER Experiment Name: At_Drought_P Parameter: Organism Value: A. thaliana
  misc_feature: MA Experiment 20000436 PARAMETER Experiment Name: At_Drought_P Parameter: Plant Line Value: WS
  misc_feature: MA Experiment 20000436 PARAMETER Experiment Name: At_Drought_P Parameter: Timepoint (hr) Value: 12
  misc_feature: MA Experiment 20000436 PARAMETER Experiment Name: At_Drought_P Parameter: Tissue Value: Whole Plant
  misc_feature: MA Experiment 20000436 PARAMETER Experiment Name: At_Drought_P Parameter: Treatment Value: Drought vs. No Drought
  misc_feature: MA Experiment ID: 20000437 Result: Down-regulated in Transcription
  misc_feature: MA Experiment 20000437 PARAMETER Experiment Name: At_Drought_P Parameter: Age (day) Value: 8
  misc_feature: MA Experiment 20000437 PARAMETER Experiment Name: At_Drought_P Parameter: Organism Value: A. thaliana
  misc_feature: MA Experiment 20000437 PARAMETER Experiment Name: At_Drought_P Parameter: Plant Line Value: WS
  misc_feature: MA Experiment 20000437 PARAMETER Experiment Name: At_Drought_P Parameter: Timepoint (hr) Value: 24
  misc_feature: MA Experiment 20000437 PARAMETER Experiment Name: At_Drought_P Parameter: Tissue Value: Whole Plant
  misc_feature: MA Experiment 20000437 PARAMETER Experiment Name: At_Drought_P Parameter: Treatment Value: Drought vs. No Drought
  misc_feature: MA Experiment ID: 20000439 Result: Down-regulated in Transcription
  misc_feature: MA Experiment 20000439 PARAMETER Experiment Name: At_Roots__P Parameter: Age (day) Value: 14 vs. 21
  misc_feature: MA Experiment 20000439 PARAMETER Experiment Name: At_Roots__P Parameter: Organism Value: A. thaliana
  misc_feature: MA Experiment 20000439 PARAMETER Experiment Name: At_Roots__P Parameter: Tissue Value: Roots vs. Whole Plant
  misc_feature: MA Experiment ID: 20000573 Result: Down-regulated in Transcription
  misc_feature: MA Experiment 20000573 PARAMETER Experiment Name: At_100uM_ABA_Mutants__P Parameter: Organism Value: A. thaliana
  misc_feature: MA Experiment 20000573 PARAMETER Experiment Name: At_100uM_ABA_Mutants__P Parameter: Plant Line Value: CS22 vs. Ler wt
  misc_feature: MA Experiment 20000573 PARAMETER Experiment Name: At_100uM_ABA_Mutants__P Parameter: Timepoint (hr) Value: N/A
  misc_feature: MA Experiment 20000573 PARAMETER Experiment Name: At_100uM_ABA_Mutants__P Parameter: Tissue Value: Whole Plant
  misc_feature: MA Experiment 20000573 PARAMETER Experiment Name: At_100uM_ABA_Mutants__P Parameter: Treatment Value: None
  misc_feature: MA Experiment ID: 20000574 Result: Down-regulated in Transcription
  misc_feature: MA Experiment 20000574 PARAMETER Experiment Name: At_100uM_ABA_Mutants__P Parameter: Organism Value: A. thaliana
  misc_feature: MA Experiment 20000574 PARAMETER Experiment Name: At_100uM_ABA_Mutants__P Parameter: Plant Line Value: CS23 vs. Ler wt
  misc_feature: MA Experiment 20000574 PARAMETER Experiment Name: At_100uM_ABA_Mutants__P Parameter: Timepoint (hr) Value: N/A
  misc_feature: MA Experiment 20000574 PARAMETER Experiment Name: At_100uM_ABA_Mutants__P Parameter: Tissue Value: Whole Plant
  misc_feature: MA Experiment 20000574 PARAMETER Experiment Name: At_100uM_ABA_Mutants__P Parameter: Treatment Value: None
  misc_feature: MA Experiment ID: 20000794 Result: Down-regulated in Transcription
  misc_feature: MA Experiment 20000794 PARAMETER Experiment Name: At_Petals_P Parameter: Age (day) Value: 23-25 days
  misc_feature: MA Experiment 20000794 PARAMETER Experiment Name: At_Petals_P Parameter: Plant Line Value: WS
  misc_feature: MA Experiment 20000794 PARAMETER Experiment Name: At_Petals_P Parameter: Tissue Value: Petals vs. Whole plant
  misc_feature: MA Experiment ID: 20001248 Result: Down-regulated in Transcription
  misc_feature: MA Experiment 20001248 PARAMETER Experiment Name: At_Far-red-induction_P Parameter: Age (day) Value: 7
  misc_feature: MA Experiment 20001248 PARAMETER Experiment Name: At_Far-red-induction_P Parameter: Light Value: Far-red vs. White
  misc_feature: MA Experiment 20001248 PARAMETER Experiment Name: At_Far-red-induction_P Parameter: Organism Value: A. thaliana
  misc_feature: MA Experiment 20001248 PARAMETER Experiment Name: At_Far-red-induction_P Parameter: Plant Line Value: Columbia
  misc_feature: MA Experiment 20001248 PARAMETER Experiment Name: At_Far-red-induction_P Parameter: Timepoint (hr) Value: 4
  misc_feature: MA Experiment 20001248 PARAMETER Experiment Name: At_Far-red-induction_P Parameter: Tissue Value: Whole Plant
  misc_feature: MA Experiment ID: 20001450 Result: Down-regulated in Transcription
  misc_feature: MA Experiment 20001450 PARAMETER Experiment Name: At_Far-red-induction_P Parameter: Age (day) Value: 7
  misc_feature: MA Experiment 20001450 PARAMETER Experiment Name: At_Far-red-induction_P Parameter: Light Value: Far-red vs. White
  misc_feature: MA Experiment 20001450 PARAMETER Experiment Name: At_Far-red-induction_P Parameter: Organism Value: A. thaliana
  misc_feature: MA Experiment 20001450 PARAMETER Experiment Name: At_Far-red-induction_P Parameter: Plant Line Value: Columbia
  misc_feature: MA Experiment 20001450 PARAMETER Experiment Name: At_Far-red-induction_P Parameter: Timepoint (hr) Value: 8
  misc_feature: MA Experiment 20001450 PARAMETER Experiment Name: At_Far-red-induction_P Parameter: Tissue Value: Whole Plant
  misc_feature: MA Experiment ID: 20001451 Result: Down-regulated in Transcription
  misc_feature: MA Experiment 20001451 PARAMETER Experiment Name: At_Far-red-induction_P Parameter: Age (day) Value: 7
  misc_feature: MA Experiment 20001451 PARAMETER Experiment Name: At_Far-red-induction_P Parameter: Light Value: Far-red vs. White
  misc_feature: MA Experiment 20001451 PARAMETER Experiment Name: At_Far-red-induction_P Parameter: Organism Value: A. thaliana
  misc_feature: MA Experiment 20001451 PARAMETER Experiment Name: At_Far-red-induction_P Parameter: Plant Line Value: Columbia
  misc_feature: MA Experiment 20001451 PARAMETER Experiment Name: At_Far-red-induction_P Parameter: Timepoint (hr) Value: 24
  misc_feature: MA Experiment 20001451 PARAMETER Experiment Name: At_Far-red-induction_P Parameter: Tissue Value: Whole Plant
  misc_feature: MA Experiment ID: 20001555 Result: Down-regulated in Transcription
  misc_feature: MA Experiment 20001555 PARAMETER Experiment Name: At_Drought_Soil_Dry_P Parameter: Age (day) Value: 24
  misc_feature: MA Experiment 20001555 PARAMETER Experiment Name: At_Drought_Soil_Dry_P Parameter: Organism Value: A. thaliana
  misc_feature: MA Experiment 20001555 PARAMETER Experiment Name: At_Drought_Soil_Dry_P Parameter: Plant Line Value: WS
  misc_feature: MA Experiment 20001555 PARAMETER Experiment Name: At_Drought_Soil_Dry_P Parameter: Post Timepoint (hr) Value: None
  misc_feature: MA Experiment 20001555 PARAMETER Experiment Name: At_Drought_Soil_Dry_P Parameter: Post-Treatment Value: None
  misc_feature: MA Experiment 20001555 PARAMETER Experiment Name: At_Drought_Soil_Dry_P Parameter: Timepoint (day) Value: 10
  misc_feature: MA Experiment 20001555 PARAMETER Experiment Name: At_Drought_Soil_Dry_P Parameter: Treatment Value: Drought vs. No Drought
  misc_feature: MA Experiment ID: 20001557 Result: Up-regulated in Transcription
  misc_feature: MA Experiment 20001557 PARAMETER Experiment Name: At_Drought_Soil_Dry_P Parameter: Age (day) Value: 27
  misc_feature: MA Experiment 20001557 PARAMETER Experiment Name: At_Drought_Soil_Dry_P Parameter: Organism Value: A. thaliana
  misc_feature: MA Experiment 20001557 PARAMETER Experiment Name: At_Drought_Soil_Dry_P Parameter: Plant Line Value: WS
  misc_feature: MA Experiment 20001557 PARAMETER Experiment Name: At_Drought_Soil_Dry_P Parameter: Post Timepoint (hr) Value: 3
  misc_feature: MA Experiment 20001557 PARAMETER Experiment Name: At_Drought_Soil_Dry_P Parameter: Post-Treatment Value: Re-Water vs. No Drought
  misc_feature: MA Experiment 20001557 PARAMETER Experiment Name: At_Drought_Soil_Dry_P Parameter: Timepoint (day) Value: 13
  misc_feature: MA Experiment 20001557 PARAMETER Experiment Name: At_Drought_Soil_Dry_P Parameter: Treatment Value: Drought vs. No Drought
  misc_feature: MA Experiment ID: 20001558 Result: Up-regulated in Transcription
  misc_feature: MA Experiment 20001558 PARAMETER Experiment Name: At_Drought_Soil_Dry_P Parameter: Age (day) Value: 27
  misc_feature: MA Experiment 20001558 PARAMETER Experiment Name: At_Drought_Soil_Dry_P Parameter: Organism Value: A. thaliana
  misc_feature: MA Experiment 20001558 PARAMETER Experiment Name: At_Drought_Soil_Dry_P Parameter: Plant Line Value: WS
  misc_feature: MA Experiment 20001558 PARAMETER Experiment Name: At_Drought_Soil_Dry_P Parameter: Post Timepoint (hr) Value: 6
  misc_feature: MA Experiment 20001558 PARAMETER Experiment Name: At_Drought_Soil_Dry_P Parameter: Post-Treatment Value: Re-Water vs. No Drought
  misc_feature: MA Experiment 20001558 PARAMETER Experiment Name: At_Drought_Soil_Dry_P Parameter: Timepoint (day) Value: 13
  misc_feature: MA Experiment 20001558 PARAMETER Experiment Name: At_Drought_Soil_Dry_P Parameter: Treatment Value: Drought vs. No Drought
  misc_feature: MA Experiment ID: 20001560 Result: Up-regulated in Transcription
  misc_feature: MA Experiment 20001560 PARAMETER Experiment Name: At_Drought_Soil_Dry_P Parameter: Age (day) Value: 28
  misc_feature: MA Experiment 20001560 PARAMETER Experiment Name: At_Drought_Soil_Dry_P Parameter: Organism Value: A. thaliana
  misc_feature: MA Experiment 20001560 PARAMETER Experiment Name: At_Drought_Soil_Dry_P Parameter: Plant Line Value: WS
  misc_feature: MA Experiment 20001560 PARAMETER Experiment Name: At_Drought_Soil_Dry_P Parameter: Post Timepoint (hr) Value: None
  misc_feature: MA Experiment 20001560 PARAMETER Experiment Name: At_Drought_Soil_Dry_P Parameter: Post-Treatment Value: None
  misc_feature: MA Experiment 20001560 PARAMETER Experiment Name: At_Drought_Soil_Dry_P Parameter: Timepoint (day) Value: 14
  misc_feature: MA Experiment 20001560 PARAMETER Experiment Name: At_Drought_Soil_Dry_P Parameter: Treatment Value: Drought vs. No Drought
  misc_feature: MA Experiment ID: 20001906 Result: Down-regulated in Transcription
  misc_feature: MA Experiment 20001906 PARAMETER Experiment Name: At_Drought_Reproduction_P Parameter: Age (day) Value: 35
  misc_feature: MA Experiment 20001906 PARAMETER Experiment Name: At_Drought_Reproduction_P Parameter: Organism Value: A. thaliana
  misc_feature: MA Experiment 20001906 PARAMETER Experiment Name: At_Drought_Reproduction_P Parameter: Plant Line Value: WS
  misc_feature: MA Experiment 20001906 PARAMETER Experiment Name: At_Drought_Reproduction_P Parameter: Timepoint (day) Value: 5
  misc_feature: MA Experiment 20001906 PARAMETER Experiment Name: At_Drought_Reproduction_P Parameter: Tissue Value: Siliques
  misc_feature: MA Experiment 20001906 PARAMETER Experiment Name: At_Drought_Reproduction_P Parameter: Treatment Value: Drought vs. No Drought
  misc_feature: MA Experiment ID: 20001908 Result: Down-regulated in Transcription
  misc_feature: MA Experiment 20001908 PARAMETER Experiment Name: At_Drought_Reproduction_P Parameter: Age (day) Value: 40
  misc_feature: MA Experiment 20001908 PARAMETER Experiment Name: At_Drought_Reproduction_P Parameter: Organism Value: A. thaliana
  misc_feature: MA Experiment 20001908 PARAMETER Experiment Name: At_Drought_Reproduction_P Parameter: Plant Line Value: WS
  misc_feature: MA Experiment 20001908 PARAMETER Experiment Name: At_Drought_Reproduction_P Parameter: Timepoint (day) Value: 10
  misc_feature: MA Experiment 20001908 PARAMETER Experiment Name: At_Drought_Reproduction_P Parameter: Tissue Value: Siliques
  misc_feature: MA Experiment 20001908 PARAMETER Experiment Name: At_Drought_Reproduction_P Parameter: Treatment Value: Drought vs. No Drought
  misc_feature: MA Experiment ID: 20001911 Result: Down-regulated in Transcription
  misc_feature: MA Experiment 20001911 PARAMETER Experiment Name: At_Drought_Reproduction_P Parameter: Age (day) Value: 40
  misc_feature: MA Experiment 20001911 PARAMETER Experiment Name: At_Drought_Reproduction_P Parameter: Organism Value: A. thaliana
  misc_feature: MA Experiment 20001911 PARAMETER Experiment Name: At_Drought_Reproduction_P Parameter: Plant Line Value: WS
  misc_feature: MA Experiment 20001911 PARAMETER Experiment Name: At_Drought_Reproduction_P Parameter: Timepoint (day) Value: 10
  misc_feature: MA Experiment 20001911 PARAMETER Experiment Name: At_Drought_Reproduction_P Parameter: Tissue Value: Flowers
  misc_feature: MA Experiment 20001911 PARAMETER Experiment Name: At_Drought_Reproduction_P Parameter: Treatment Value: Drought vs. No Drought
attcatcaaaagccacataagaagttgatgcagaagcaataataacaaaaaacattaaaaaaaaacctcttcagttttggtttctgcagtctccaatggctctcaagctctttctctttgctcttcttctctgtctcccgacttctctctcctccactgcctctaaaggtaaagagaagaagtcgaagtttaatccatacagatacacattcatcgataaagcaagcacattctcatcatcttcctcatcttcattttcatccaacggtcaagattcgtcctacgactacatagtcatcggaggtggaaccgcagggtgtcctctcgccgcaacgttgtcgcagaatttcagcgttcttgttttagagagaggtggcgttccgtttacaaacgcaaacgtttctttcctcaggaattttcacatcggacttgctgacatttcagcttcttccgcgtctcaagcgtttgtttccactgacggcgtttacaacgctcgtgctagagttctcggtggcggttcctgtattaacgccggtttttactccagagccgatgctgcgttcgtgaagcgagcaggatgggatccgaagctggtgaaggaatcgtatccatgggtggagagagagattgttcatcagccaaagttaacgttatggcagaaagctctcagagacagtcttttagaggttggagtcagacctttcaatggtttcacctacgatcacgtctccggaaccaaaatcggcgggacaattttcgatagattcggccgtcgtcacacggcggcggagcttctcgcttacgctaatcctcagaagcttagagtcttgatctacgccactgtgcaaaaaatcgtctttgacacttcaggaacaaggcctagagtaacaggagtgatattcaaagatgagaaaggtaatcaacaccaggctttactctcgaatagaaagggaagtgaagtgatattatctagtggagctattgggtgaccacagatgctgatgttaagtgggattggacctaagaaggagcttcagaggctgaagattcctgtggttttagagaatgagcatgtagggaaaggaatggctgataatcccatgaacacgatcttggtaccttcaaaggcgcctatagagcagtcacttattcagactgttggaattacaaagatgggtgtgtatgttgaagccagtactggctttgggcaatctcctgagagtattcatactcactatgggattatgtcgaacaagaatgaattgttttccaccattcctgcaaagcagagaagaccagaagcaacgcaagcttacatcacaagaaacaaataccaacttcacgaagcattcaatggaagtttcatcttggagaaacttgcttacccgatctctagagggcatttgagcttggtcaacacaaatgttgatgacaacccttcagtcaccttcaattactttaaacacccggtggatctccaacgctgtgttgaagccattcgtcttgtttccaaagtggtgacgtctaagcgtttcttaaactacacgcagtgtgacaagcaaaacgtacacaagatgcttagcttaagcgtcaaggcaaacatcaatctaaggccaaagcaactgaacgataccaaatcaatggctcagttctgcaaagacactgttgtcacaatctggcactaccatggtggatgtcttgtgggtaaagttgtgagccctaaccgcaaagttcttggtgtcgacaggcttagagttattgatggttcaacgtttgacgagtctccaggaaccaacccgcaagctactatgatgatgatgggaagatacatgggagtcaagattcttcgggagagacttggaaacaaagctggtgtttagtttgcagattgagcttttatggtagacaaattcgtagcagataattctgatgtggaattgtgttggagaatatctctctctgtctccttctctgttatttgatattcgattcattgaagtataggatcatattgtctaatgaactgtgtaaccctctattgggcaatcggctctgttgcttattagcttgtgtgaaaagttaatcacgttttctgtttc

SEQ ID NO: 24580 - protein, 297 aa, Arabidopsis thaliana
  peptide (1)..(297): Ceres Seq. ID no. 12396182
  misc_feature (63)..(297): Pfam Name: GMC oxidoreductase Pfam Description: GMC oxidoreductase
  misc_feature (41)..(297): Homolog of NCBI NO: 10177730 NR Description: mandelonitrile lyase-like protein [Arabidopsis
  misc_feature (61)..(297): Homolog of NCBI NO: 11358959 NR Description: probable mandelonitrile lyase (EC 4.1.2.10)
  misc_feature (41)..(297): Homolog of NCBI NO: 15242236 NR Description: mandelonitrile lyase-like protein
  misc_feature (61)..(297): Homolog of NCBI NO: 9502391 NR Description: T12C24.11 [Arabidopsis thaliana]
  misc_feature (61)..(297): Homolog of NCBI NO: 8778640 NR Description: F5O11.31 [Arabidopsis thaliana]
  misc_feature (41)..(297): Homolog of NCBI NO: 17978954 NR Description: At1g12570/T12C24_9 [Arabidopsis thaliana]
  misc_feature (41)..(297): Homolog of NCBI NO: 22329512 NR Description: hypothetical protein
  misc_feature (51)..(297): Homolog of NCBI NO: 37572986 NR Description: putative mandelonitrile lyase
  misc_feature (1)..(297): Homolog of NCBI NO: 18410230 NR Description: expressed protein
  misc_feature (1)..(297): Homolog of NCBI NO: 11357159 NR Description: adhesion of calyx edges protein ACE
MALKLFLFALLLCLPTSLSSTASKGKEKKSKFNPYRYTFIDKASTFSSSSSSSFSSNGQDSSYDYIVIGGGTAGCPLAATLSQNFSVLVLERGGVPFTNANVSFLRNFHIGLADISASSASQAFVSTDGVYNARARVLGGGSCINAGFYSRADAAFVKRAGWDPKLVKESYPWVEREIVHQPKLTLWQKALRDSLLEVGVRPFNGFTYDHVSGTKIGGTIFDRFGRRHTAAELLAYANPQKLRVLIYATVQKIVFDTSGTRPRVTGVIFKDEKGNQHQALLSNRKGSEVILSSGAIG

SEQ ID NO: 24581 - protein, 294 aa, Arabidopsis thaliana
  peptide (1)..(294): Ceres Seq. ID no. 12396183
  misc_feature (76)..(279): Pfam Name: GMC oxidoreductase Pfam Description: GMC oxidoreductase
  misc_feature (1)..(277): Homolog of NCBI NO: 10177730 NR Description: mandelonitrile lyase-like protein [Arabidopsis
  misc_feature (1)..(287): Homolog of NCBI NO: 11358959 NR Description: probable mandelonitrile lyase (EC 4.1.2.10)
  misc_feature (1)..(291): Homolog of NCBI NO: 15242236 NR Description: mandelonitrile lyase-like protein
  misc_feature (1)..(291): Homolog of NCBI NO: 9502391 NR Description: T12C24.11 [Arabidopsis thaliana]
  misc_feature (1)..(291): Homolog of NCBI NO: 8778640 NR Description: F5O11.31 [Arabidopsis thaliana]
  misc_feature (1)..(291): Homolog of NCBI NO: 17978954 NR Description: At1g12570/T12C24_9 [Arabidopsis thaliana]
  misc_feature (1)..(291): Homolog of NCBI NO: 22329512 NR Description: hypothetical protein
  misc_feature (1)..(294): Homolog of NCBI NO: 37572986 NR Description: putative mandelonitrile lyase
  misc_feature (1)..(294): Homolog of NCBI NO: 18410230 NR Description: expressed protein
  misc_feature (1)..(294): Homolog of NCBI NO: 11357159 NR Description: adhesion of calyx edges protein ACE
MLMLSGIGPKKELQRLKIPVVLENEHVGKGMADNPMNTILVPSKAPIEQSLIQTVGITKMGVYVEASTGFGQSPESIHTHYGIMSNKNELFSTIPAKQRRPEATQAYITRNKYQLHEAFNGSFILEKLAYPISRGHLSLVNTNVDDNPSVTFNYFKHPVDLQRCVEAIRLVSKVVTSKRFLNYTQCDKQNVHKMLSLSVKANINLRPKQLNDTKSMAQFCKDTVVTIWHYHGGCLVGKVVSPNRKVLGVDRLRVIDGSTFDESPGTNPQATMMMMGRYMGVKILRERLGNKAGV

SEQ ID NO: 24582 - protein, 292 aa, Arabidopsis thaliana
  peptide (1)..(292): Ceres Seq. ID no. 12396184
  misc_feature (74)..(277): Pfam Name: GMC oxidoreductase Pfam Description: GMC oxidoreductase
  misc_feature (1)..(292): Homolog of NCBI NO: 18410230 NR Description: expressed protein
  misc_feature (1)..(275): Homolog of NCBI NO: 10177730 NR Description: mandelonitrile lyase-like protein [Arabidopsis
  misc_feature (1)..(289): Homolog of NCBI NO: 15242236 NR Description: mandelonitrile lyase-like protein
  misc_feature (1)..(289): Homolog of NCBI NO: 8778640 NR Description: F5O11.31 [Arabidopsis thaliana]
  misc_feature (1)..(289): Homolog of NCBI NO: 22329512 NR Description: hypothetical protein
  misc_feature (1)..(292): Homolog of NCBI NO: 37572986 NR Description: putative mandelonitrile lyase
  misc_feature (1)..(289): Homolog of NCBI NO: 17978954 NR Description: At1g12570/T12C24_9 [Arabidopsis thaliana]
  misc_feature (1)..(289): Homolog of NCBI NO: 9502391 NR Description: T12C24.11 [Arabidopsis thaliana]
  misc_feature (1)..(285): Homolog of NCBI NO: 11358959 NR Description: probable mandelonitrile lyase (EC 4.1.2.10)
  misc_feature (1)..(292): Homolog of NCBI NO: 11357159 NR Description: adhesion of calyx edges protein ACE
MLSGIGPKKELQRLKIPVVLENEHVGKGMADNPMNTILVPSKAPIEQSLIQTVGITKMGVYVEASTGFGQSPESIHTHYGIMSNKNELFSTIPAKQRRPEATQAYITRNKYQLHEAFNGSFILEKLAYPISRGHLSLVNTNVDDNPSVTFNYFKHPVDLQRCVEAIRLVSKVVTSKRFLNYTQCDKQNVHKMLSLSVKANINLRPKQLNDTKSMAQFCKDTVVTIWHYHGGCLVGKVVSPNRKVLGVDRLRVIDGSTFDESPGTNPQATMMMMGRYMGVKILRERLGNKAGV

SEQ ID NO: 24583 - DNA, 1390 bp, Arabidopsis thaliana
  misc_feature (1)..(1390): Ceres Seq. ID no. 12338463
  misc_feature: MA Experiment ID: 20000184 Result: Down-regulated in Transcription
  misc_feature: MA Experiment 20000184 PARAMETER Experiment Name: At_Shoots__P Parameter: Age (day) Value: 7
  misc_feature: MA Experiment 20000184 PARAMETER Experiment Name: At_Shoots__P Parameter: Tissue Value: Shoots vs. Whole Plant
  misc_feature: MA Experiment ID: 20000185 Result: Down-regulated in Transcription
  misc_feature: MA Experiment 20000185 PARAMETER Experiment Name: At_Roots__P Parameter: Age (day) Value: 7 vs. 21
  misc_feature: MA Experiment 20000185 PARAMETER Experiment Name: At_Roots__P Parameter: Organism Value: A. thaliana
  misc_feature: MA Experiment 20000185 PARAMETER Experiment Name: At_Roots__P Parameter: Tissue Value: Roots vs. Whole Plant
  misc_feature: MA Experiment ID: 20000224 Result: Up-regulated in Transcription
  misc_feature: MA Experiment ID: 20000439 Result: Down-regulated in Transcription
  misc_feature: MA Experiment 20000439 PARAMETER Experiment Name: At_Roots__P Parameter: Age (day) Value: 14 vs. 21
  misc_feature: MA Experiment 20000439 PARAMETER Experiment Name: At_Roots__P Parameter: Organism Value: A. thaliana
  misc_feature: MA Experiment 20000439 PARAMETER Experiment Name: At_Roots__P Parameter: Tissue Value: Roots vs. Whole Plant
  misc_feature: Phenotype: WHOLE PLANT Color-Yellow-Green Viable 1
  misc_feature: Phenotype: WHOLE PLANT Color-Yellow-Green Viable 1
  misc_feature: Phenotype: WHOLE PLANT Color-Yellow-Green Viable 1
  misc_feature: Phenotype: WHOLE PLANT Color-Yellow-Green Viable 1
  misc_feature: Phenotype: WHOLE PLANT Color-Yellow-Green Viable 1
  misc_feature: Phenotype: WHOLE PLANT Color-Yellow-Green Viable 1
  misc_feature: Phenotype: WHOLE PLANT Color-Yellow-Green Viable 1
  misc_feature: Phenotype: WHOLE PLANT Color-Yellow-Green Viable 1
  misc_feature: Phenotype: WHOLE PLANT Color-Yellow-Green Viable 1
  misc_feature: Phenotype: WHOLE PLANT Color-Yellow-Green Viable 1
aaaaaaatcccaaaaagcttcgttcttttttagtcatcatcatcttcttcttttcttcttcttcggttgctaaatcggagatggcgactgctctggtttctcctcttacttcacaactcaaccatgaagctgtctgttccaagtttgtgttacccaaatcgccgttcatatcgggatctaagctcttttcatcgaacatgccttgctctactgttcctagacgcacaagaagatcacactgctttgcttctgctaaagatatgagctttgaccatatccctaaacaatttcgtggagacaatctcaaagacggagtgatgcagaacttcaagaacgtaccgcaatatttttacgggcttaattcagctcaaatggatatgttcatgacagaagatagccctgtccgtaggcaagcggaaaaagttacagaggaaagcatctcgtctagaaataactatttgaacaatggaggaatatggagtatatccggtatgaatgcagcagatgctagaagatatagcatgagtgtccagatgtacagaggtggaggtggcggcggaggatctgaaagaccaagaactgctcctccagatttgccttctttgctattggatgctcgcatatgctaccttggcatgccaatcgtacctgcagttactgagttactcgttgctcaatttatgtggttagactatgataacccaacaaagcccatctacctatatataaattcacccgggacccagaatgagaagatggaaactgttggatcagaaacagaggcttatgccatagccgatactatttcttattgcaaatcagatgtatacactatcaattgtggcatggcttttggtcaagcagcaatgcttctttctctcgggaaaaaaggttatcgtgccgtacaaccacattcatcaacaaaattatatctgccaaaagtaaacagatcgagtggagctgccatagacatgtggataaaggccaaggaacttgatgcaaataccgagtactacatcgagctgttagctaagggaacagggaaatccaaagagcagatcaacgaggacatcaagcgacctaaatatctccaagctcaagcagccattgactatggaattgcagacaagatagctgactcgcaggacagttctttcgagaaacgggattacgatgggacccttgcccagagagctatgagacctggaggaggcagtccagcagctccagccggactaagatgatcaattcccaccagaaagaaagaggttgaatcctaatttcctagtcactctggaatatgtagctcttacaatctataagcaaacacatgtggtagtaacatacaaaaaagtgttggcaaaaagggaaataacatcaaaagttatcc

SEQ ID NO: 24584 - protein, 413 aa, Arabidopsis thaliana
  peptide (1)..(413): Ceres Seq. ID no. 12338464
  misc_feature (186)..(381): Pfam Name: Clp protease Pfam Description: Clp protease
  misc_feature (186)..(381): Pfam Name: Clp protease Pfam Description: Clp protease
  misc_feature (186)..(381): Homolog of NCBI NO: 33866182 NR Description: ATP-dependent Clp protease proteolytic subunit 4
  misc_feature (186)..(381): Homolog of NCBI NO: 33862588 NR Description: Clp protease proteolytic subunit
  misc_feature (187)..(382): Homolog of NCBI NO: 23126723 NR Description: hypothetical protein [Nostoc punctiforme]
  misc_feature (186)..(381): Homolog of NCBI NO: 33861869 NR Description: Clp protease proteolytic subunit
  misc_feature (187)..(382): Homolog of NCBI NO: 17231850 NR Description: ATP-dependent Clp protease proteolytic subunit
  misc_feature (186)..(381): Homolog of NCBI NO: 33866182 NR Description: ATP-dependent Clp protease proteolytic subunit 4
  misc_feature (187)..(382): Homolog of NCBI NO: 23126723 NR Description: hypothetical protein [Nostoc punctiforme]
  misc_feature (187)..(382): Homolog of NCBI NO: 17231850 NR Description: ATP-dependent Clp protease proteolytic subunit
  misc_feature (27)..(413): Homolog of NCBI NO: 18402863 NR Description: ATP-dependent Clp protease proteolytic subunit
  misc_feature (195)..(390): Homolog of NCBI NO: 13812146 NR Description: ATP-dependent Clp protease proteolytic subunit
  misc_feature (192)..(381): Homolog of NCBI NO: 22299302 NR Description: ATP-dependent Clp protease proteolytic subunit 3
  misc_feature (190)..(377): Homolog of NCBI NO: 18390982 NR Description: ATP-dependent Clp protease proteolytic subunit
  misc_feature (186)..(381): Homolog of NCBI NO: 33240836 NR Description: Protease subunit of ATP-dependent Clp protease
  misc_feature (186)..(381): Homolog of NCBI NO: 33861869 NR Description: Clp protease proteolytic subunit
  misc_feature (186)..(381): Homolog of NCBI NO: 33862588 NR Description: Clp protease proteolytic subunit
  misc_feature (186)..(381): Homolog of NCBI NO: 33240836 NR Description: Protease subunit of ATP-dependent Clp protease
  misc_feature (190)..(377): Homolog of NCBI NO: 18390982 NR Description: ATP-dependent Clp protease proteolytic subunit
  misc_feature (192)..(381): Homolog of NCBI NO: 22299302 NR Description: ATP-dependent Clp protease proteolytic subunit 3
  misc_feature (195)..(390): Homolog of NCBI NO: 13812146 NR Description: ATP-dependent Clp protease proteolytic subunit
  misc_feature (27)..(413): Homolog of NCBI NO: 18402863 NR Description: ATP-dependent Clp protease proteolytic subunit
KNPKKLRSFLVIIIFFFSSSSVAKSEMATALVSPLTSQLNHEAVCSKFVLPKSPFISGSKLFSSNMPCSTVPRRTRRSHCFASAKDMSFDHIPKQFRGDNLKDGVMQNFKNVPQYFYGLNSAQMDMFMTEDSPVRRQAEKVTEESISSRNNYLNNGGIWSISGMNAADARRYSMSVQMYRGGGGGGGSERPRTAPPDLPSLLLDARICYLGMPIVPAVTELLVAQFMWLDYDNPTKPIYLYINSPGTQNEKMETVGSETEAYAIADTISYCKSDVYTINCGMAFGQAAMLLSLGKKGYRAVQPHSSTKLYLPKVNRSSGAAIDMWIKAKELDANTEYYIELLAKGTGKSKEQINEDIKRPKYLQAQAAIDYGIADKIADSQDSSFEKRDYDGTLAQRAMRPGGGSPAAPAGLR

SEQ ID NO: 24585 - protein, 387 aa, Arabidopsis thaliana
  peptide (1)..(387): Ceres Seq. ID no. 12338466
  misc_feature (160)..(355): Pfam Name: Clp protease Pfam Description: Clp protease
  misc_feature (160)..(355): Pfam Name: Clp protease Pfam Description: Clp protease
  misc_feature (160)..(355): Homolog of NCBI NO: 33866182 NR Description: ATP-dependent Clp protease proteolytic subunit 4
  misc_feature (160)..(355): Homolog of NCBI NO: 33862588 NR Description: Clp protease proteolytic subunit
  misc_feature (161)..(356): Homolog of NCBI NO: 23126723 NR Description: hypothetical protein [Nostoc punctiforme]
  misc_feature (160)..(355): Homolog of NCBI NO: 33861869 NR Description: Clp protease proteolytic subunit
  misc_feature (161)..(356): Homolog of NCBI NO: 17231850 NR Description: ATP-dependent Clp protease proteolytic subunit
  misc_feature (160)..(355): Homolog of NCBI NO: 33866182 NR Description: ATP-dependent Clp protease proteolytic subunit 4
  misc_feature (161)..(356): Homolog of NCBI NO: 23126723 NR Description: hypothetical protein [Nostoc punctiforme]
  misc_feature (161)..(356): Homolog of NCBI NO: 17231850 NR Description: ATP-dependent Clp protease proteolytic subunit
  misc_feature (1)..(387): Homolog of NCBI NO: 18402863 NR Description: ATP-dependent Clp protease proteolytic subunit
  misc_feature (169)..(364): Homolog of NCBI NO: 13812146 NR Description: ATP-dependent Clp protease proteolytic subunit
  misc_feature (166)..(355): Homolog of NCBI NO: 22299302 NR Description: ATP-dependent Clp protease proteolytic subunit 3
  misc_feature (164)..(351): Homolog of NCBI NO: 18390982 NR Description: ATP-dependent Clp protease proteolytic subunit
  misc_feature (160)..(355): Homolog of NCBI NO: 33240836 NR Description: Protease subunit of ATP-dependent Clp protease
  misc_feature (160)..(355): Homolog of NCBI NO: 33861869 NR Description: Clp protease proteolytic subunit
  misc_feature (160)..(355): Homolog of NCBI NO: 33862588 NR Description: Clp protease proteolytic subunit
  misc_feature (160)..(355): Homolog of NCBI NO: 33240836 NR Description: Protease subunit of ATP-dependent Clp protease
  misc_feature (164)..(351): Homolog of NCBI NO: 18390982 NR Description: ATP-dependent Clp protease proteolytic subunit
  misc_feature (166)..(355): Homolog of NCBI NO: 22299302 NR Description: ATP-dependent Clp protease proteolytic subunit 3
  misc_feature (169)..(364): Homolog of NCBI NO: 13812146 NR Description: ATP-dependent Clp protease proteolytic subunit
  misc_feature (1)..(387): Homolog of NCBI NO: 18402863 NR Description: ATP-dependent Clp protease proteolytic subunit
MATALVSPLTSQLNHEAVCSKFVLPKSPFISGSKLFSSNMPCSTVPRRTRRSHCFASAKDMSFDHIPKQFRGDNLKDGVMQNFKNVPQYFYGLNSAQMDMFMTEDSPVRRQAEKVTEESISSRNNYLNNGGIWSISGMNAADARRYSMSVQMYRGGGGGGGSERPRTAPPDLPSLLLDARICYLGMPIVPAVTELLVAQFMWLDYDNPTKPIYLYINSPGTQNEKMETVGSETEAYAIADTISYCKSDVYTINCGMAFGQAAMLLSLGKKGYRAVQPHSSTKLYLPKVNRSSGAAIDMWIKAKELDANTEYYIELLAKGTGKSKEQINEDIKRPKYLQAQAAIDYGIADKIADSQDSSFEKRDYDGTLAQRAMRPGGGSPAAPAGLR

SEQ ID NO: 24586 - protein, 348 aa, Arabidopsis thaliana
  peptide (1)..(348): Ceres Seq. ID no. 12338467
  misc_feature (121)..(316): Pfam Name: Clp protease Pfam Description: Clp protease
  misc_feature (121)..(316): Pfam Name: Clp protease Pfam Description: Clp protease
  misc_feature (121)..(316): Homolog of NCBI NO: 33866182 NR Description: ATP-dependent Clp protease proteolytic subunit 4
  misc_feature (121)..(316): Homolog of NCBI NO: 33862588 NR Description: Clp protease proteolytic subunit
  misc_feature (122)..(317): Homolog of NCBI NO: 23126723 NR Description: hypothetical protein [Nostoc punctiforme]
  misc_feature (121)..(316): Homolog of NCBI NO: 33861869 NR Description: Clp protease proteolytic subunit
  misc_feature (122)..(317): Homolog of NCBI NO: 17231850 NR Description: ATP-dependent Clp protease proteolytic subunit
  misc_feature (121)..(316): Homolog of NCBI NO: 33866182 NR Description: ATP-dependent Clp protease proteolytic subunit 4
  misc_feature (122)..(317): Homolog of NCBI NO: 23126723 NR Description: hypothetical protein [Nostoc punctiforme]
  misc_feature (122)..(317): Homolog of NCBI NO: 17231850 NR Description: ATP-dependent Clp protease proteolytic subunit
  misc_feature (1)..(348): Homolog of NCBI NO: 18402863 NR Description: ATP-dependent Clp protease proteolytic subunit
  misc_feature (130)..(325): Homolog of NCBI NO: 13812146 NR Description: ATP-dependent Clp protease proteolytic subunit
  misc_feature (127)..(316): Homolog of NCBI NO: 22299302 NR Description: ATP-dependent Clp protease proteolytic subunit 3
  misc_feature (125)..(312): Homolog of NCBI NO: 18390982 NR Description: ATP-dependent Clp protease proteolytic subunit
  misc_feature (121)..(316): Homolog of NCBI NO: 33240836 NR Description: Protease subunit of ATP-dependent Clp protease
  misc_feature (121)..(316): Homolog of NCBI NO: 33861869 NR Description: Clp protease proteolytic subunit
  misc_feature (121)..(316): Homolog of NCBI NO: 33862588 NR Description: Clp protease proteolytic subunit
  misc_feature (121)..(316): Homolog of NCBI NO: 33240836 NR Description: Protease subunit of ATP-dependent Clp protease
  misc_feature (125)..(312): Homolog of NCBI NO: 18390982 NR Description: ATP-dependent Clp protease proteolytic subunit
  misc_feature (127)..(316): Homolog of NCBI NO: 22299302 NR Description: ATP-dependent Clp protease proteolytic subunit 3
  misc_feature (130)..(325): Homolog of NCBI NO: 13812146 NR Description: ATP-dependent Clp protease proteolytic subunit
  misc_feature (1)..(348): Homolog of NCBI NO: 18402863 NR Description: ATP-dependent Clp protease proteolytic subunit
MPCSTVPRRTRRSHCFASAKDMSFDHIPKQFRGDNLKDGVMQNFKNVPQYFYGLNSAQMDMFMTEDSPVRRQAEKVTEESISSRNNYLNNGGIWSISGMNAADARRYSMSVQMYRGGGGGGGSERPRTAPPDLPSLLLDARICYLGMPIVPAVTELLVAQFMWLDYDNPTKPIYLYINSPGTQNEKMETVGSETEAYAIADTISYCKSDVYTINCGMAFGQAAMLLSLGKKGYRAVQPHSSTKLYLPKVNRSSGAAIDMWIKAKELDANTEYYIELLAKGTGKSKEQINEDIKRPKYLQAQAAIDYGIADKIADSQDSSFEKRDYDGTLAQRAMRPGGGSPAAPAGLR

SEQ ID NO: 24587 - DNA, 1302 bp, Arabidopsis thaliana
  misc_feature (1)..(1302): Ceres Seq. ID no. 13487771
  misc_feature: MA Experiment ID: 20000184 Result: Down-regulated in Transcription
  misc_feature: MA Experiment 20000184 PARAMETER Experiment Name: At_Shoots__P Parameter: Age (day) Value: 7
  misc_feature: MA Experiment 20000184 PARAMETER Experiment Name: At_Shoots__P Parameter: Tissue Value: Shoots vs. Whole Plant
  misc_feature: Phenotype: ROSETTE LEAVES Curled-Curled 4
  misc_feature: Phenotype: ROSETTE LEAVES Other
  misc_feature: Phenotype: ROSETTE LEAVES Curled-Curled 4
  misc_feature: Phenotype: ROSETTE LEAVES Other
  misc_feature: Phenotype: ROSETTE LEAVES Curled-Curled 4
  misc_feature: Phenotype: ROSETTE LEAVES Other
  misc_feature: Phenotype: ROSETTE LEAVES Curled-Curled 4
  misc_feature: Phenotype: ROSETTE LEAVES Other
  misc_feature: Phenotype: ROSETTE LEAVES Curled-Curled 4
  misc_feature: Phenotype: ROSETTE LEAVES Other
gatcggtcccttttgttttatcgttttagggtttgtagctcctttctctttttttcttttctcaatttcccccaaattaaaaaaaaactctctctttcagagatttacaaatttcatttctccaaatccgaaaccccaaagtgaatatttttccttctgggtttcttttgtttgcctggaaacatttgtctcagattttgattttgaccggagtactcatattctccggcgatttctccggcgacatcgtctgtgaaatggagggaattactcatccaatacctcgtactgttgaagaggtctttagcgacttcagaggtcgacgagctggtcttattaaagctctcactaatgatatggtgaagttttaccaaacgtgtgatcctgagaaggagaatttgtgtctctatggacttccaaatgagacatgggaggttaatctacccgttgaggaagttcctcctgagcttcctgaaccagctttaggcatcaatttcgctagagacggaatgcaagaaaaggactgggtatctttggtcgcagttcacagtgattcatggctgctttctgttgcattttactttggtgcacgtttcggatttggcaagaatgagaggaagaggctgttccagatgattaatgagctgccaaccattttcgaagttgtgagcggcaatgcaaagcagtccaaggatctatctgttaacaacaataatagcaaaagcaaacctagtggcgtcaagtctcgccaatccgaatctctcacaaaggttgcaaagatgtcatctccaccgccaaaagaagaagaagaagaagaagatgagagtgaagatgagagtgaagacgatgaacaaggtgcggtttgtggtgcttgtggagacaactacggtacagatgagttctggatttgctgcgacgcctgtgagaaatggttccatggaaaatgtgtgaagataacacctgcaaaagcagaacacatcaagcattacaaatgcccaacttgcagtaacaagagagccagaccttgaagttaaataaccaaattataagaaggtaaagtgagttaggagaaaattgtgaaagaagaaggtgaagtttccagtttataagaaatgccagtaaaagggactagaagatgtaagcaggtaaaaaatatttgtattgcttaatctttattgttggattgagactatttacagttggtgatgtcttttcttttctttttttttggatttttgttgttgttaatgttaattctactmctaatttgtttggtctgtttaagatattttagttctgatt

SEQ ID NO: 24588 - protein, 256 aa, Arabidopsis thaliana
  peptide (1)..(256): Ceres Seq. ID no. 15220487
  misc_feature (202)..(252): Pfam Name: PHD-finger Pfam Description: PHD-finger
  misc_feature (10)..(255): Homolog of NCBI NO: 34907474 NR Description: nucleic acid binding protein
  misc_feature (9)..(255): Homolog of NCBI NO: 15229157 NR Description: nucleic acid binding protein-related [Arabidopsis
  misc_feature (1)..(256): Homolog of NCBI NO: 30687843 NR Description: zinc finger protein - like [Arabidopsis thaliana]
  misc_feature (9)..(255): Homolog of NCBI NO: 15239624 NR Description: nucleic acid binding protein - like [Arabidopsis
  misc_feature (1)..(255): Homolog of NCBI NO: 7488751 NR Description: probable zinc finger protein - alfalfa (fragment)
  misc_feature (1)..(31): Homolog of NCBI NO: 25346630 NR Description: F14L17.29 protein - Arabidopsis thaliana
  misc_feature (36)..(253): Homolog of NCBI NO: 25346630 NR Description: F14L17.29 protein - Arabidopsis thaliana
  misc_feature (1)..(253): Homolog of NCBI NO: 15223786 NR Description: nucleic acid binding protein (alfin-1) -related
  misc_feature (1)..(256): Homolog of NCBI NO: 15226967 NR Description: PHD-type zinc finger protein -related
  misc_feature (1)..(256): Homolog of NCBI NO: 21593407 NR Description: putative PHD-type zinc finger protein
MEGITHPIPRTVEEVFSDFRGRRAGLIKALTNDMVKFYQTCDPEKENLCLYGLPNETWEVNLPVEEVPPELPEPALGINFARDGMQEKDWVSLVAVHSDSWLLSVAFYFGARFGFGKNERKRLFQMINELPTIFEVVSGNAKQSKDLSVNNNNSKSKPSGVKSRQSESLTKVAKMSSPPPKEEEEEEDESEDESEDDEQGAVCGACGDNYGTDEFWICCDACEKWFHGKCVKITPAKAEHIKHYKCPTCSNKRARP

SEQ ID NO: 24589 - protein, 223 aa, Arabidopsis thaliana
  peptide (1)..(223): Ceres Seq. ID no. 15220488
  misc_feature (169)..(219): Pfam Name: PHD-finger Pfam Description: PHD-finger
  misc_feature (1)..(222): Homolog of NCBI NO: 4091080 NR Description: nucleic acid binding protein [Oryza sativa]
  misc_feature (1)..(222): Homolog of NCBI NO: 34907474 NR Description: nucleic acid binding protein
  misc_feature (1)..(222): Homolog of NCBI NO: 15229157 NR Description: nucleic acid binding protein-related [Arabidopsis
  misc_feature (1)..(223): Homolog of NCBI NO: 30687843 NR Description: zinc finger protein - like [Arabidopsis thaliana]
  misc_feature (1)..(222): Homolog of NCBI NO: 15239624 NR Description: nucleic acid binding protein - like [Arabidopsis
  misc_feature (1)..(222): Homolog of NCBI NO: 7488751 NR Description: probable zinc finger protein - alfalfa (fragment)
  misc_feature (3)..(220): Homolog of NCBI NO: 25346630 NR Description: F14L17.29 protein - Arabidopsis thaliana
  misc_feature (1)..(220): Homolog of NCBI NO: 15223786 NR Description: nucleic acid binding protein (alfin-1) -related
  misc_feature (1)..(223): Homolog of NCBI NO: 15226967 NR Description: PHD-type zinc finger protein -related
  misc_feature (1)..(223): Homolog of NCBI NO: 21593407 NR Description: putative PHD-type zinc finger protein
MVKFYQTCDPEKENLCLYGLPNETWEVNLPVEEVPPELPEPALGINFARDGMQEKDWVSLVAVHSDSWLLSVAFYFGARFGFGKNERKRLFQMINELPTIFEVVSGNAKQSKDLSVNNNNSKSKPSGVKSRQSESLTKVAKMSSPPPKEEEEEEDESEDESEDDEQGAVCGACGDNYGTDEFWICCDACEKWFHGKCVKITPAKAEHIKHYKCPTCSNKRARP

SEQ ID NO: 24590 - protein, 172 aa, Arabidopsis thaliana
  peptide (1)..(172): Ceres Seq. ID no. 15220489
  misc_feature (118)..(168): Pfam Name: PHD-finger Pfam Description: PHD-finger
  misc_feature (1)..(171): Homolog of NCBI NO: 4091080 NR Description: nucleic acid binding protein [Oryza sativa]
  misc_feature (1)..(171): Homolog of NCBI NO: 34907474 NR Description: nucleic acid binding protein
  misc_feature (1)..(171): Homolog of NCBI NO: 15229157 NR Description: nucleic acid binding protein-related [Arabidopsis
  misc_feature (1)..(172): Homolog of NCBI NO: 30687843 NR Description: zinc finger protein - like [Arabidopsis thaliana]
  misc_feature (1)..(171): Homolog of NCBI NO: 15239624 NR Description: nucleic acid binding protein - like [Arabidopsis
  misc_feature (1)..(171): Homolog of NCBI NO: 7488751 NR Description: probable zinc finger protein - alfalfa (fragment)
  misc_feature (1)..(169): Homolog of NCBI NO: 25346630 NR Description: F14L17.29 protein - Arabidopsis thaliana
  misc_feature (1)..(169): Homolog of NCBI NO: 15223786 NR Description: nucleic acid binding protein (alfin-1) -related
  misc_feature (1)..(172): Homolog of NCBI NO: 15226967 NR Description: PHD-type zinc finger protein -related
  misc_feature (1)..(172): Homolog of NCBI NO: 21593407 NR Description: putative PHD-type zinc finger protein
MQEKDWVSLVAVHSDSWLLSVAFYFGARFGFGKNERKRLFQMINELPTIFEVVSGNAKQSKDLSVNNNNSKSKPSGVKSRQSESLTKVAKMSSPPPKEEEEEEDESEDESEDDEQGAVCGACGDNYGTDEFWICCDACEKWFHGKCVKITPAKAEHIKHYKCPTCSNKRARP

SEQ ID NO: 24591 - DNA, 1561 bp, Arabidopsis thaliana
  misc_feature (1)..(1561): Ceres Seq. ID no. 13491567
  misc_feature: MA Experiment ID: 108462 Result: Down-regulated in Transcription
  misc_feature: MA Experiment 108462 PARAMETER Experiment Name: At_Germinating_Seeds_cDNA_P Parameter: Age (day) Value: 2 vs. 0
  misc_feature: MA Experiment 108462 PARAMETER Experiment Name: At_Germinating_Seeds_cDNA_P Parameter: Tissue Value: Germinating Seeds
  misc_feature: MA Experiment ID: 108463 Result: Down-regulated in Transcription
  misc_feature: MA Experiment 108463 PARAMETER Experiment Name: At_Germinating_Seeds_cDNA_P Parameter: Age (day) Value: 3 vs. 0
  misc_feature: MA Experiment 108463 PARAMETER Experiment Name: At_Germinating_Seeds_cDNA_P Parameter: Tissue Value: Germinating Seeds
  misc_feature: MA Experiment ID: 108464 Result: Down-regulated in Transcription
  misc_feature: MA Experiment 108464 PARAMETER Experiment Name: At_Germinating_Seeds_cDNA_P Parameter: Age (day) Value: 4 vs. 0
  misc_feature: MA Experiment 108464 PARAMETER Experiment Name: At_Germinating_Seeds_cDNA_P Parameter: Tissue Value: Germinating Seeds
  misc_feature: MA Experiment ID: 20001560 Result: Up-regulated in Transcription
  misc_feature: MA Experiment 20001560 PARAMETER Experiment Name: At_Drought_Soil_Dry_P Parameter: Age (day) Value: 28
  misc_feature: MA Experiment 20001560 PARAMETER Experiment Name: At_Drought_Soil_Dry_P Parameter: Organism Value: A. thaliana
  misc_feature: MA Experiment 20001560 PARAMETER Experiment Name: At_Drought_Soil_Dry_P Parameter: Plant Line Value: WS
  misc_feature: MA Experiment 20001560 PARAMETER Experiment Name: At_Drought_Soil_Dry_P Parameter: Post Timepoint (hr) Value: None
  misc_feature: MA Experiment 20001560 PARAMETER Experiment Name: At_Drought_Soil_Dry_P Parameter: Post-Treatment Value: None
  misc_feature: MA Experiment 20001560 PARAMETER Experiment Name: At_Drought_Soil_Dry_P Parameter: Timepoint (day) Value: 14
  misc_feature: MA Experiment 20001560 PARAMETER Experiment Name: At_Drought_Soil_Dry_P Parameter: Treatment Value: Drought vs. No Drought
aaactaatacgcattgagtttcgttgctttctcggggaaaatctctttgtaactaaacttttatgtacctaccaaaaatcttatgatgagattcttcaagaccgaccatagattgttacatcgaatcattgggtacacaagaccattccacggtctagctaaaacccaaaacggtgagatcgctagaccaggtttggttgatccaagctcgcacccgtggcccgagtggctagatttaatggggatgctagcgaaaaaaggttactttgaagaaagcttgattccattgatgagttccaaggaatctaatcatattcgtacagcttgtctcaatttcgcccgccatcgtttcactctcgttagaaacctgtcaaagaaagatatcaaagtgattgctgggtgtggttgtccaagcactgataggaaggtcgtgaactcaggaaagcgtctaagagcttatgttggcattgatgaaagaaatgtgtgtggctcttgcaacttgagagggaaatgtgaaagggcgtatgcacaagcacgagatgatgaaggtgctcgaactatagatgtcatgcgtttactgctaacttacgggcttgattccatttctcctactgtggagaatcgtgcctgtcaaaccaaacttgttgaagattctgtgaggaagttgctcagagaaagtgtagcgtatagcttaacagattttgaatctgctgagactgagacagctggagatgagctccagccaaattcacaggacattgatgaaagagatccacgaaaaaggccaggggattggtattgtacagaatgcaagtttctaaattttgcgaaaaacataagatgcttgcgatgtgatgttttttctgaggaaaggcttaaacagttgaaggaagaacaaaaagatcatctcccactgaagaaaggagattggatttgtcaaacatgtaatttcctgaacttttcgaaaaacacgagatgcttaagatgcaaagacaagcctacattgcgtcaaatcaatcccggagagtgggaatgcgagtcgtgcaattacatcaattttagaagaaactctatatgtttgaagtgtgatcacaagagacaaaaggctgcaaacgtcactccggattcaaagacagttgctgatcgtcaaagcggagttacaaagacgtggagctttgtagaagaagagagtgtaaaacgatgcaatggcgaagaagaggaagaagaagatggtttcatgggatttccagtagagggagggagaagcaatgtttcaaagagcgcagaaaagagagagcaatggaagttggagatgacacagagaattagaagcaatgggactaaagcgaaaaaagatgataatacgaagaacgaaacagagtcaaaatgttatgatcggagaagaaatgaacttcttggtaacattagtgatgatggagagatggatgattggtttgtttcaaaacaagatagatcgacttaaattgaatttataaatttgtaaccacatccatctgtttgtttcttctagtgttttattattggttcattggttggtttg

SEQ ID NO: 24592 - protein, 466 aa, Arabidopsis thaliana
  peptide (1)..(466): Ceres Seq. ID no. 13491568
  misc_feature (312)..(341): Pfam Name: Zn-finger in Ran binding protein and others Pfam Description: Zn-finger in Ran binding protein and others
  misc_feature (312)..(341): Pfam Name: Zn-finger in Ran binding protein and others Pfam Description: Zn-finger in Ran binding protein and others
  misc_feature (30)..(63): Homolog of NCBI NO: 15293147 NR Description: unknown protein [Arabidopsis thaliana]
  misc_feature (48)..(305): Homolog of NCBI NO: 18405190 NR Description: expressed protein [Arabidopsis thaliana]
  misc_feature (48)..(305): Homolog of NCBI NO: 15293147 NR Description: unknown protein [Arabidopsis thaliana]
  misc_feature (31)..(73): Homolog of NCBI NO: 13702809 NR Description: putative ARP protein [Oryza sativa]
  misc_feature (72)..(401): Homolog of NCBI NO: 13702809 NR Description: putative ARP protein [Oryza sativa]
  misc_feature (1)..(305): Homolog of NCBI NO: 25372841 NR Description: hypothetical protein F5A18.17 [imported] -
  misc_feature (30)..(63): Homolog of NCBI NO: 15293147 NR Description: unknown protein [Arabidopsis thaliana]
  misc_feature (271)..(466): Homolog of NCBI NO: 25372841 NR Description: hypothetical protein F5A18.17 [imported] -
  misc_feature (29)..(451): Homolog of NCBI NO: 13324787 NR Description: hypothetical protein [Oryza sativa]
  misc_feature (72)..(401): Homolog of NCBI NO: 13702809 NR Description: putative ARP protein [Oryza sativa]
  misc_feature (31)..(73): Homolog of NCBI NO: 13702809 NR Description: putative ARP protein [Oryza sativa]
  misc_feature (48)..(305): Homolog of NCBI NO: 15293147 NR Description: unknown protein [Arabidopsis thaliana]
  misc_feature (48)..(305): Homolog of NCBI NO: 18405190 NR Description: expressed protein [Arabidopsis thaliana]
  misc_feature (1)..(466): Homolog of NCBI NO: 18409643 NR Description: expressed protein [Arabidopsis thaliana]
  misc_feature (1)..(466): Homolog of NCBI NO: 21593408 NR Description: unknown [Arabidopsis thaliana]
  misc_feature (29)..(451): Homolog of NCBI NO: 13324787 NR Description: hypothetical protein [Oryza sativa]
  misc_feature (271)..(466): Homolog of NCBI NO: 25372841 NR Description: hypothetical protein F5A18.17 [imported] -
  misc_feature (1)..(305): Homolog of NCBI NO: 25372841 NR Description: hypothetical protein F5A18.17 [imported] -
  misc_feature (1)..(466): Homolog of NCBI NO: 21593408 NR Description: unknown [Arabidopsis thaliana]
  misc_feature (1)..(466): Homolog of NCBI NO: 18409643 NR Description: expressed protein [Arabidopsis thaliana]
MMRFFKTDHRLLHRIIGYTRPFHGLAKTQNGEIARPGLVDPSSHPWPEWLDLMGMLAKKGYFEESLIPLMSSKESNHIRTACLNFARHRFTLVRNLSKKDIKVIAGCGCPSTDRKVVNSGKRLRAYVGIDERNVCGSCNLRGKCERAYAQARDDEGARTIDVMRLLLTYGLDSISPTVENRACQTKLVEDSVRKLLRESVAYSLTDFESAETETAGDELQPNSQDIDERDPRKRPGDWYCTECKFLNFAKNIRCLRCDVFSEERLKQLKEEQKDHLPLKKGDWICQTCNFLNFSKNTRCLRCKDKPTLRQINPGEWECESCNYINFRRNSICLKCDHKRQKAANVTPDSKTVADRQSGVTKTWSFVEEESVKRCNGEEEEEEDGFMGFPVEGGRSNVSKSAEKREQWKLEMTQRIRSNGTKAKKDDNTKNETESKCYDRRRNELLGNISDDGEMDDWFVSKQDRST

SEQ ID NO: 24593 - protein, 465 aa, Arabidopsis thaliana
  peptide (1)..(465): Ceres Seq. ID no. 13491569
  misc_feature (311)..(340): Pfam Name: Zn-finger in Ran binding protein and others Pfam Description: Zn-finger in Ran binding protein and others
  misc_feature (311)..(340): Pfam Name: Zn-finger in Ran binding protein and others Pfam Description: Zn-finger in Ran binding protein and others
  misc_feature (29)..(62): Homolog of NCBI NO: 15293147 NR Description: unknown protein [Arabidopsis thaliana]
  misc_feature (47)..(304): Homolog of NCBI NO: 18405190 NR Description: expressed protein [Arabidopsis thaliana]
  misc_feature (47)..(304): Homolog of NCBI NO: 15293147 NR Description: unknown protein [Arabidopsis thaliana]
  misc_feature (30)..(72): Homolog of NCBI NO: 13702809 NR Description: putative ARP protein [Oryza sativa]
  misc_feature (71)..(400): Homolog of NCBI NO: 13702809 NR Description: putative ARP protein [Oryza sativa]
  misc_feature (29)..(62): Homolog of NCBI NO: 15293147 NR Description: unknown protein [Arabidopsis thaliana]
  misc_feature (47)..(304): Homolog of NCBI NO: 15293147 NR Description: unknown protein [Arabidopsis thaliana]
  misc_feature (71)..(400): Homolog of NCBI NO: 13702809 NR Description: putative ARP protein [Oryza sativa]
  misc_feature (1)..(465): Homolog of NCBI NO: 18409643 NR Description: expressed protein [Arabidopsis thaliana]
  misc_feature (1)..(465): Homolog of NCBI NO: 21593408 NR Description: unknown [Arabidopsis thaliana]
  misc_feature (1)..(304): Homolog of NCBI NO: 25372841 NR Description: hypothetical protein F5A18.17 [imported] -
  misc_feature (270)..(465): Homolog of NCBI NO: 25372841 NR Description: hypothetical protein F5A18.17 [imported] -
  misc_feature (28)..(450): Homolog of NCBI NO: 13324787 NR Description: hypothetical protein [Oryza sativa]
  misc_feature (30)..(72): Homolog of NCBI NO: 13702809 NR Description: putative ARP protein [Oryza sativa]
  misc_feature (47)..(304): Homolog of NCBI NO: 18405190 NR Description: expressed protein [Arabidopsis thaliana]
  misc_feature (28)..(450): Homolog of NCBI NO: 13324787 NR Description: hypothetical protein [Oryza sativa]
  misc_feature (270)..(465): Homolog of NCBI NO: 25372841 NR Description: hypothetical protein F5A18.17 [imported] -
  misc_feature (1)..(304): Homolog of NCBI NO: 25372841 NR Description: hypothetical protein F5A18.17 [imported] -
  misc_feature (1)..(465): Homolog of NCBI NO: 21593408 NR Description: unknown [Arabidopsis thaliana]
  misc_feature (1)..(465): Homolog of NCBI NO: 18409643 NR Description: expressed protein [Arabidopsis thaliana]
MRFFKTDHRLLHRIIGYTRPFHGLAKTQNGEIARPGLVDPSSHPWPEWLDLMGMLAKKGYFEESLIPLMSSKESNHIRTACLNFARHRFTLVRNLSKKDIKVIAGCGCPSTDRKVVNSGKRLRAYVGIDERNVCGSCNLRGKCERAYAQARDDEGARTIDVMRLLLTYGLDSISPTVENRACQTKLVEDSVRKLLRESVAYSLTDFESAETETAGDELQPNSQDIDERDPRKRPGDWYCTECKFLNFAKNIRCLRCDVFSEERLKQLKEEQKDHLPLKKGDWICQTCNFLNFSKNTRCLRCKDKPTLRQINPGEWECESCNYINFRRNSICLKCDHKRQKAANVTPDSKTVADRQSGVTKTWSFVEEESVKRCNGEEEEEEDGFMGFPVEGGRSNVSKSAEKREQWKLEMTQRIRSNGTKAKKDDNTKNETESKCYDRRRNELLGNISDDGEMDDWFVSKQDRST

SEQ ID NO: 24594 - protein, 414 aa, Arabidopsis thaliana
  peptide (1)..(414): Ceres Seq. ID no. 13491570
  misc_feature (260)..(289): Pfam Name: Zn-finger in Ran binding protein and others Pfam Description: Zn-finger in Ran binding protein and others
  misc_feature (260)..(289): Pfam Name: Zn-finger in Ran binding protein and others Pfam Description: Zn-finger in Ran binding protein and others
  misc_feature (1)..(11): Homolog of NCBI NO: 15293147 NR Description: unknown protein [Arabidopsis thaliana]
  misc_feature (1)..(253): Homolog of NCBI NO: 18405190 NR Description: expressed protein [Arabidopsis thaliana]
  misc_feature (1)..(253): Homolog of NCBI NO: 15293147 NR Description: unknown protein [Arabidopsis thaliana]
  misc_feature (1)..(21): Homolog of NCBI NO: 13702809 NR Description: putative ARP protein [Oryza sativa]
  misc_feature (20)..(349): Homolog of NCBI NO: 13702809 NR Description: putative ARP protein [Oryza sativa]
  misc_feature (1)..(11): Homolog of NCBI NO: 15293147 NR Description: unknown protein [Arabidopsis thaliana]
  misc_feature (1)..(253): Homolog of NCBI NO: 15293147 NR Description: unknown protein [Arabidopsis thaliana]
  misc_feature (20)..(349): Homolog of NCBI NO: 13702809 NR Description: putative ARP protein [Oryza sativa]
  misc_feature (1)..(414): Homolog of NCBI NO: 18409643 NR Description: expressed protein [Arabidopsis thaliana]
  misc_feature (1)..(414): Homolog of NCBI NO: 21593408 NR Description: unknown [Arabidopsis thaliana]
  misc_feature (1)..(253): Homolog of NCBI NO: 25372841 NR Description: hypothetical protein F5A18.17 [imported] -
  misc_feature (219)..(414): Homolog of NCBI NO: 25372841 NR Description: hypothetical protein F5A18.17 [imported] -
  misc_feature (1)..(399): Homolog of NCBI NO: 13324787 NR Description: hypothetical protein [Oryza sativa]
  misc_feature (1)..(21): Homolog of NCBI NO: 13702809 NR Description: putative ARP protein [Oryza sativa]
  misc_feature (1)..(253): Homolog of NCBI NO: 18405190 NR Description: expressed protein [Arabidopsis thaliana]
  misc_feature (1)..(399): Homolog of NCBI NO: 13324787 NR Description: hypothetical protein [Oryza sativa]
  misc_feature (219)..(414): Homolog of NCBI NO: 25372841 NR Description: hypothetical protein F5A18.17 [imported] -
  misc_feature (1)..(253): Homolog of NCBI NO: 25372841 NR Description: hypothetical protein F5A18.17 [imported] -
  misc_feature (1)..(414): Homolog of NCBI NO: 21593408 NR Description: unknown [Arabidopsis thaliana]
  misc_feature (1)..(414): Homolog of NCBI NO: 18409643 NR Description: expressed protein [Arabidopsis thaliana]
MGMLAKKGYFEESLIPLMSSKESNHIRTACLNFARHRFTLVRNLSKKDIKVIAGCGCPSTDRKVVNSGKRLRAYVGIDERNVCGSCNLRGKCERAYAQARDDEGARTIDVMRLLLTYGLDSISPTVENRACQTKLVEDSVRKLLRESVAYSLTDFESAETETAGDELQPNSQDIDERDPRKRPGDWYCTECKFLNFAKNIRCLRCDVFSEERLKQLKEEQKDHLPLKKGDWICQTCNFLNFSKNTRCLRCKDKPTLRQINPGEWECESCNYINFRRNSICLKCDHKRQKAANVTPDSKTVADRQSGVTKTWSFVEEESVKRCNGEEEEEEDGFMGFPVEGGRSNVSKSAEKREQWKLEMTQRIRSNGTKAKKDDNTKNETESKCYDRRRNELLGNISDDGEMDDWFVSKQDRST

SEQ ID NO: 24595 - DNA, 1400 bp, Arabidopsis thaliana
  misc_feature (1)..(1400): Ceres Seq. ID no. 12322858
  misc_feature: MA Experiment ID: 108434 Result: Up-regulated in Transcription
  misc_feature: MA Experiment 108434 PARAMETER Experiment Name: At_Root_Tips_cDNA_P Parameter: Tissue Value: Root Tips
  misc_feature: MA Experiment ID: 108561 Result: Down-regulated in Transcription
  misc_feature: MA Experiment 108561 PARAMETER Experiment Name: At_100uM_ABA_cDNA_P Parameter: Timepoint (hr) Value: 6
  misc_feature: MA Experiment 108561 PARAMETER Experiment Name: At_100uM_ABA_cDNA_P Parameter: Tissue Value: Aerial
  misc_feature: MA Experiment 108561 PARAMETER Experiment Name: At_100uM_ABA_cDNA_P Parameter: Treatment Value: 100uM ABA vs. No Treatment
  misc_feature: MA Experiment ID: 108595 Result: Down-regulated in Transcription
  misc_feature: MA Experiment 108595 PARAMETER Experiment Name: At_Ler-pi_Ovule_cDNA_P Parameter: Plant Line Value: null
  misc_feature: MA Experiment ID: 20000069 Result: Down-regulated in Transcription
  misc_feature: MA Experiment 20000069 PARAMETER Experiment Name: At_100uM_ABA_Mutants_cDNA_P Parameter: Plant Line Value: CS23
  misc_feature: MA Experiment 20000069 PARAMETER Experiment Name: At_100uM_ABA_Mutants_cDNA_P Parameter: Timepoint (hr) Value: 6
  misc_feature: MA Experiment 20000069 PARAMETER Experiment Name: At_100uM_ABA_Mutants_cDNA_P Parameter: Tissue Value: Aerial
  misc_feature: MA Experiment 20000069 PARAMETER Experiment Name: At_100uM_ABA_Mutants_cDNA_P Parameter: Treatment Value: 100uM ABA vs. No Treatment
  misc_feature: MA Experiment ID: 20000070 Result: Down-regulated in Transcription
  misc_feature: MA Experiment 20000070 PARAMETER Experiment Name: At_100uM_ABA_Mutants_cDNA_P Parameter: Plant Line Value: CS24
  misc_feature: MA Experiment 20000070 PARAMETER Experiment Name: At_100uM_ABA_Mutants_cDNA_P Parameter: Timepoint (hr) Value: 6
  misc_feature: MA Experiment 20000070 PARAMETER Experiment Name: At_100uM_ABA_Mutants_cDNA_P Parameter: Tissue Value: Aerial
  misc_feature: MA Experiment 20000070 PARAMETER Experiment Name: At_100uM_ABA_Mutants_cDNA_P Parameter: Treatment Value: 100uM ABA vs. No Treatment
  misc_feature: MA Experiment ID: 20000071 Result: Down-regulated in Transcription
  misc_feature: MA Experiment 20000071 PARAMETER Experiment Name: At_100uM_ABA_Mutants_cDNA_P Parameter: Plant Line Value: CS8104
  misc_feature: MA Experiment 20000071 PARAMETER Experiment Name: At_100uM_ABA_Mutants_cDNA_P Parameter: Timepoint (hr) Value: 6
  misc_feature: MA Experiment 20000071 PARAMETER Experiment Name: At_100uM_ABA_Mutants_cDNA_P Parameter: Tissue Value: Aerial
  misc_feature: MA Experiment 20000071 PARAMETER Experiment Name: At_100uM_ABA_Mutants_cDNA_P Parameter: Treatment Value: 100uM ABA vs. No Treatment
  misc_feature: MA Experiment ID: 20000087 Result: Down-regulated in Transcription
  misc_feature: MA Experiment 20000087 PARAMETER Experiment Name: At_100uM_ABA_Mutants_cDNA_P Parameter: Plant Line Value: WS
  misc_feature: MA Experiment 20000087 PARAMETER Experiment Name: At_100uM_ABA_Mutants_cDNA_P Parameter: Timepoint (hr) Value: 6
  misc_feature: MA Experiment 20000087 PARAMETER Experiment Name: At_100uM_ABA_Mutants_cDNA_P Parameter: Tissue Value: Aerial
  misc_feature: MA Experiment 20000087 PARAMETER Experiment Name: At_100uM_ABA_Mutants_cDNA_P Parameter: Treatment Value: 100uM ABA vs. No Treatment
  misc_feature: MA Experiment ID: 20000089 Result: Down-regulated in Transcription
  misc_feature: MA Experiment ID: 20000117 Result: Down-regulated in Transcription
  misc_feature: MA Experiment 20000117 PARAMETER Experiment Name: At_100uM_ABA_Mutants_cDNA_P Parameter: Plant Line Value: Columbia
  misc_feature: MA Experiment 20000117 PARAMETER Experiment Name: At_100uM_ABA_Mutants_cDNA_P Parameter: Timepoint (hr) Value: 6
  misc_feature: MA Experiment 20000117 PARAMETER Experiment Name: At_100uM_ABA_Mutants_cDNA_P Parameter: Tissue Value: Aerial
  misc_feature: MA Experiment 20000117 PARAMETER Experiment Name: At_100uM_ABA_Mutants_cDNA_P Parameter: Treatment Value: 100uM ABA vs. No Treatment
gggttcgagacgacgacaagagacaagctctgtctgtggtcgggaaatcgaaaccagagccttggactgtgtctctgctctgtggagtatccattttcgatttcttgaaggtgaatccagcgaatccttaatctcaagctccgagactgtgcaataaacaaaacagtagctagcagcagcagcaacacatgaactcgtgcaaatcccttatccgtgcctcaatctcttcctttccatttgttcctcttccaaaccctaatttctctatcaccttcatctccgttcgcgccttttctcctctctctgtccttcatccaaattcatcatgtattgtaacagctcgacgcacatttcatggagctgtggctctttcaccggagagcttaacggaagagtctcccaaggatactgtgaaaggattgttaacaaccaatcgtggtgaggcctcaagcttgatgaaaatggagcggaggtgtagcttaagcaatggtgagggtgattgtagaggatcttggtttccttacgaggataggttcaggtgtggtgaggtgcatcttagtagccgtgaggtgttggaggcggtgagtcctcatatgatggaagagaggacagataggttcaggcgtgtggtggagaatcgaagctactcggtgtgtcttgtggttgaaggtctctctgattttggaaacatctctgctgctttccgctcagctgatgcgttggggattcaatctgtacatgttgtttcctgtgacagctccaaaaggtgcccctttgaggtataacggaaatcgccatgtgagtatgggagctgagaaatggctggacattgagttttgggacacacctaaagaatgtttcaaagttttgaagtctcgcggttacagaatagctacaactcatttgggaatggacacggtttccatttacgatatggactggtcatgcccaacagcaatagttgttggaaacgagggcaggggaataagtgacgaagcgttggagttatcagatctgcgttgcagtattccgatgaatggaatggttgattcgtttaatgtctcagtggctgcagggattctgatgcaccacgcagtctctgatagaaccactcgtctgggaagccatggagatctgtcggaagcagagaaagagatattgatggctgagttctcacttcgtcacagtagaagctcaatttgcattgcttacgagttcgctaaacgtaaacaacaacactctacctcctcctaattttgaaaccgttgtcttattctctcgctgttttgcgtgttataggcttcgaatgacgcctataaaaactctttcgaactctttttttggtacgacgcttgcttcatgtacaactcttaaattctataaaagacatccttctgtcg

SEQ ID NO: 24596 - protein, 198 aa, Arabidopsis thaliana
  peptide (1)..(198): Ceres Seq. ID no. 12322859
  misc_feature (136)..(186): Homolog of NCBI NO: 23026779 NR Description: hypothetical protein [Microbulbifer degradans
  misc_feature (139)..(192): Homolog of NCBI NO: 28896932 NR Description: tRNA methyltransferase [Vibrio parahaemolyticus
  misc_feature (136)..(193): Homolog of NCBI NO: 33866213 NR Description: putative tRNA (guanosine-2'-O-)-methyltransferase
  misc_feature (120)..(191): Homolog of NCBI NO: 21673707 NR Description: tRNA methyltransferase SpoU [Chlorobium tepidum
  misc_feature (139)..(190): Homolog of NCBI NO: 23475629 NR Description: hypothetical protein [Desulfovibrio desulfuricans
  misc_feature (136)..(186): Homolog of NCBI NO: 27364301 NR Description: rRNA methylases [Vibrio vulnificus CMCP6]
  misc_feature (136)..(187): Homolog of NCBI NO: 20808975 NR Description: rRNA methylase [Thermoanaerobacter tengcongensis]
  misc_feature (110)..(187): Homolog of NCBI NO: 28207743 NR Description: CR004 protein [Chlamydomonas reinhardtii]
  misc_feature (80)..(193): Homolog of NCBI NO: 34393586 NR Description: putative rRNA methylase [Oryza sativa (japonica
  misc_feature (1)..(193): Homolog of NCBI NO: 15242287 NR Description: rRNA methylase - like protein; protein id:
MNSCKSLIRASISSFPFVPLPNPNFSITFISVRAFSPLSVLHPNSSCIVTARRTFHGAVALSPESLTEESPKDTVKGLLTTNRGEASSLMKMERRCSLSNGEGDCRGSWFPYEDRFRCGEVHLSSREVLEAVSPHMMEERTDRFRRVVENRSYSVCLVVEGLSDFGNISAAFRSADALGIQSVHVVSCDSSKRCPFEV

SEQ ID NO: 24597 - protein, 179 aa, Arabidopsis thaliana
  peptide (1)..(179): Ceres Seq. ID no. 12322860
  misc_feature (22)..(125): Pfam Name: SpoU rRNA Methylase family Pfam Description: SpoU rRNA Methylase family
  misc_feature (16)..(124): Homolog of NCBI NO: 23026779 NR Description: hypothetical protein [Microbulbifer degradans
  misc_feature (28)..(131): Homolog of NCBI NO: 28896932 NR Description: tRNA methyltransferase [Vibrio parahaemolyticus
  misc_feature (30)..(131): Homolog of NCBI NO: 33866213 NR Description: putative tRNA (guanosine-2'-O-)-methyltransferase
  misc_feature (27)..(154): Homolog of NCBI NO: 21673707 NR Description: tRNA methyltransferase SpoU [Chlorobium tepidum
  misc_feature (30)..(147): Homolog of NCBI NO: 23475629 NR Description: hypothetical protein [Desulfovibrio desulfuricans
  misc_feature (27)..(149): Homolog of NCBI NO: 27364301 NR Description: rRNA methylases [Vibrio vulnificus CMCP6]
  misc_feature (26)..(150): Homolog of NCBI NO: 20808975 NR Description: rRNA methylase [Thermoanaerobacter tengcongensis]
  misc_feature (13)..(171): Homolog of NCBI NO: 28207743 NR Description: CR004 protein [Chlamydomonas reinhardtii]
  misc_feature (22)..(172): Homolog of NCBI NO: 34393586 NR Description: putative rRNA methylase [Oryza sativa (japonica
  misc_feature (22)..(179): Homolog of NCBI NO: 15242287 NR Description: rRNA methylase - like protein; protein id:
MRWGFNLYMLFPVTAPKGAPLRYNGNRHVSMGAEKWLDIEFWDTPKECFKVLKSRGYRIATTHLGMDTVSIYDMDWSCPTAIVVGNEGRGISDEALELSDLRCSIPMNGMVDSFNVSVAAGILMHHAVSDRTTRLGSHGDLSEAEKEILMAEFSLRHSRSSICIAYEFAKRKQQHSTSS

SEQ ID NO: 24598 - protein, 171 aa, Arabidopsis thaliana
  peptide (1)..(171): Ceres Seq. ID no. 12322861
  misc_feature (14)..(117): Pfam Name: SpoU rRNA Methylase family Pfam Description: SpoU rRNA Methylase family
  misc_feature (8)..(116): Homolog of NCBI NO: 23026779 NR Description: hypothetical protein [Microbulbifer degradans
  misc_feature (20)..(123): Homolog of NCBI NO: 28896932 NR Description: tRNA methyltransferase [Vibrio parahaemolyticus
  misc_feature (22)..(123): Homolog of NCBI NO: 33866213 NR Description: putative tRNA (guanosine-2'-O-)-methyltransferase
  misc_feature (19)..(146): Homolog of NCBI NO: 21673707 NR Description: tRNA methyltransferase SpoU [Chlorobium tepidum
  misc_feature (22)..(139): Homolog of NCBI NO: 23475629 NR Description: hypothetical protein [Desulfovibrio desulfuricans
  misc_feature (19)..(141): Homolog of NCBI NO: 27364301 NR Description: rRNA methylases [Vibrio vulnificus CMCP6]
  misc_feature (18)..(142): Homolog of NCBI NO: 20808975 NR Description: rRNA methylase [Thermoanaerobacter tengcongensis]
  misc_feature (5)..(163): Homolog of NCBI NO: 28207743 NR Description: CR004 protein [Chlamydomonas reinhardtii]
  misc_feature (14)..(164): Homolog of NCBI NO: 34393586 NR Description: putative rRNA methylase [Oryza sativa (japonica
  misc_feature (14)..(171): Homolog of NCBI NO: 15242287 NR Description: rRNA methylase - like protein; protein id:
MLFPVTAPKGAPLRYNGNRHVSMGAEKWLDIEFWDTPKECFKVLKSRGYRIATTHLGMDTVSIYDMDWSCPTAIVVGNEGRGISDEALELSDLRCSIPMNGMVDSFNVSVAAGILMHHAVSDRTTRLGSHGDLSEAEKEILMAEFSLRHSRSSICIAYEFAKRKQQHSTSS

SEQ ID NO: 24599 - DNA, 1526 bp, Arabidopsis thaliana
  misc_feature (1)..(1526): Ceres Seq. ID no. 12325036
  misc_feature: MA Experiment ID: 108434 Result: Down-regulated in Transcription
  misc_feature: MA Experiment 108434 PARAMETER Experiment Name: At_Root_Tips_cDNA_P Parameter: Tissue Value: Root Tips
  misc_feature: MA Experiment ID: 108569 Result: Up-regulated in Transcription
  misc_feature: MA Experiment 108569 PARAMETER Experiment Name: At_0.001%_MeJA__cDNA_P Parameter: Timepoint (hr) Value: 6
  misc_feature: MA Experiment 108569 PARAMETER Experiment Name: At_0.001%_MeJA__cDNA_P Parameter: Tissue Value: Aerial
  misc_feature: MA Experiment 108569 PARAMETER Experiment Name: At_0.001%_MeJA__cDNA_P Parameter: Treatment Value: 0.001% MeJA vs. No Treatment
  misc_feature: MA Experiment ID: 108573 Result: Up-regulated in Transcription
  misc_feature: MA Experiment 108573 PARAMETER Experiment Name: At_Drought_cDNA_P Parameter: Timepoint (hr) Value: 6
  misc_feature: MA Experiment 108573 PARAMETER Experiment Name: At_Drought_cDNA_P Parameter: Tissue Value: Aerial
  misc_feature: MA Experiment 108573 PARAMETER Experiment Name: At_Drought_cDNA_P Parameter: Treatment Value: Drought vs. No Drought
  misc_feature: MA Experiment ID: 108585 Result: Up-regulated in Transcription
  misc_feature: MA Experiment 108585 PARAMETER Experiment Name: At_5mM_NaNP_cDNA_P Parameter: Timepoint (hr) Value: 6
  misc_feature: MA Experiment 108585 PARAMETER Experiment Name: At_5mM_NaNP_cDNA_P Parameter: Tissue Value: Aerial
  misc_feature: MA Experiment 108585 PARAMETER Experiment Name: At_5mM_NaNP_cDNA_P Parameter: Treatment Value: null
  misc_feature: MA Experiment ID: 108595 Result: Down-regulated in Transcription
  misc_feature: MA Experiment 108595 PARAMETER Experiment Name: At_Ler-pi_Ovule_cDNA_P Parameter: Plant Line Value: null
  misc_feature: MA Experiment ID: 20000227 Result: Down-regulated in Transcription
  misc_feature: MA Experiment 20000227 PARAMETER Experiment Name: At_Root-Tips-vs-Tops_P Parameter: Tissue Value: Root Tips vs. Root Tops
  misc_feature: MA Experiment ID: 20001905 Result: Up-regulated in Transcription
  misc_feature: MA Experiment 20001905 PARAMETER Experiment Name: At_Drought_Reproduction_P Parameter: Age (day) Value: 40
  misc_feature: MA Experiment 20001905 PARAMETER Experiment Name: At_Drought_Reproduction_P Parameter: Organism Value: A. thaliana
  misc_feature: MA Experiment 20001905 PARAMETER Experiment Name: At_Drought_Reproduction_P Parameter: Plant Line Value: WS
  misc_feature: MA Experiment 20001905 PARAMETER Experiment Name: At_Drought_Reproduction_P Parameter: Timepoint (day) Value: 10
  misc_feature: MA Experiment 20001905 PARAMETER Experiment Name: At_Drought_Reproduction_P Parameter: Tissue Value: Rosettes
  misc_feature: MA Experiment 20001905 PARAMETER Experiment Name: At_Drought_Reproduction_P Parameter: Treatment Value: Drought vs. No Drought
aagacaaaatagatttcttcttctctttgtttgacccacattttctctggaaaaaattcgtctactttctccgatcgtctcttcattgatcggaaaaccaacaacgacccattattcctctcctgtttctggcgcaaacccttgtagcaagttttgattttggtgagaaaatattttagggatctgaagagaaagaacacgatgatgacgagtatggaagggatggtggagaaaggagtattggatgatattataagaagattgttagaaggtaaaggaggcaaacaggttcagctttccgagagcgagattcgtcaactctgctttaacgctcgtcaaatcttcctctctcaacctaatctccttgatctccatgccccaattcgcatctgcggtgatattcatggtcaatatcaagatcttttgaggttgtttgaatacggaggttatcctccttcagcaaactatctattccttggtgattacgttgacagaggcaaacaaagtcttgagaccatatgtttgcttcttgcttacaagatacggtacccatcgaagatatatctgttgagagggaaccatgaggatgctaagatcaacaggatttacgggttttatgacgagtgcaaacggagattcaatgtacgactctggaaggtgtttactgattgcttcaactgtttacctgtagctgcacttattgatgagaagatactgtgtatgcacggtggtttgtcaccagatttggataatttgaatcagattcgagagattcaaaggcctattgagattccagacagtggtcttctttgtgatttactttggtcagatcctgatcagaagattgaaggttgggctgatagtgatcgaggtatctcttgcacttttggagctgataaagtcgctgagttcttggataagaatgatcttgacctcatttgccgaggccatcaggtagtagaagacgggtatgagtttttcgcaaaacggagattagtcacgatattctcagctccaaactatggtggggagtttgacaacgctggtgcgttattaagcgttgacgagtctcttgtatgttcctttgagattatgaaaccagccccagcttcaagcagtcatcctctcaagaaggactttcacaacagaaccttaggttataatttgagtgcttagcatggacttcaaagtgtacaatcttaagcagtgggagcactattgcaatttggtaccgaagatggggaagtcttgaatatctagtcctctctatgtcaatatcacggttccacagctcaagctaggctcaagattctgagtgtcattacaactgtgtctgtgtctccaattatgggttgaatgcaatgaagaacccaaagggtacttacttagtcatcaaacaacttctgtaaaaaaacaaaaaaagtgagaaaacaaaaacacactttgttttctttgtatagatgcagaaaatgatctgtcttctgcttctggagattttatctccttattagtctctcttttctttc

SEQ ID NO: 24600 - protein, 324 aa, Arabidopsis thaliana
  peptide (1)..(324): Ceres Seq. ID no. 12325037
  misc_feature (59)..(254): Pfam Name: Calcineurin-like phosphoesterase Pfam Description: Calcineurin-like phosphoesterase
  misc_feature (1)..(301): Homolog of NCBI NO: 15225576 NR Description: phosphoprotein phosphatase type 1 catalytic
  misc_feature (65)..(311): Homolog of NCBI NO: 227345 NR Description: protein phosphatase 1
  misc_feature (65)..(311): Homolog of NCBI NO: 130708 NR Description: SERINE/THREONINE PROTEIN PHOSPHATASE PP1
  misc_feature (7)..(317): Homolog of NCBI NO: 34895162 NR Description: putative serine/threonine protein phosphatase
  misc_feature (9)..(313): Homolog of NCBI NO: 1346765 NR Description: SERINE/THREONINE PROTEIN PHOSPHATASE PP1
  misc_feature (1)..(313): Homolog of NCBI NO: 29290586 NR Description: serine threonine protein phosphatase [Phaseolus
  misc_feature (1)..(311): Homolog of NCBI NO: 15230010 NR Description: serine/threonine protein phosphatase (PP1)
  misc_feature (1)..(311): Homolog of NCBI NO: 3153205 NR Description: serine/threonine protein phosphatase type one
  misc_feature (8)..(324): Homolog of NCBI NO: 21593410 NR Description: TOPP8 serine/threonine protein phosphatase type
  misc_feature (1)..(324): Homolog of NCBI NO: 30690815 NR Description: serine/threonine protein phosphatase type
MMTSMEGMVEKGVLDDIIRRLLEGKGGKQVQLSESEIRQLCFNARQIFLSQPNLLDLHAPIRICGDIHGQYQDLLRLFEYGGYPPSANYLFLGDYVDRGKQSLETICLLLAYKIRYPSKIYLLRGNHEDAKINRIYGFYDECKRRFNVRLWKVFTDCFNCLPVAALIDEKILCMHGGLSPDLDNLNQIREIQRPIEIPDSGLLCDLLWSDPDQKIEGWADSDRGISCTFGADKVAEFLDKNDLDLICRGHQVVEDGYEFFAKRRLVTIFSAPNYGGEFDNAGALLSVDESLVCSFEIMKPAPASSSHPLKKDFHNRTLGYNLSA

SEQ ID NO: 24601 - protein, 323 aa, Arabidopsis thaliana
  peptide (1)..(323): Ceres Seq. ID no. 12325038
  misc_feature (58)..(253): Pfam Name: Calcineurin-like phosphoesterase Pfam Description: Calcineurin-like phosphoesterase
  misc_feature (1)..(300): Homolog of NCBI NO: 15225576 NR Description: phosphoprotein phosphatase type 1 catalytic
  misc_feature (64)..(310): Homolog of NCBI NO: 227345 NR Description: protein phosphatase 1
  misc_feature (64)..(310): Homolog of NCBI NO: 130708 NR Description: SERINE/THREONINE PROTEIN PHOSPHATASE PP1
  misc_feature (6)..(316): Homolog of NCBI NO: 34895162 NR Description: putative serine/threonine protein phosphatase
  misc_feature (8)..(312): Homolog of NCBI NO: 1346765 NR Description: SERINE/THREONINE PROTEIN PHOSPHATASE PP1
  misc_feature (1)..(312): Homolog of NCBI NO: 29290586 NR Description: serine threonine protein phosphatase [Phaseolus
  misc_feature (1)..(310): Homolog of NCBI NO: 15230010 NR Description: serine/threonine protein phosphatase (PP1)
  misc_feature (1)..(310): Homolog of NCBI NO: 3153205 NR Description: serine/threonine protein phosphatase type one
  misc_feature (7)..(323): Homolog of NCBI NO: 21593410 NR Description: TOPP8 serine/threonine protein phosphatase type
  misc_feature (1)..(323): Homolog of NCBI NO: 30690815 NR Description: serine/threonine protein phosphatase type
MTSMEGMVEKGVLDDIIRRLLEGKGGKQVQLSESEIRQLCFNARQIFLSQPNLLDLHAPIRICGDIHGQYQDLLRLFEYGGYPPSANYLFLGDYVDRGKQSLETICLLLAYKIRYPSKIYLLRGNHEDAKINRIYGFYDECKRRFNVRLWKVFTDCFNCLPVAALIDEKILCMHGGLSPDLDNLNQIREIQRPIEIPDSGLLCDLLWSDPDQKIEGWADSDRGISCTFGADKVAEFLDKNDLDLICRGHQVVEDGYEFFAKRRLVTIFSAPNYGGEFDNAGALLSVDESLVCSFEIMKPAPASSSHPLKKDFHNRTLGYNLSA

SEQ ID NO: 24602 - protein, 320 aa, Arabidopsis thaliana
  peptide (1)..(320): Ceres Seq. ID no. 12325039
  misc_feature (55)..(250): Pfam Name: Calcineurin-like phosphoesterase Pfam Description: Calcineurin-like phosphoesterase
  misc_feature (1)..(297): Homolog of NCBI NO: 15225576 NR Description: phosphoprotein phosphatase type 1 catalytic
  misc_feature (61)..(307): Homolog of NCBI NO: 227345 NR Description: protein phosphatase 1
  misc_feature (61)..(307): Homolog of NCBI NO: 130708 NR Description: SERINE/THREONINE PROTEIN PHOSPHATASE PP1
  misc_feature (3)..(313): Homolog of NCBI NO: 34895162 NR Description: putative serine/threonine protein phosphatase
  misc_feature (5)..(309): Homolog of NCBI NO: 1346765 NR Description: SERINE/THREONINE PROTEIN PHOSPHATASE PP1
  misc_feature (1)..(309): Homolog of NCBI NO: 29290586 NR Description: serine threonine protein phosphatase [Phaseolus
  misc_feature (1)..(307): Homolog of NCBI NO: 15230010 NR Description: serine/threonine protein phosphatase (PP1)
  misc_feature (1)..(307): Homolog of NCBI NO: 3153205 NR Description: serine/threonine protein phosphatase type one
  misc_feature (4)..(320): Homolog of NCBI NO: 21593410 NR Description: TOPP8 serine/threonine protein phosphatase type
  misc_feature (1)..(320): Homolog of NCBI NO: 30690815 NR Description: serine/threonine protein phosphatase type
MEGMVEKGVLDDIIRRLLEGKGGKQVQLSESEIRQLCFNARQIFLSQPNLLDLHAPIRICGDIHGQYQDLLRLFEYGGYPPSANYLFLGDYVDRGKQSLETICLLLAYKIRYPSKIYLLRGNHEDAKINRIYGFYDECKRRFNVRLWKVFTDCFNCLPVAALIDEKILCMHGGLSPDLDNLNQIREIQRPIEIPDSGLLCDLLWSDPDQKIEGWADSDRGISCTFGADKVAEFLDKNDLDLICRGHQVVEDGYEFFAKRRLVTIFSAPNYGGEFDNAGALLSVDESLVCSFEIMKPAPASSSHPLKKDFHNRTLGYNLSA

SEQ ID NO: 24603 - DNA, 1105 bp, Arabidopsis thaliana
  misc_feature (1)..(1105): Ceres Seq. ID no. 13503936
  misc_feature: MA Experiment ID: 108434 Result: Down-regulated in Transcription
  misc_feature: MA Experiment 108434 PARAMETER Experiment Name: At_Root_Tips_cDNA_P Parameter: Tissue Value: Root Tips
  misc_feature: MA Experiment ID: 108572 Result: Up-regulated in Transcription
  misc_feature: MA Experiment 108572 PARAMETER Experiment Name: At_Drought_cDNA_P Parameter: Timepoint (hr) Value: 1
  misc_feature: MA Experiment 108572 PARAMETER Experiment Name: At_Drought_cDNA_P Parameter: Tissue Value: Aerial
  misc_feature: MA Experiment 108572 PARAMETER Experiment Name: At_Drought_cDNA_P Parameter: Treatment Value: Drought vs. No Drought
  misc_feature: MA Experiment ID: 108573 Result: Up-regulated in Transcription
  misc_feature: MA Experiment 108573 PARAMETER Experiment Name: At_Drought_cDNA_P Parameter: Timepoint (hr) Value: 6
  misc_feature: MA Experiment 108573 PARAMETER Experiment Name: At_Drought_cDNA_P Parameter: Tissue Value: Aerial
  misc_feature: MA Experiment 108573 PARAMETER Experiment Name: At_Drought_cDNA_P Parameter: Treatment Value: Drought vs. No Drought
  misc_feature: MA Experiment ID: 108579 Result: Up-regulated in Transcription
  misc_feature: MA Experiment 108579 PARAMETER Experiment Name: At_4deg_Cold_cDNA_P Parameter: Temperature (deg C) Value: 4 vs. 22
  misc_feature: MA Experiment 108579 PARAMETER Experiment Name: At_4deg_Cold_cDNA_P Parameter: Timepoint (hr) Value: 6
  misc_feature: MA Experiment 108579 PARAMETER Experiment Name: At_4deg_Cold_cDNA_P Parameter: Tissue Value: Aerial
  misc_feature: MA Experiment ID: 20000093 Result: Up-regulated in Transcription
  misc_feature: MA Experiment 20000093 PARAMETER Experiment Name: At_42deg_Heat_cDNA_P Parameter: Temperature (deg C) Value: 42 vs. 22
  misc_feature: MA Experiment 20000093 PARAMETER Experiment Name: At_42deg_Heat_cDNA_P Parameter: Timepoint (hr) Value: 0.5
  misc_feature: MA Experiment 20000093 PARAMETER Experiment Name: At_42deg_Heat_cDNA_P Parameter: Tissue Value: Aerial
  misc_feature: MA Experiment ID: 20000111 Result: Up-regulated in Transcription
  misc_feature: MA Experiment 20000111 PARAMETER Experiment Name: At_42deg_Heat_cDNA_P Parameter: Temperature (deg C) Value: 42 vs. 22
  misc_feature: MA Experiment 20000111 PARAMETER Experiment Name: At_42deg_Heat_cDNA_P Parameter: Timepoint (hr) Value: 6
  misc_feature: MA Experiment 20000111 PARAMETER Experiment Name: At_42deg_Heat_cDNA_P Parameter: Tissue Value: Aerial
  misc_feature: MA Experiment ID: 20000144 Result: Up-regulated in Transcription
  misc_feature: MA Experiment 20000144 PARAMETER Experiment Name: At_42deg_Heat_cDNA_P Parameter: Temperature (deg C) Value: 42 vs. 22
  misc_feature: MA Experiment 20000144 PARAMETER Experiment Name: At_42deg_Heat_cDNA_P Parameter: Timepoint (hr) Value: 1
  misc_feature: MA Experiment 20000144 PARAMETER Experiment Name: At_42deg_Heat_cDNA_P Parameter: Tissue Value: Aerial
aacaattcagatttcaatttctcaaaatcttaaaaactttctctcaattctctctaccgtgatcaagatgcagatctttgttaagactctcaccggaaagacaatcaccctcgaggtggaaagctccgacaccatcgacaacgttaaggccaagatccaggataaggagggcattcctccggatcagcagaggcttattttcgccggcaagcagctagaggatggccgtacgttggctgattacaatatccagaaggaatccaccctccacttggtcctcaggctccgtggtggtatgcagattttcgttaaaaccctaacgggaaagacgattactcttgaggtggagagttctgacaccatcgacaacgtcaaggccaagatccaagacaaagagggtattcctccggaccagcagaggctgatcttcgccggaaagcagttggaggatggcagaactcttgctgactacaayatycagaaggagtccacmcttcatcttgktcttgcagkctscgtggwggtatgcagatyttcgtkaagactctcacyggaaagaccatcactttggaggtggagagttctgacaccattgataacgtgaaagccaagatccaggacaaagagggtatycctccggaccagcagagattgatcttcgccggaaagcaacttgargatgghagaactttggcbgactacaacattcagaaggagtccacmcttcacttggtcttgcgtctgcgtggaggtatgcagatcttcgtsaagactytbaccggaaagacyatcacyytkgargtrgaragctcygacaccattgacaacgtcaaggccaagatccaggacaaggaaggtattcctccggaccagcagcgtctcatcttcgctggaaagcagcttgaggatggacgtactttggccgactacaacatccagaaggagtctactcttcacttggtcctgcgtcttcgtggtggtttctaaatctcgtctctgttatgcttaagaagttcaatgtttcgtttcatgtaaaactttggtggtttgtgttttggggccttgtataatccctgatgaataagtgttctactatgtttccgtt

SEQ ID NO: 24604 - protein, 200 aa, Arabidopsis thaliana
  peptide (1)..(200): Ceres Seq. ID no. 15223254
  misc_feature (23)..(96): Pfam Name: Ubiquitin family Pfam Description: Ubiquitin family
  misc_feature (23)..(169): Homolog of NCBI NO: 30680052 NR Description: polyubiquitin UBQ10/SEN3 [Arabidopsis thaliana]
  misc_feature (23)..(169): Homolog of NCBI NO: 18412930 NR Description: polyubiquitin UBQ10/SEN3 [Arabidopsis thaliana]
  misc_feature (23)..(169): Homolog of NCBI NO: 18412930 NR Description: polyubiquitin UBQ10/SEN3 [Arabidopsis thaliana]
  misc_feature (23)..(169): Homolog of NCBI NO: 70644 NR Description: ubiquitin precursor - common sunflower (fragment)
  misc_feature (23)..(169): Homolog of NCBI NO: 30680052 NR Description: polyubiquitin UBQ10/SEN3 [Arabidopsis thaliana]
  misc_feature (23)..(169): Homolog of NCBI NO: 30680052 NR Description: polyubiquitin UBQ10/SEN3 [Arabidopsis thaliana]
  misc_feature (23)..(170): Homolog of NCBI NO: 15982787 NR Description: AT4g05320/C17L7_240 [Arabidopsis thaliana]
  misc_feature (23)..(169): Homolog of NCBI NO: 23397122 NR Description: putative polyubiquitin (UBQ10) [Arabidopsis
  misc_feature (23)..(169): Homolog of NCBI NO: 23397122 NR Description: putative polyubiquitin (UBQ10) [Arabidopsis
  misc_feature (23)..(169): Homolog of NCBI NO: 23397122 NR Description: putative polyubiquitin (UBQ10) [Arabidopsis
  misc_feature (158)..(158): Xaa is any aa, unknown or other
  misc_feature (159)..(159): Xaa is any aa, unknown or other
  misc_feature (164)..(164): Xaa is any aa, unknown or other
  misc_feature (168)..(168): Xaa is any aa, unknown or other
  misc_feature (171)..(171): Xaa is any aa, unknown or other
  misc_feature (172)..(172): Xaa is any aa, unknown or other
  misc_feature (174)..(174): Xaa is any aa, unknown or other
  misc_feature (178)..(178): Xaa is any aa, unknown or other
  misc_feature (180)..(180): Xaa is any aa, unknown or other
  misc_feature (184)..(184): Xaa is any aa, unknown or other
TIQISISQNLKNFLSILSTVIKMQIFVKTLTGKTITLEVESSDTIDNVKAKIQDKEGIPPDQQRLIFAGKQLEDGRTLADYNIQKESTLHLVLRLRGGMQIFVKTLTGKTITLEVESSDTIDNVKAKIQDKEGIPPDQQRLIFAGKQLEDGRTLADYXXQKESXLHLXLAXXVXVCRXSXRLSXERPSLWRWRVLTPLIT

SEQ ID NO: 24605 - protein, 178 aa, Arabidopsis thaliana
  peptide (1)..(178): Ceres Seq. ID no. 15223255
  misc_feature (1)..(74): Pfam Name: Ubiquitin family Pfam Description: Ubiquitin family
  misc_feature (1)..(147): Homolog of NCBI NO: 70644 NR Description: ubiquitin precursor - common sunflower (fragment)
  misc_feature (1)..(148): Homolog of NCBI NO: 15982787 NR Description: AT4g05320/C17L7_240 [Arabidopsis thaliana]
  misc_feature (1)..(147): Homolog of NCBI NO: 18412930 NR Description: polyubiquitin UBQ10/SEN3 [Arabidopsis thaliana]
  misc_feature (1)..(147): Homolog of NCBI NO: 30680052 NR Description: polyubiquitin UBQ10/SEN3 [Arabidopsis thaliana]
  misc_feature (1)..(147): Homolog of NCBI NO: 30680052 NR Description: polyubiquitin UBQ10/SEN3 [Arabidopsis thaliana]
  misc_feature (1)..(147): Homolog of NCBI NO: 30680052 NR Description: polyubiquitin UBQ10/SEN3 [Arabidopsis thaliana]
  misc_feature (1)..(147): Homolog of NCBI NO: 18412930 NR Description: polyubiquitin UBQ10/SEN3 [Arabidopsis thaliana]
  misc_feature (1)..(147): Homolog of NCBI NO: 23397122 NR Description: putative polyubiquitin (UBQ10) [Arabidopsis
  misc_feature (1)..(147): Homolog of NCBI NO: 23397122 NR Description: putative polyubiquitin (UBQ10) [Arabidopsis
  misc_feature (1)..(147): Homolog of NCBI NO: 23397122 NR Description: putative polyubiquitin (UBQ10) [Arabidopsis
  misc_feature (136)..(136): Xaa is any aa, unknown or other
  misc_feature (137)..(137): Xaa is any aa, unknown or other
  misc_feature (142)..(142): Xaa is any aa, unknown or other
  misc_feature (146)..(146): Xaa is any aa, unknown or other
  misc_feature (149)..(149): Xaa is any aa, unknown or other
  misc_feature (150)..(150): Xaa is any aa, unknown or other
  misc_feature (152)..(152): Xaa is any aa, unknown or other
  misc_feature (156)..(156): Xaa is any aa, unknown or other
  misc_feature (158)..(158): Xaa is any aa, unknown or other
  misc_feature (162)..(162): Xaa is any aa, unknown or other
MQIFVKTLTGKTITLEVESSDTIDNVKAKIQDKEGIPPDQQRLIFAGKQLEDGRTLADYNIQKESTLHLVLRLRGGMQIFVKTLTGKTITLEVESSDTIDNVKAKIQDKEGIPPDQQRLIFAGKQLEDGRTLADYXXQKESXLHLXLAXXVXVCRXSXRLSXERPSLWRWRVLTPLIT

SEQ ID NO: 24606 - protein, 153 aa, Arabidopsis thaliana
  peptide (1)..(153): Ceres Seq. ID no. 15223256
  misc_feature (1)..(74): Pfam Name: Ubiquitin family Pfam Description: Ubiquitin family
  misc_feature (1)..(153): Homolog of NCBI NO: 170352 NR Description: hexameric polyubiquitin
  misc_feature (1)..(153): Homolog of NCBI NO: 170354 NR Description: pentameric polyubiquitin
  misc_feature (1)..(153): Homolog of NCBI NO: 7488781 NR Description: polyubiquitin 4.4 - kidney bean
  misc_feature (1)..(153): Homolog of NCBI NO: 18412077 NR Description: polyubiquitin (UBQ14) [Arabidopsis thaliana]
  misc_feature (1)..(153): Homolog of NCBI NO: 70645 NR Description: polyubiquitin 5 - garden pea
  misc_feature (1)..(153): Homolog of NCBI NO: 70644 NR Description: ubiquitin precursor - common sunflower (fragment)
  misc_feature (1)..(153): Homolog of NCBI NO: 15982787 NR Description: AT4g05320/C17L7_240 [Arabidopsis thaliana]
  misc_feature (1)..(110): Homolog of NCBI NO: 30680052 NR Description: polyubiquitin UBQ10/SEN3 [Arabidopsis thaliana]
  misc_feature (1)..(110): Homolog of NCBI NO: 18412930 NR Description: polyubiquitin UBQ10/SEN3 [Arabidopsis thaliana]
  misc_feature (1)..(116): Homolog of NCBI NO: 23397122 NR Description: putative polyubiquitin (UBQ10) [Arabidopsis
  misc_feature (3)..(3): Xaa is any aa, unknown or other
  misc_feature (5)..(5): Xaa is any aa, unknown or other
  misc_feature (9)..(9): Xaa is any aa, unknown or other
  misc_feature (36)..(36): Xaa is any aa, unknown or other
  misc_feature (51)..(51): Xaa is any aa, unknown or other
  misc_feature (53)..(53): Xaa is any aa, unknown or other
  misc_feature (57)..(57): Xaa is any aa, unknown or other
  misc_feature (66)..(66): Xaa is any aa, unknown or other
  misc_feature (81)..(81): Xaa is any aa, unknown or other
  misc_feature (84)..(84): Xaa is any aa, unknown or other
  misc_feature (88)..(88): Xaa is any aa, unknown or other
  misc_feature (90)..(90): Xaa is any aa, unknown or other
  misc_feature (91)..(91): Xaa is any aa, unknown or other
  misc_feature (92)..(92): Xaa is any aa, unknown or other
  misc_feature (93)..(93): Xaa is any aa, unknown or other
  misc_feature (94)..(94): Xaa is any aa, unknown or other
  misc_feature (96)..(96): Xaa is any aa, unknown or other
MQXFXKTLXGKTITLEVESSDTIDNVKAKIQDKEGXPPDQQRLIFAGKQLXDXRTLXDYNIQKESXLHLVLRLRGGMQIFXKTXTGKXIXXXXXSXDTIDNVKAKIQDKEGIPPDQQRLIFAGKQLEDGRTLADYNIQKESTLHLVLRLRGGF

SEQ ID NO: 24607 - DNA, 1156 bp, Arabidopsis thaliana
  misc_feature (1)..(1156): Ceres Seq. ID no. 12337904
  misc_feature: MA Experiment ID: 20000180 Result: Up-regulated in Transcription
  misc_feature: MA Experiment 20000180 PARAMETER Experiment Name: At_Germinating_Seeds_P Parameter: Age (hr) Value: 24 vs. 0
  misc_feature: MA Experiment 20000180 PARAMETER Experiment Name: At_Germinating_Seeds_P Parameter: Tissue Value: Germinating Seeds
  misc_feature: MA Experiment ID: 20000185 Result: Down-regulated in Transcription
  misc_feature: MA Experiment 20000185 PARAMETER Experiment Name: At_Roots__P Parameter: Age (day) Value: 7 vs. 21
  misc_feature: MA Experiment 20000185 PARAMETER Experiment Name: At_Roots__P Parameter: Organism Value: A. thaliana
  misc_feature: MA Experiment 20000185 PARAMETER Experiment Name: At_Roots__P Parameter: Tissue Value: Roots vs. Whole Plant
  misc_feature: MA Experiment ID: 20000234 Result: Up-regulated in Transcription
  misc_feature: MA Experiment 20000234 PARAMETER Experiment Name: At_Siliques_P Parameter: Age (day) Value: 21
  misc_feature: MA Experiment 20000234 PARAMETER Experiment Name: At_Siliques_P Parameter: Organism Value: A. thaliana
  misc_feature: MA Experiment 20000234 PARAMETER Experiment Name: At_Siliques_P Parameter: Plant Line Value: WS
  misc_feature: MA Experiment 20000234 PARAMETER Experiment Name: At_Siliques_P Parameter: Tissue Value: Less Than 5mm Siliques vs. Whole Plant
  misc_feature: MA Experiment ID: 20000265 Result: Up-regulated in Transcription
  misc_feature: MA Experiment 20000265 PARAMETER Experiment Name: At_Open_Flower_P Parameter: Age (day) Value: 21
  misc_feature: MA Experiment 20000265 PARAMETER Experiment Name: At_Open_Flower_P Parameter: Plant Line Value: WS
  misc_feature: MA Experiment 20000265 PARAMETER Experiment Name: At_Open_Flower_P Parameter: Tissue Value: Closed Flower vs. Whole Plant
  misc_feature: MA Experiment ID: 20000286 Result: Up-regulated in Transcription
  misc_feature: MA Experiment 20000286 PARAMETER Experiment Name: At_Open_Flower_P Parameter: Age (day) Value: 21
  misc_feature: MA Experiment 20000286 PARAMETER Experiment Name: At_Open_Flower_P Parameter: Plant Line Value: WS
  misc_feature: MA Experiment 20000286 PARAMETER Experiment Name: At_Open_Flower_P Parameter: Tissue Value: Half Open vs. Whole Plant
  misc_feature: MA Experiment ID: 20000437 Result: Down-regulated in Transcription
  misc_feature: MA Experiment 20000437 PARAMETER Experiment Name: At_Drought_P Parameter: Age (day) Value: 8
  misc_feature: MA Experiment 20000437 PARAMETER Experiment Name: At_Drought_P Parameter: Organism Value: A. thaliana
  misc_feature: MA Experiment 20000437 PARAMETER Experiment Name: At_Drought_P Parameter: Plant Line Value: WS
  misc_feature: MA Experiment 20000437 PARAMETER Experiment Name: At_Drought_P Parameter: Timepoint (hr) Value: 24
  misc_feature: MA Experiment 20000437 PARAMETER Experiment Name: At_Drought_P Parameter: Tissue Value: Whole Plant
  misc_feature: MA Experiment 20000437 PARAMETER Experiment Name: At_Drought_P Parameter: Treatment Value: Drought vs. No Drought
  misc_feature: MA Experiment ID: 20000439 Result: Down-regulated in Transcription
  misc_feature: MA Experiment 20000439 PARAMETER Experiment Name: At_Roots__P Parameter: Age (day) Value: 14 vs. 21
  misc_feature: MA Experiment 20000439 PARAMETER Experiment Name: At_Roots__P Parameter: Organism Value: A. thaliana
  misc_feature: MA Experiment 20000439 PARAMETER Experiment Name: At_Roots__P Parameter: Tissue Value: Roots vs. Whole Plant
  misc_feature: MA Experiment ID: 20000495 Result: Up-regulated in Transcription
  misc_feature: MA Experiment 20000495 PARAMETER Experiment Name: At_Guard_Cells_P Parameter: Harvest Date Value: 8/2/2002
  misc_feature: MA Experiment 20000495 PARAMETER Experiment Name: At_Guard_Cells_P Parameter: Organism Value: A. thaliana
  misc_feature: MA Experiment 20000495 PARAMETER Experiment Name: At_Guard_Cells_P Parameter: Tissue Value: Guard Cells vs. Leaves
  misc_feature: MA Experiment ID: 20001248 Result: Down-regulated in Transcription
  misc_feature: MA Experiment 20001248 PARAMETER Experiment Name: At_Far-red-induction_P Parameter: Age (day) Value: 7
  misc_feature: MA Experiment 20001248 PARAMETER Experiment Name: At_Far-red-induction_P Parameter: Light Value: Far-red vs. White
  misc_feature: MA Experiment 20001248 PARAMETER Experiment Name: At_Far-red-induction_P Parameter: Organism Value: A. thaliana
  misc_feature: MA Experiment 20001248 PARAMETER Experiment Name: At_Far-red-induction_P Parameter: Plant Line Value: Columbia
  misc_feature: MA Experiment 20001248 PARAMETER Experiment Name: At_Far-red-induction_P Parameter: Timepoint (hr) Value: 4
  misc_feature: MA Experiment 20001248 PARAMETER Experiment Name: At_Far-red-induction_P Parameter: Tissue Value: Whole Plant
  misc_feature: MA Experiment ID: 20001555 Result: Down-regulated in Transcription
  misc_feature: MA Experiment 20001555 PARAMETER Experiment Name: At_Drought_Soil_Dry_P Parameter: Age (day) Value: 24
  misc_feature: MA Experiment 20001555 PARAMETER Experiment Name: At_Drought_Soil_Dry_P Parameter: Organism Value: A. thaliana
  misc_feature: MA Experiment 20001555 PARAMETER Experiment Name: At_Drought_Soil_Dry_P Parameter: Plant Line Value: WS
  misc_feature: MA Experiment 20001555 PARAMETER Experiment Name: At_Drought_Soil_Dry_P Parameter: Post Timepoint (hr) Value: None
  misc_feature: MA Experiment 20001555 PARAMETER Experiment Name: At_Drought_Soil_Dry_P Parameter: Post-Treatment Value: None
  misc_feature: MA Experiment 20001555 PARAMETER Experiment Name: At_Drought_Soil_Dry_P Parameter: Timepoint (day) Value: 10
  misc_feature: MA Experiment 20001555 PARAMETER Experiment Name: At_Drought_Soil_Dry_P Parameter: Treatment Value: Drought vs. No Drought
acatcttaaaaagtaaaaacacattcatctatccaacaaaaaaaaaaaaaaaaaaggagaaatggaaggaatcgatcatagaatggtgagtgtcaatggcataactatgcacattgccgagaaaggtcccaaagaagggacctgtggtgcttctcctccatggattccctaatctctggtacacgtggcgtcaccagattagtgggttatcatctctaggttaccgcgctgtagctccagacctccgaggctacggagactctgattcgccagagtctttctccgagtacacgtgtcttaacgtcgttggggacctcgtagctcttctggacagtgttgctggaaatcaagagaaggtgtttctggtcggtcatgattggggagccattatcggatggtttctctgtttgtttcgacctgaaaagattaacggctttgtgtgtttgagtgtgccgtatagatcaagaaaccctaaagtcaagcccgttcaagggttcaaggctgtatttggagatgattactacatttgtagatttcaggaaccggggaagattgaaggagagattgcaagtgcagatccaagaatatttctgaggaacctcttcacagggaggacactcggtccgccgattttacctaaggataatccctttggggaaaaacctaaccctaatagcgaaaacattgaattgcctgaatggttttctaagaaagatctcgatttctatgtctccaaattcgagaaggcaggatttaccggtggattgaactactacagagccatggatctgaattgggagctcactgcaccatggaccggagctaagattcaagttccagtgaagttcatgacaggtgacttcgacatggtttacaccacaccagggatgaaagagtacattcacggtggtggatttgctgcagatgttccaactcttcaagagatagtggtgattgaagatgctggtcacttcgttaaccaagagaaacctcaagaggtcactgctcacatcaatgacttcttcaccaagcttcgggacaacaacaaaagcttttagagttctcgtttggttctattatgttggctctcaaaacaagttggttcttgcatgtgttgtttcgacaagattttgaataagacttggcattatgaagc

SEQ ID NO: 24608 - protein, 91 aa, Arabidopsis thaliana
  peptide (1)..(91): Ceres Seq. ID no. 12337905
  misc_feature (1)..(79): Pfam Name: alpha/beta hydrolase fold Pfam Description: alpha/beta hydrolase fold
  misc_feature (1)..(79): Pfam Name: alpha/beta hydrolase fold Pfam Description: alpha/beta hydrolase fold
  misc_feature (1)..(91): Homolog of NCBI NO: 15230018 NR Description: putative epoxide hydrolase
  misc_feature (1)..(91): Homolog of NCBI NO: 15230018 NR Description: putative epoxide hydrolase
MDLNWELTAPWTGAKIQVPVKFMTGDFDMVYTTPGMKEYIHGGGFAADVPTLQEIVVIEDAGHFVNQEKPQEVTAHINDFFTKLRDNNKSF

SEQ ID NO: 24609 - protein, 69 aa, Arabidopsis thaliana
  peptide (1)..(69): Ceres Seq. ID no. 12337906
  misc_feature (1)..(57): Pfam Name: alpha/beta hydrolase fold Pfam Description: alpha/beta hydrolase fold
  misc_feature (1)..(57): Pfam Name: alpha/beta hydrolase fold Pfam Description: alpha/beta hydrolase fold
  misc_feature (1)..(69): Homolog of NCBI NO: 15230018 NR Description: putative epoxide hydrolase
  misc_feature (1)..(69): Homolog of NCBI NO: 15230018 NR Description: putative epoxide hydrolase
MTGDFDMVYTTPGMKEYIHGGGFAADVPTLQEIVVIEDAGHFVNQEKPQEVTAHINDFFTKLRDNNKSF

SEQ ID NO: 24610 - protein, 63 aa, Arabidopsis thaliana
  peptide (1)..(63): Ceres Seq. ID no. 12337907
  misc_feature (1)..(51): Pfam Name: alpha/beta hydrolase fold Pfam Description: alpha/beta hydrolase fold
  misc_feature (1)..(51): Pfam Name: alpha/beta hydrolase fold Pfam Description: alpha/beta hydrolase fold
  misc_feature (1)..(63): Homolog of NCBI NO: 15230018 NR Description: putative epoxide hydrolase
  misc_feature (1)..(63): Homolog of NCBI NO: 15230018 NR Description: putative epoxide hydrolase
MVYTTPGMKEYIHGGGFAADVPTLQEIVVIEDAGHFVNQEKPQEVTAHINDFFTKLRDNNKSF

SEQ ID NO: 24611 - DNA, 1205 bp, Arabidopsis thaliana
  misc_feature (1)..(1205): Ceres Seq. ID no. 12322982
  misc_feature: MA Experiment ID: 108569 Result: Down-regulated in Transcription
  misc_feature: MA Experiment 108569 PARAMETER Experiment Name: At_0.001%_MeJA__cDNA_P Parameter: Timepoint (hr) Value: 6
  misc_feature: MA Experiment 108569 PARAMETER Experiment Name: At_0.001%_MeJA__cDNA_P Parameter: Tissue Value: Aerial
  misc_feature: MA Experiment 108569 PARAMETER Experiment Name: At_0.001%_MeJA__cDNA_P Parameter: Treatment Value: 0.001% MeJA vs. No Treatment
  misc_feature: MA Experiment ID: 108595 Result: Up-regulated in Transcription
  misc_feature: MA Experiment 108595 PARAMETER Experiment Name: At_Ler-pi_Ovule_cDNA_P Parameter: Plant Line Value: null
  misc_feature: MA Experiment ID: 20000184 Result: Down-regulated in Transcription
  misc_feature: MA Experiment 20000184 PARAMETER Experiment Name: At_Shoots__P Parameter: Age (day) Value: 7
  misc_feature: MA Experiment 20000184 PARAMETER Experiment Name: At_Shoots__P Parameter: Tissue Value: Shoots vs. Whole Plant
  misc_feature: MA Experiment ID: 20000227 Result: Down-regulated in Transcription
  misc_feature: MA Experiment 20000227 PARAMETER Experiment Name: At_Root-Tips-vs-Tops_P Parameter: Tissue Value: Root Tips vs. Root Tops
  misc_feature: MA Experiment ID: 20000234 Result: Down-regulated in Transcription
  misc_feature: MA Experiment 20000234 PARAMETER Experiment Name: At_Siliques_P Parameter: Age (day) Value: 21
  misc_feature: MA Experiment 20000234 PARAMETER Experiment Name: At_Siliques_P Parameter: Organism Value: A. thaliana
  misc_feature: MA Experiment 20000234 PARAMETER Experiment Name: At_Siliques_P Parameter: Plant Line Value: WS
  misc_feature: MA Experiment 20000234 PARAMETER Experiment Name: At_Siliques_P Parameter: Tissue Value: Less Than 5mm Siliques vs. Whole Plant
  misc_feature: MA Experiment ID: 20000235 Result: Down-regulated in Transcription
  misc_feature: MA Experiment 20000235 PARAMETER Experiment Name: At_Siliques_P Parameter: Age (day) Value: 21
  misc_feature: MA Experiment 20000235 PARAMETER Experiment Name: At_Siliques_P Parameter: Organism Value: A. thaliana
  misc_feature: MA Experiment 20000235 PARAMETER Experiment Name: At_Siliques_P Parameter: Plant Line Value: WS
  misc_feature: MA Experiment 20000235 PARAMETER Experiment Name: At_Siliques_P Parameter: Tissue Value: 5-10mm Siliques vs. Whole Plant
  misc_feature: MA Experiment ID: 20000264 Result: Down-regulated in Transcription
  misc_feature: MA Experiment 20000264 PARAMETER Experiment Name: At_Open_Flower_P Parameter: Age (day) Value: 21
  misc_feature: MA Experiment 20000264 PARAMETER Experiment Name: At_Open_Flower_P Parameter: Plant Line Value: WS
  misc_feature: MA Experiment 20000264 PARAMETER Experiment Name: At_Open_Flower_P Parameter: Tissue Value: Open Flower vs. Whole Plant
  misc_feature: MA Experiment ID: 20000265 Result: Down-regulated in Transcription
  misc_feature: MA Experiment 20000265 PARAMETER Experiment Name: At_Open_Flower_P Parameter: Age (day) Value: 21
  misc_feature: MA Experiment 20000265 PARAMETER Experiment Name: At_Open_Flower_P Parameter: Plant Line Value: WS
  misc_feature: MA Experiment 20000265 PARAMETER Experiment Name: At_Open_Flower_P Parameter: Tissue Value: Closed Flower vs. Whole Plant
  misc_feature: MA Experiment ID: 20000286 Result: Down-regulated in Transcription
  misc_feature: MA Experiment 20000286 PARAMETER Experiment Name: At_Open_Flower_P Parameter: Age (day) Value: 21
  misc_feature: MA Experiment 20000286 PARAMETER Experiment Name: At_Open_Flower_P Parameter: Plant Line Value: WS
  misc_feature: MA Experiment 20000286 PARAMETER Experiment Name: At_Open_Flower_P Parameter: Tissue Value: Half Open vs. Whole Plant
  misc_feature: MA Experiment ID: 20000437 Result: Up-regulated in Transcription
  misc_feature: MA Experiment 20000437 PARAMETER Experiment Name: At_Drought_P Parameter: Age (day) Value: 8
  misc_feature: MA Experiment 20000437 PARAMETER Experiment Name: At_Drought_P Parameter: Organism Value: A. thaliana
  misc_feature: MA Experiment 20000437 PARAMETER Experiment Name: At_Drought_P Parameter: Plant Line Value: WS
  misc_feature: MA Experiment 20000437 PARAMETER Experiment Name: At_Drought_P Parameter: Timepoint (hr) Value: 24
  misc_feature: MA Experiment 20000437 PARAMETER Experiment Name: At_Drought_P Parameter: Tissue Value: Whole Plant
  misc_feature: MA Experiment 20000437 PARAMETER Experiment Name: At_Drought_P Parameter: Treatment Value: Drought vs. No Drought
  misc_feature: MA Experiment ID: 20000438 Result: Down-regulated in Transcription
  misc_feature: MA Experiment 20000438 PARAMETER Experiment Name: At_Shoots__P Parameter: Age (day) Value: 14
  misc_feature: MA Experiment 20000438 PARAMETER Experiment Name: At_Shoots__P Parameter: Tissue Value: Shoots vs. Whole Plant
  misc_feature: MA Experiment ID: 20001248 Result: Up-regulated in Transcription
  misc_feature: MA Experiment 20001248 PARAMETER Experiment Name: At_Far-red-induction_P Parameter: Age (day) Value: 7
  misc_feature: MA Experiment 20001248 PARAMETER Experiment Name: At_Far-red-induction_P Parameter: Light Value: Far-red vs. White
  misc_feature: MA Experiment 20001248 PARAMETER Experiment Name: At_Far-red-induction_P Parameter: Organism Value: A. thaliana
  misc_feature: MA Experiment 20001248 PARAMETER Experiment Name: At_Far-red-induction_P Parameter: Plant Line Value: Columbia
  misc_feature: MA Experiment 20001248 PARAMETER Experiment Name: At_Far-red-induction_P Parameter: Timepoint (hr) Value: 4
  misc_feature: MA Experiment 20001248 PARAMETER Experiment Name: At_Far-red-induction_P Parameter: Tissue Value: Whole Plant
attcatttttgttctcttatttactttagtcctctcgaatcccataaagtccacaactctctccttgtagagagagagattttatggcggtggagctcatgactcggaattacatctccggcgtcggagctgatagcttcgccgttcaagaagcagctgcttcaggactcaaaagtatcgaaaatttcatcggtttaatgtctcgtgatagctttaactctgatcagccatcttcttcttccgcctccgcctccgcctccgccgccgcagatcttgaatcagctcgtaacacaacggcggacgcggctgtttcaaagtttaaaagagtcatatctctcttagatcgaactcgaaccggacacgcccggtttagacgtgctccggttcatgttatttctccggttcttttacaagaagaaccaaaaacgacgccgtttcagtctcctcttcctcctccgccgcaaatgatccgaaaaggttcgttttcttcatcgatgaaaacgattgatttctcatctctctcctctgtaacaacggaatcagacaaccagaagaagattcatcatcatcaacgtccctctgaaacggcgccgtttgcgtctcaaactcaaagcctctccacgacggtctcgtctttctcaaaatcaacaaagagaaaatgtaactctgagaatcttctcaccggaaaatgcgcttccgcttcttcctccggtcgttgtcattgctcgaagaaaagaaagataaaacagaggagaataattagggttccggcgataagtgcaaaaatgtccgatgtaccaccggacgattattcatggaggaaatacggacaaaaaccaattaaaggatctccacatccaagaggatattataagtgtagtagcgtaagaggttgtccagcacgtaaacatgttgagagagcagctgatgattcgtccatgttgattgttacttatgaaggagatcataatcattctctctccgccgctgatctcgccggagccgccgttgctgatcttattttggaatcgtcttgaaaagaacaaatctttatttaaggcttttataatataaatttagatccttacttagtgaagtactcttttttttttctattatcaaacgatagaaactatgaatgaaatcaatgtaatcaaaaagcttttgctaaattgtaattgtgatatattcatcatgtttacttg

SEQ ID NO: 24612 - protein, 317 aa, Arabidopsis thaliana
  peptide (1)..(317): Ceres Seq. ID no. 12322983
  misc_feature (239)..(299): Pfam Name: WRKY DNA -binding domain Pfam Description: WRKY DNA -binding domain
  misc_feature (1)..(317): Homolog of NCBI NO: 22329054 NR Description: WRKY family transcription factor
  misc_feature (17)..(302): Homolog of NCBI NO: 38568048 NR Description: OSJNBa0065J03.18 [Oryza sativa (japonica
  misc_feature (100)..(301): Homolog of NCBI NO: 7488950 NR Description: DNA-binding protein WRKY3 - parsley
  misc_feature (116)..(317): Homolog of NCBI NO: 10798760 NR Description: WRKY transcription factor Nt-SubD48 [Nicotiana
  misc_feature (1)..(298): Homolog of NCBI NO: 38175580 NR Description: putative DNA-binding protein NtWRKY3
  misc_feature (37)..(310): Homolog of NCBI NO: 38346908 NR Description: OSJNBb0015N08.8 [Oryza sativa (japonica
  misc_feature (1)..(307): Homolog of NCBI NO: 4894963 NR Description: DNA-binding protein WRKY3 [Avena sativa]
  misc_feature (1)..(106): Homolog of NCBI NO: 15233752 NR Description: WRKY family transcription factor
  misc_feature (126)..(299): Homolog of NCBI NO: 15233752 NR Description: WRKY family transcription factor
  misc_feature (1)..(317): Homolog of NCBI NO: 15227812 NR Description: WRKY family transcription factor
MAVELMTRNYISGVGADSFAVQEAAASGLKSIENFIGLMSRDSFNSDQPSSSSASASASAAADLESARNTTADAAVSKFKRVISLLDRTRTGHARFRRAPVHVISPVLLQEEPKTTPFQSPLPPPPQMIRKGSFSSSMKTIDFSSLSSVTTESDNQKKIHHHQRPSETAPFASQTQSLSTTVSSFSKSTKRKCNSENLLTGKCASASSSGRCHCSKKRKIKQRRIIRVPAISAKMSDVPPDDYSWRKYGQKPIKGSPHPRGYYKCSSVRGCPARKHVERAADDSSMLIVTYEGDHNHSLSAADLAGAAVADLILESS

SEQ ID NO: 24613 - protein, 312 aa, Arabidopsis thaliana
  peptide (1)..(312): Ceres Seq. ID no. 12322984
  misc_feature (234)..(294): Pfam Name: WRKY DNA -binding domain Pfam Description: WRKY DNA -binding domain
  misc_feature (1)..(312): Homolog of NCBI NO: 22329054 NR Description: WRKY family transcription factor
  misc_feature (12)..(297): Homolog of NCBI NO: 38568048 NR Description: OSJNBa0065J03.18 [Oryza sativa (japonica
  misc_feature (95)..(296): Homolog of NCBI NO: 7488950 NR Description: DNA-binding protein WRKY3 - parsley
  misc_feature (111)..(312): Homolog of NCBI NO: 10798760 NR Description: WRKY transcription factor Nt-SubD48 [Nicotiana
  misc_feature (1)..(293): Homolog of NCBI NO: 38175580 NR Description: putative DNA-binding protein NtWRKY3
  misc_feature (32)..(305): Homolog of NCBI NO: 38346908 NR Description: OSJNBb0015N08.8 [Oryza sativa (japonica
  misc_feature (1)..(302): Homolog of NCBI NO: 4894963 NR Description: DNA-binding protein WRKY3 [Avena sativa]
  misc_feature (1)..(101): Homolog of NCBI NO: 15233752 NR Description: WRKY family transcription factor
  misc_feature (121)..(294): Homolog of NCBI NO: 15233752 NR Description: WRKY family transcription factor
  misc_feature (1)..(312): Homolog of NCBI NO: 15227812 NR Description: WRKY family transcription factor
MTRNYISGVGADSFAVQEAAASGLKSIENFIGLMSRDSFNSDQPSSSSASASASAAADLESARNTTADAAVSKFKRVISLLDRTRTGHARFRRAPVHVISPVLLQEEPKTTPFQSPLPPPPQMIRKGSFSSSMKTIDFSSLSSVTTESDNQKKIHHHQRPSETAPFASQTQSLSTTVSSFSKSTKRKCNSENLLTGKCASASSSGRCHCSKKRKIKQRRIIRVPAISAKMSDVPPDDYSWRKYGQKPIKGSPHPRGYYKCSSVRGCPARKHVERAADDSSMLIVTYEGDHNHSLSAADLAGAAVADLILESS

SEQ ID NO: 24614 - protein, 279 aa, Arabidopsis thaliana
  peptide (1)..(279): Ceres Seq. ID no. 12322985
  misc_feature (201)..(261): Pfam Name: WRKY DNA -binding domain Pfam Description: WRKY DNA -binding domain
  misc_feature (1)..(279): Homolog of NCBI NO: 22329054 NR Description: WRKY family transcription factor
  misc_feature (1)..(264): Homolog of NCBI NO: 38568048 NR Description: OSJNBa0065J03.18 [Oryza sativa (japonica
  misc_feature (62)..(263): Homolog of NCBI NO: 7488950 NR Description: DNA-binding protein WRKY3 - parsley
  misc_feature (78)..(279): Homolog of NCBI NO: 10798760 NR Description: WRKY transcription factor Nt-SubD48 [Nicotiana
  misc_feature (1)..(260): Homolog of NCBI NO: 38175580 NR Description: putative DNA-binding protein NtWRKY3
  misc_feature (1)..(272): Homolog of NCBI NO: 38346908 NR Description: OSJNBb0015N08.8 [Oryza sativa (japonica
  misc_feature (1)..(269): Homolog of NCBI NO: 4894963 NR Description: DNA-binding protein WRKY3 [Avena sativa]
  misc_feature (1)..(68): Homolog of NCBI NO: 15233752 NR Description: WRKY family transcription factor
  misc_feature (88)..(261): Homolog of NCBI NO: 15233752 NR Description: WRKY family transcription factor
  misc_feature (1)..(279): Homolog of NCBI NO: 15227812 NR Description: WRKY family transcription factor
MSRDSFNSDQPSSSSASASASAAADLESARNTTADAAVSKFKRVISLLDRTRTGHARFRRAPVHVISPVLLQEEPKTTPFQSPLPPPPQMIRKGSFSSSMKTIDFSSLSSVTTESDNQKKIHHHQRPSETAPFASQTQSLSTTVSSFSKSTKRKCNSENLLTGKCASASSSGRCHCSKKRKIKQRRIIRVPAISAKMSDVPPDDYSWRKYGQKPIKGSPHPRGYYKCSSVRGCPARKHVERAADDSSMLIVTYEGDHNHSLSAADLAGAAVADLILESS

SEQ ID NO: 24615 - DNA, 735 bp, Arabidopsis thaliana
  misc_feature (1)..(735): Ceres Seq. ID no. 12602648
  misc_feature: MA Experiment ID: 20000173 Result: Down-regulated in Transcription
  misc_feature: MA Experiment 20000173 PARAMETER Experiment Name: At_42deg_Heat_P Parameter: Age (day) Value: 14
  misc_feature: MA Experiment 20000173 PARAMETER Experiment Name: At_42deg_Heat_P Parameter: Organism Value: A. thaliana
  misc_feature: MA Experiment 20000173 PARAMETER Experiment Name: At_42deg_Heat_P Parameter: Plant Line Value: WS
  misc_feature: MA Experiment 20000173 PARAMETER Experiment Name: At_42deg_Heat_P Parameter: Temperature (deg C) Value: 42 vs. 22
  misc_feature: MA Experiment 20000173 PARAMETER Experiment Name: At_42deg_Heat_P Parameter: Timepoint (hr) Value: 6
  misc_feature: MA Experiment 20000173 PARAMETER Experiment Name: At_42deg_Heat_P Parameter: Tissue Value: Aerial
  misc_feature: MA Experiment ID: 20000185 Result: Up-regulated in Transcription
  misc_feature: MA Experiment 20000185 PARAMETER Experiment Name: At_Roots__P Parameter: Age (day) Value: 7 vs. 21
  misc_feature: MA Experiment 20000185 PARAMETER Experiment Name: At_Roots__P Parameter: Organism Value: A. thaliana
  misc_feature: MA Experiment 20000185 PARAMETER Experiment Name: At_Roots__P Parameter: Tissue Value: Roots vs. Whole Plant
  misc_feature: MA Experiment ID: 20000234 Result: Up-regulated in Transcription
  misc_feature: MA Experiment 20000234 PARAMETER Experiment Name: At_Siliques_P Parameter: Age (day) Value: 21
  misc_feature: MA Experiment 20000234 PARAMETER Experiment Name: At_Siliques_P Parameter: Organism Value: A. thaliana
  misc_feature: MA Experiment 20000234 PARAMETER Experiment Name: At_Siliques_P Parameter: Plant Line Value: WS
  misc_feature: MA Experiment 20000234 PARAMETER Experiment Name: At_Siliques_P Parameter: Tissue Value: Less Than 5mm Siliques vs. Whole Plant
  misc_feature: MA Experiment ID: 20000439 Result: Up-regulated in Transcription
  misc_feature: MA Experiment 20000439 PARAMETER Experiment Name: At_Roots__P Parameter: Age (day) Value: 14 vs. 21
  misc_feature: MA Experiment 20000439 PARAMETER Experiment Name: At_Roots__P Parameter: Organism Value: A. thaliana
  misc_feature: MA Experiment 20000439 PARAMETER Experiment Name: At_Roots__P Parameter: Tissue Value: Roots vs. Whole Plant
  misc_feature: MA Experiment ID: 20000495 Result: Up-regulated in Transcription
  misc_feature: MA Experiment 20000495 PARAMETER Experiment Name: At_Guard_Cells_P Parameter: Harvest Date Value: 8/2/2002
  misc_feature: MA Experiment 20000495 PARAMETER Experiment Name: At_Guard_Cells_P Parameter: Organism Value: A. thaliana
  misc_feature: MA Experiment 20000495 PARAMETER Experiment Name: At_Guard_Cells_P Parameter: Tissue Value: Guard Cells vs. Leaves
  misc_feature: MA Experiment ID: 20000496 Result: Up-regulated in Transcription
  misc_feature: MA Experiment 20000496 PARAMETER Experiment Name: At_Guard_Cells_P Parameter: Harvest Date Value: 7/19/2002
  misc_feature: MA Experiment 20000496 PARAMETER Experiment Name: At_Guard_Cells_P Parameter: Organism Value: Canola
  misc_feature: MA Experiment 20000496 PARAMETER Experiment Name: At_Guard_Cells_P Parameter: Tissue Value: Guard Cells vs. Leaves
aaaataaaggagatcagtttgggagaaagcagcaaagaagaaaaatggcagcaacatttgcaacaccatcgacggtgataggcctcggaggatcatccatcaccaccaaacccttctcttcatcctttttaaaaccaacattaagcgccaagaaccctttgagactcgccggtgcatcgggaggaagagtcacttgctttgagaggaactggttgaggagagatttgaacgtggtaggatttgggctgatcggatggctagtacggctacatcgctccagaatatgcatatacactgagaatagacgagaagagcgatgtgtacagcttcggagtagtgttattggagctgattacgggtcgaaaaccagtagataattttggggaagaagggatagacattgtgcaatggtcaaagatccaaacaaactgtaacagacaaggtgtggtgaagatcattgaccagagattgagcaatattccattagcagaggccatggaactgttctttgtggcaatgctatgtgtgcaagaacatagtgttgagagaccgaccatgagagaggttgtccagatgatctctcaggctaaacagcctaatactttctaaatgcagtgatgttatatatataagagactaaatatatatttttctgttttatgtgtttcatagagttttgtttttagaatttgtaatgatggtttggtggtgatatgagtctatattgaaattgag

SEQ ID NO: 24616 - protein, 124 aa, Arabidopsis thaliana
  peptide (1)..(124): Ceres Seq. ID no. 12602649
  misc_feature (23)..(86): Homolog of NCBI NO: 32479727 NR Description: OJ991214_12.3 [Oryza sativa (japonica
  misc_feature (15)..(86): Homolog of NCBI NO: 22531014 NR Description: expressed protein [Arabidopsis thaliana]
  misc_feature (15)..(86): Homolog of NCBI NO: 18390888 NR Description: expressed protein
NKGDQFGRKQQRRKMAATFATPSTVIGLGGSSITTKPFSSSFLKPTLSAKNPLRLAGASGGRVTCFERNWLRRDLNVVGFGLIGWLVRLHRSRICIYTENRREERCVQLRSSVIGADYGSKTSR

SEQ ID NO: 24617 - protein, 110 aa, Arabidopsis thaliana
  peptide (1)..(110): Ceres Seq. ID no. 12602650
  misc_feature (9)..(72): Homolog of NCBI NO: 32479727 NR Description: OJ991214_12.3 [Oryza sativa (japonica
  misc_feature (1)..(72): Homolog of NCBI NO: 22531014 NR Description: expressed protein [Arabidopsis thaliana]
  misc_feature (1)..(72): Homolog of NCBI NO: 18390888 NR Description: expressed protein
MAATFATPSTVIGLGGSSITTKPFSSSFLKPTLSAKNPLRLAGASGGRVTCFERNWLRRDLNVVGFGLIGWLVRLHRSRICIYTENRREERCVQLRSSVIGADYGSKTSR

SEQ ID NO: 24618 - DNA, 969 bp, Arabidopsis thaliana
  misc_feature (1)..(969): Ceres Seq. ID no. 12323016
  misc_feature: MA Experiment ID: 108461 Result: Up-regulated in Transcription
  misc_feature: MA Experiment 108461 PARAMETER Experiment Name: At_Germinating_Seeds_cDNA_P Parameter: Age (day) Value: 1 vs. 0
  misc_feature: MA Experiment 108461 PARAMETER Experiment Name: At_Germinating_Seeds_cDNA_P Parameter: Tissue Value: Germinating Seeds
  misc_feature: MA Experiment ID: 108462 Result: Up-regulated in Transcription
  misc_feature: MA Experiment 108462 PARAMETER Experiment Name: At_Germinating_Seeds_cDNA_P Parameter: Age (day) Value: 2 vs. 0
  misc_feature: MA Experiment 108462 PARAMETER Experiment Name: At_Germinating_Seeds_cDNA_P Parameter: Tissue Value: Germinating Seeds
  misc_feature: MA Experiment ID: 108463 Result: Up-regulated in Transcription
  misc_feature: MA Experiment 108463 PARAMETER Experiment Name: At_Germinating_Seeds_cDNA_P Parameter: Age (day) Value: 3 vs. 0
  misc_feature: MA Experiment 108463 PARAMETER Experiment Name: At_Germinating_Seeds_cDNA_P Parameter: Tissue Value: Germinating Seeds
  misc_feature: MA Experiment ID: 108573 Result: Down-regulated in Transcription
  misc_feature: MA Experiment 108573 PARAMETER Experiment Name: At_Drought_cDNA_P Parameter: Timepoint (hr) Value: 6
  misc_feature: MA Experiment 108573 PARAMETER Experiment Name: At_Drought_cDNA_P Parameter: Tissue Value: Aerial
  misc_feature: MA Experiment 108573 PARAMETER Experiment Name: At_Drought_cDNA_P Parameter: Treatment Value: Drought vs. No Drought
  misc_feature: MA Experiment ID: 20000069 Result: Up-regulated in Transcription
  misc_feature: MA Experiment 20000069 PARAMETER Experiment Name: At_100uM_ABA_Mutants_cDNA_P Parameter: Plant Line Value: CS23
  misc_feature: MA Experiment 20000069 PARAMETER Experiment Name: At_100uM_ABA_Mutants_cDNA_P Parameter: Timepoint (hr) Value: 6
  misc_feature: MA Experiment 20000069 PARAMETER Experiment Name: At_100uM_ABA_Mutants_cDNA_P Parameter: Tissue Value: Aerial
  misc_feature: MA Experiment 20000069 PARAMETER Experiment Name: At_100uM_ABA_Mutants_cDNA_P Parameter: Treatment Value: 100uM ABA vs. No Treatment
  misc_feature: MA Experiment ID: 20000070 Result: Up-regulated in Transcription
  misc_feature: MA Experiment 20000070 PARAMETER Experiment Name: At_100uM_ABA_Mutants_cDNA_P Parameter: Plant Line Value: CS24
  misc_feature: MA Experiment 20000070 PARAMETER Experiment Name: At_100uM_ABA_Mutants_cDNA_P Parameter: Timepoint (hr) Value: 6
  misc_feature: MA Experiment 20000070 PARAMETER Experiment Name: At_100uM_ABA_Mutants_cDNA_P Parameter: Tissue Value: Aerial
  misc_feature: MA Experiment 20000070 PARAMETER Experiment Name: At_100uM_ABA_Mutants_cDNA_P Parameter: Treatment Value: 100uM ABA vs. No Treatment
  misc_feature: MA Experiment ID: 20000071 Result: Up-regulated in Transcription
  misc_feature: MA Experiment 20000071 PARAMETER Experiment Name: At_100uM_ABA_Mutants_cDNA_P Parameter: Plant Line Value: CS8104
  misc_feature: MA Experiment 20000071 PARAMETER Experiment Name: At_100uM_ABA_Mutants_cDNA_P Parameter: Timepoint (hr) Value: 6
  misc_feature: MA Experiment 20000071 PARAMETER Experiment Name: At_100uM_ABA_Mutants_cDNA_P Parameter: Tissue Value: Aerial
  misc_feature: MA Experiment 20000071 PARAMETER Experiment Name: At_100uM_ABA_Mutants_cDNA_P Parameter: Treatment Value: 100uM ABA vs. No Treatment
  misc_feature: MA Experiment ID: 20000072 Result: Up-regulated in Transcription
  misc_feature: MA Experiment 20000072 PARAMETER Experiment Name: At_100uM_ABA_Mutants_cDNA_P Parameter: Plant Line Value: CS8105
  misc_feature: MA Experiment 20000072 PARAMETER Experiment Name: At_100uM_ABA_Mutants_cDNA_P Parameter: Timepoint (hr) Value: 6
  misc_feature: MA Experiment 20000072 PARAMETER Experiment Name: At_100uM_ABA_Mutants_cDNA_P Parameter: Tissue Value: Aerial
  misc_feature: MA Experiment 20000072 PARAMETER Experiment Name: At_100uM_ABA_Mutants_cDNA_P Parameter: Treatment Value: 100uM ABA vs. No Treatment
  misc_feature: MA Experiment ID: 20000086 Result: Up-regulated in Transcription
  misc_feature: MA Experiment 20000086 PARAMETER Experiment Name: At_100uM_ABA_Mutants_cDNA_P Parameter: Plant Line Value: CS22
  misc_feature: MA Experiment 20000086 PARAMETER Experiment Name: At_100uM_ABA_Mutants_cDNA_P Parameter: Timepoint (hr) Value: 6
  misc_feature: MA Experiment 20000086 PARAMETER Experiment Name: At_100uM_ABA_Mutants_cDNA_P Parameter: Tissue Value: Aerial
  misc_feature: MA Experiment 20000086 PARAMETER Experiment Name: At_100uM_ABA_Mutants_cDNA_P Parameter: Treatment Value: 100uM ABA vs. No Treatment
  misc_feature: MA Experiment ID: 20000088 Result: Up-regulated in Transcription
  misc_feature: MA Experiment 20000088 PARAMETER Experiment Name: At_100uM_ABA_Mutants_cDNA_P Parameter: Plant Line Value: Landsberg
  misc_feature: MA Experiment 20000088 PARAMETER Experiment Name: At_100uM_ABA_Mutants_cDNA_P Parameter: Timepoint (hr) Value: 6
  misc_feature: MA Experiment 20000088 PARAMETER Experiment Name: At_100uM_ABA_Mutants_cDNA_P Parameter: Tissue Value: Aerial
  misc_feature: MA Experiment 20000088 PARAMETER Experiment Name: At_100uM_ABA_Mutants_cDNA_P Parameter: Treatment Value: 100uM ABA vs. No Treatment
  misc_feature: MA Experiment ID: 20000089 Result: Up-regulated in Transcription
  misc_feature: MA Experiment ID: 20000090 Result: Up-regulated in Transcription
  misc_feature: MA Experiment ID: 20000111 Result: Down-regulated in Transcription
  misc_feature: MA Experiment 20000111 PARAMETER Experiment Name: At_42deg_Heat_cDNA_P Parameter: Temperature (deg C) Value: 42 vs. 22
  misc_feature: MA Experiment 20000111 PARAMETER Experiment Name: At_42deg_Heat_cDNA_P Parameter: Timepoint (hr) Value: 6
  misc_feature: MA Experiment 20000111 PARAMETER Experiment Name: At_42deg_Heat_cDNA_P Parameter: Tissue Value: Aerial
  misc_feature: MA Experiment ID: 20000113 Result: Down-regulated in Transcription
  misc_feature: MA Experiment 20000113 PARAMETER Experiment Name: At_42deg_Heat_cDNA_P Parameter: Temperature (deg C) Value: 42 vs. 22
  misc_feature: MA Experiment 20000113 PARAMETER Experiment Name: At_42deg_Heat_cDNA_P Parameter: Timepoint (hr) Value: 8
  misc_feature: MA Experiment 20000113 PARAMETER Experiment Name: At_42deg_Heat_cDNA_P Parameter: Tissue Value: Aerial
  misc_feature: MA Experiment ID: 20000117 Result: Up-regulated in Transcription
  misc_feature: MA Experiment 20000117 PARAMETER Experiment Name: At_100uM_ABA_Mutants_cDNA_P Parameter: Plant Line Value: Columbia
  misc_feature: MA Experiment 20000117 PARAMETER Experiment Name: At_100uM_ABA_Mutants_cDNA_P Parameter: Timepoint (hr) Value: 6
  misc_feature: MA Experiment 20000117 PARAMETER Experiment Name: At_100uM_ABA_Mutants_cDNA_P Parameter: Tissue Value: Aerial
  misc_feature: MA Experiment 20000117 PARAMETER Experiment Name: At_100uM_ABA_Mutants_cDNA_P Parameter: Treatment Value: 100uM ABA vs. No Treatment
  misc_feature: MA Experiment ID: 20000173 Result: Down-regulated in Transcription
  misc_feature: MA Experiment 20000173 PARAMETER Experiment Name: At_42deg_Heat_P Parameter: Age (day) Value: 14
  misc_feature: MA Experiment 20000173 PARAMETER Experiment Name: At_42deg_Heat_P Parameter: Organism Value: A. thaliana
  misc_feature: MA Experiment 20000173 PARAMETER Experiment Name: At_42deg_Heat_P Parameter: Plant Line Value: WS
  misc_feature: MA Experiment 20000173 PARAMETER Experiment Name: At_42deg_Heat_P Parameter: Temperature (deg C) Value: 42 vs. 22
  misc_feature: MA Experiment 20000173 PARAMETER Experiment Name: At_42deg_Heat_P Parameter: Timepoint (hr) Value: 6
  misc_feature: MA Experiment 20000173 PARAMETER Experiment Name: At_42deg_Heat_P Parameter: Tissue Value: Aerial
  misc_feature: MA Experiment ID: 20000179 Result: Up-regulated in Transcription
  misc_feature: MA Experiment 20000179 PARAMETER Experiment Name: At_Germinating_Seeds_P Parameter: Age (hr) Value: 6 vs. 0
  misc_feature: MA Experiment 20000179 PARAMETER Experiment Name: At_Germinating_Seeds_P Parameter: Tissue Value: Germinating Seeds
  misc_feature: MA Experiment ID: 20000180 Result: Up-regulated in Transcription
  misc_feature: MA Experiment 20000180 PARAMETER Experiment Name: At_Germinating_Seeds_P Parameter: Age (hr) Value: 24 vs. 0
  misc_feature: MA Experiment 20000180 PARAMETER Experiment Name: At_Germinating_Seeds_P Parameter: Tissue Value: Germinating Seeds
  misc_feature: MA Experiment ID: 20000184 Result: Down-regulated in Transcription
  misc_feature: MA Experiment 20000184 PARAMETER Experiment Name: At_Shoots__P Parameter: Age (day) Value: 7
  misc_feature: MA Experiment 20000184 PARAMETER Experiment Name: At_Shoots__P Parameter: Tissue Value: Shoots vs. Whole Plant
  misc_feature: MA Experiment ID: 20000234 Result: Up-regulated in Transcription
  misc_feature: MA Experiment 20000234 PARAMETER Experiment Name: At_Siliques_P Parameter: Age (day) Value: 21
  misc_feature: MA Experiment 20000234 PARAMETER Experiment Name: At_Siliques_P Parameter: Organism Value: A. thaliana
  misc_feature: MA Experiment 20000234 PARAMETER Experiment Name: At_Siliques_P Parameter: Plant Line Value: WS
  misc_feature: MA Experiment 20000234 PARAMETER Experiment Name: At_Siliques_P Parameter: Tissue Value: Less Than 5mm Siliques vs. Whole Plant
  misc_feature: MA Experiment ID: 20000794 Result: Up-regulated in Transcription
  misc_feature: MA Experiment 20000794 PARAMETER Experiment Name: At_Petals_P Parameter: Age (day) Value: 23-25 days
  misc_feature: MA Experiment 20000794 PARAMETER Experiment Name: At_Petals_P Parameter: Plant Line Value: WS
  misc_feature: MA Experiment 20000794 PARAMETER Experiment Name: At_Petals_P Parameter: Tissue Value: Petals vs. Whole plant
  misc_feature: MA Experiment ID: 20001905 Result: Down-regulated in Transcription
  misc_feature: MA Experiment 20001905 PARAMETER Experiment Name: At_Drought_Reproduction_P Parameter: Age (day) Value: 40
  misc_feature: MA Experiment 20001905 PARAMETER Experiment Name: At_Drought_Reproduction_P Parameter: Organism Value: A. thaliana
  misc_feature: MA Experiment 20001905 PARAMETER Experiment Name: At_Drought_Reproduction_P Parameter: Plant Line Value: WS
  misc_feature: MA Experiment 20001905 PARAMETER Experiment Name: At_Drought_Reproduction_P Parameter: Timepoint (day) Value: 10
  misc_feature: MA Experiment 20001905 PARAMETER Experiment Name: At_Drought_Reproduction_P Parameter: Tissue Value: Rosettes
  misc_feature: MA Experiment 20001905 PARAMETER Experiment Name: At_Drought_Reproduction_P Parameter: Treatment Value: Drought vs. No Drought
  misc_feature: MA Experiment ID: 20001906 Result: Down-regulated in Transcription
  misc_feature: MA Experiment 20001906 PARAMETER Experiment Name: At_Drought_Reproduction_P Parameter: Age (day) Value: 35
  misc_feature: MA Experiment 20001906 PARAMETER Experiment Name: At_Drought_Reproduction_P Parameter: Organism Value: A. thaliana
  misc_feature: MA Experiment 20001906 PARAMETER Experiment Name: At_Drought_Reproduction_P Parameter: Plant Line Value: WS
  misc_feature: MA Experiment 20001906 PARAMETER Experiment Name: At_Drought_Reproduction_P Parameter: Timepoint (day) Value: 5
  misc_feature: MA Experiment 20001906 PARAMETER Experiment Name: At_Drought_Reproduction_P Parameter: Tissue Value: Siliques
  misc_feature: MA Experiment 20001906 PARAMETER Experiment Name: At_Drought_Reproduction_P Parameter: Treatment Value: Drought vs. No Drought
  misc_feature: MA Experiment ID: 20001908 Result: Down-regulated in Transcription
  misc_feature: MA Experiment 20001908 PARAMETER Experiment Name: At_Drought_Reproduction_P Parameter: Age (day) Value: 40
  misc_feature: MA Experiment 20001908 PARAMETER Experiment Name: At_Drought_Reproduction_P Parameter: Organism Value: A. thaliana
  misc_feature: MA Experiment 20001908 PARAMETER Experiment Name: At_Drought_Reproduction_P Parameter: Plant Line Value: WS
  misc_feature: MA Experiment 20001908 PARAMETER Experiment Name: At_Drought_Reproduction_P Parameter: Timepoint (day) Value: 10
  misc_feature: MA Experiment 20001908 PARAMETER Experiment Name: At_Drought_Reproduction_P Parameter: Tissue Value: Siliques
  misc_feature: MA Experiment 20001908 PARAMETER Experiment Name: At_Drought_Reproduction_P Parameter: Treatment Value: Drought vs. No Drought
  misc_feature: MA Experiment ID: 20001911 Result: Down-regulated in Transcription
  misc_feature: MA Experiment 20001911 PARAMETER Experiment Name: At_Drought_Reproduction_P Parameter: Age (day) Value: 40
  misc_feature: MA Experiment 20001911 PARAMETER Experiment Name: At_Drought_Reproduction_P Parameter: Organism Value: A. thaliana
  misc_feature: MA Experiment 20001911 PARAMETER Experiment Name: At_Drought_Reproduction_P Parameter: Plant Line Value: WS
  misc_feature: MA Experiment 20001911 PARAMETER Experiment Name: At_Drought_Reproduction_P Parameter: Timepoint (day) Value: 10
  misc_feature: MA Experiment 20001911 PARAMETER Experiment Name: At_Drought_Reproduction_P Parameter: Tissue Value: Flowers
  misc_feature: MA Experiment 20001911 PARAMETER Experiment Name: At_Drought_Reproduction_P Parameter: Treatment Value: Drought vs. No Drought
aattgacaatctctttctttcatcttcatcttattcttctttatctctctctctctctcaggactattgagcttctttcttttttcctgagtcttttagtctgatctcttacaagaaacaacaagaatggctttcgcaggaacaacccagaaatgcatggcctgtgacaaaacagtttatcttgtcgacaagttaaccgccgataaccgggtctaccacaaagcttgtttccgatgtcaccattgcaaaggaactctcaagcttagcaattacaactcctttgaaggagttctctactgcagaccacatttcgatcaaaacttcaagagaactggaagtcttgagaaaagcttcgaagggacaccaaagattgggaaacctgataggcctttggagggagagagacctgctggaaccaaagtttcgaatatgtttggtggaacacgagagaaatgcgttggttgcgacaaaaccgtgtatccaattgagaaggtatcggtgaatggaacattgtaccacaagagctgcttcaagtgtacacatggaggctgcacgataagcccttcgaattacatagctcacgagggtaagctatattgcaagcatcatcatattcagctgatcaaggagaaaggaaacttgagccagctcgaaggaggaggagagaatgccgccaaggacaaagtcgtcgctgcttaaagaaacaattcaatctctctgggatgattttgactatcgaagaatcaaaagagtcactacttctccatcgatcgataacatatattggttttgtttcttcctacgtttgtgtttttctttttggtctttaatatgttttttttttttgggacctttgttcactcttttattgggtttcttgaaatgaaactagagaaacaaagaaataatggatgtttgcttatgagatatatatgtattacgttcatatgatataaattaattttcgcg

SEQ ID NO: 24619 - protein, 190 aa, Arabidopsis thaliana
  peptide (1)..(190): Ceres Seq. ID no. 12323017
  misc_feature (10)..(67): Pfam Name: LIM domain Pfam Description: LIM domain
  misc_feature (1)..(180): Homolog of NCBI NO: 5932418 NR Description: LIM domain protein PLIM1 [Nicotiana tabacum]
  misc_feature (1)..(184): Homolog of NCBI NO: 5932436 NR Description: LIM domain protein WLIM1 [Helianthus annuus]
  misc_feature (1)..(180): Homolog of NCBI NO: 6467903 NR Description: pollen specific LIM domain protein 1a [Nicotiana
  misc_feature (1)..(184): Homolog of NCBI NO: 5070280 NR Description: LIM domain protein WLIM-1 [Helianthus annuus]
  misc_feature (1)..(190): Homolog of NCBI NO: 5689136 NR Description: transcription factor Ntlim1 [Nicotiana tabacum]
  misc_feature (1)..(190): Homolog of NCBI NO: 5932413 NR Description: LIM domain protein WLIM1 [Nicotiana tabacum]
  misc_feature (1)..(190): Homolog of NCBI NO: 18565124 NR Description: transcription factor LIM [Nicotiana tabacum]
  misc_feature (1)..(177): Homolog of NCBI NO: 18565116 NR Description: transcription factor LIM [Populus kitakamiensis]
  misc_feature (1)..(177): Homolog of NCBI NO: 18565112 NR Description: transcription factor LIM [Populus kitakamiensis]
  misc_feature (1)..(190): Homolog of NCBI NO: 15218450 NR Description: putative transcription factor
MAFAGTTQKCMACDKTVYLVDKLTADNRVYHKACFRCHHCKGTLKLSNYNSFEGVLYCRPHFDQNFKRTGSLEKSFEGTPKIGKPDRPLEGERPAGTKVSNMFGGTREKCVGCDKTVYPIEKVSVNGTLYHKSCFKCTHGGCTISPSNYIAHEGKLYCKHHHIQLIKEKGNLSQLEGGGENAAKDKVVAA

SEQ ID NO: 24620 - protein, 180 aa, Arabidopsis thaliana
  peptide (1)..(180): Ceres Seq. ID no. 12323018
  misc_feature (1)..(57): Pfam Name: LIM domain Pfam Description: LIM domain
  misc_feature (1)..(170): Homolog of NCBI NO: 5932418 NR Description: LIM domain protein PLIM1 [Nicotiana tabacum]
  misc_feature (1)..(174): Homolog of NCBI NO: 5932436 NR Description: LIM domain protein WLIM1 [Helianthus annuus]
  misc_feature (1)..(170): Homolog of NCBI NO: 6467903 NR Description: pollen specific LIM domain protein 1a [Nicotiana
  misc_feature (1)..(174): Homolog of NCBI NO: 5070280 NR Description: LIM domain protein WLIM-1 [Helianthus annuus]
  misc_feature (1)..(180): Homolog of NCBI NO: 5689136 NR Description: transcription factor Ntlim1 [Nicotiana tabacum]
  misc_feature (1)..(180): Homolog of NCBI NO: 5932413 NR Description: LIM domain protein WLIM1 [Nicotiana tabacum]
  misc_feature (1)..(180): Homolog of NCBI NO: 18565124 NR Description: transcription factor LIM [Nicotiana tabacum]
  misc_feature (1)..(167): Homolog of NCBI NO: 18565116 NR Description: transcription factor LIM [Populus kitakamiensis]
  misc_feature (1)..(167): Homolog of NCBI NO: 18565112 NR Description: transcription factor LIM [Populus kitakamiensis]
  misc_feature (1)..(180): Homolog of NCBI NO: 15218450 NR Description: putative transcription factor
MACDKTVYLVDKLTADNRVYHKACFRCHHCKGTLKLSNYNSFEGVLYCRPHFDQNFKRTGSLEKSFEGTPKIGKPDRPLEGERPAGTKVSNMFGGTREKCVGCDKTVYPIEKVSVNGTLYHKSCFKCTHGGCTISPSNYIAHEGKLYCKHHHIQLIKEKGNLSQLEGGGENAAKDKVVAA

SEQ ID NO: 24621 - DNA, 1941 bp, Arabidopsis thaliana
  misc_feature (1)..(1941): Ceres Seq. ID no. 12339071
  misc_feature: MA Experiment ID: 108433 Result: Down-regulated in Transcription
  misc_feature: MA Experiment 108433 PARAMETER Experiment Name: At_rhl_Mutant2_cDNA_P Parameter: Age (day) Value: 7
  misc_feature: MA Experiment 108433 PARAMETER Experiment Name: At_rhl_Mutant2_cDNA_P Parameter: Organism Value: A. thaliana
  misc_feature: MA Experiment 108433 PARAMETER Experiment Name: At_rhl_Mutant2_cDNA_P Parameter: Plant Line Value: rhl Mutant vs. wt landsburg
  misc_feature: MA Experiment 108433 PARAMETER Experiment Name: At_rhl_Mutant2_cDNA_P Parameter: Tissue Value: Roots
  misc_feature: MA Experiment ID: 108464 Result: Up-regulated in Transcription
  misc_feature: MA Experiment 108464 PARAMETER Experiment Name: At_Germinating_Seeds_cDNA_P Parameter: Age (day) Value: 4 vs. 0
  misc_feature: MA Experiment 108464 PARAMETER Experiment Name: At_Germinating_Seeds_cDNA_P Parameter: Tissue Value: Germinating Seeds
  misc_feature: MA Experiment ID: 108488 Result: Down-regulated in Transcription
  misc_feature: MA Experiment ID: 108489 Result: Up-regulated in Transcription
  misc_feature: MA Experiment ID: 108573 Result: Up-regulated in Transcription
  misc_feature: MA Experiment 108573 PARAMETER Experiment Name: At_Drought_cDNA_P Parameter: Timepoint (hr) Value: 6
  misc_feature: MA Experiment 108573 PARAMETER Experiment Name: At_Drought_cDNA_P Parameter: Tissue Value: Aerial
  misc_feature: MA Experiment 108573 PARAMETER Experiment Name: At_Drought_cDNA_P Parameter: Treatment Value: Drought vs. No Drought
  misc_feature: MA Experiment ID: 108574 Result: Up-regulated in Transcription
  misc_feature: MA Experiment 108574 PARAMETER Experiment Name: At_Wounding__cDNA_P Parameter: Timepoint (hr) Value: 1
  misc_feature: MA Experiment 108574 PARAMETER Experiment Name: At_Wounding__cDNA_P Parameter: Tissue Value: Aerial
  misc_feature: MA Experiment 108574 PARAMETER Experiment Name: At_Wounding__cDNA_P Parameter: Treatment Value: Wounding vs. No Wounding
  misc_feature: MA Experiment ID: 108579 Result: Up-regulated in Transcription
  misc_feature: MA Experiment 108579 PARAMETER Experiment Name: At_4deg_Cold_cDNA_P Parameter: Temperature (deg C) Value: 4 vs. 22
  misc_feature: MA Experiment 108579 PARAMETER Experiment Name: At_4deg_Cold_cDNA_P Parameter: Timepoint (hr) Value: 6
  misc_feature: MA Experiment 108579 PARAMETER Experiment Name: At_4deg_Cold_cDNA_P Parameter: Tissue Value: Aerial
  misc_feature: MA Experiment ID: 108595 Result: Up-regulated in Transcription
  misc_feature: MA Experiment 108595 PARAMETER Experiment Name: At_Ler-pi_Ovule_cDNA_P Parameter: Plant Line Value: null
  misc_feature: MA Experiment ID: 108667 Result: Up-regulated in Transcription
  misc_feature: MA Experiment 108667 PARAMETER Experiment Name: At_2mM_SA_cDNA_P Parameter: Plant Line Value: WS
  misc_feature: MA Experiment 108667 PARAMETER Experiment Name: At_2mM_SA_cDNA_P Parameter: Timepoint (hr) Value: 1
  misc_feature: MA Experiment 108667 PARAMETER Experiment Name: At_2mM_SA_cDNA_P Parameter: Treatment Value: 2mM SA vs. No Treatment
  misc_feature: MA Experiment ID: 108668 Result: Up-regulated in Transcription
  misc_feature: MA Experiment 108668 PARAMETER Experiment Name: At_2mM_SA_cDNA_P Parameter: Plant Line Value: WS
  misc_feature: MA Experiment 108668 PARAMETER Experiment Name: At_2mM_SA_cDNA_P Parameter: Timepoint (hr) Value: 6
  misc_feature: MA Experiment 108668 PARAMETER Experiment Name: At_2mM_SA_cDNA_P Parameter: Treatment Value: 2mM SA vs. No Treatment
  misc_feature: MA Experiment ID: 20000182 Result: Up-regulated in Transcription
  misc_feature: MA Experiment 20000182 PARAMETER Experiment Name: At_2mM_SA_P Parameter: Age (day) Value: 14
  misc_feature: MA Experiment 20000182 PARAMETER Experiment Name: At_2mM_SA_P Parameter: Organism Value: A. thaliana
  misc_feature: MA Experiment 20000182 PARAMETER Experiment Name: At_2mM_SA_P Parameter: Plant Line Value: WS
  misc_feature: MA Experiment 20000182 PARAMETER Experiment Name: At_2mM_SA_P Parameter: Timepoint (hr) Value: 6
  misc_feature: MA Experiment 20000182 PARAMETER Experiment Name: At_2mM_SA_P Parameter: Tissue Value: Aerial
  misc_feature: MA Experiment 20000182 PARAMETER Experiment Name: At_2mM_SA_P Parameter: Treatment Value: 2mM SA vs. No Treatment
  misc_feature: MA Experiment ID: 20000184 Result: Down-regulated in Transcription
  misc_feature: MA Experiment 20000184 PARAMETER Experiment Name: At_Shoots__P Parameter: Age (day) Value: 7
  misc_feature: MA Experiment 20000184 PARAMETER Experiment Name: At_Shoots__P Parameter: Tissue Value: Shoots vs. Whole Plant
  misc_feature: MA Experiment ID: 20000234 Result: Down-regulated in Transcription
  misc_feature: MA Experiment 20000234 PARAMETER Experiment Name: At_Siliques_P Parameter: Age (day) Value: 21
  misc_feature: MA Experiment 20000234 PARAMETER Experiment Name: At_Siliques_P Parameter: Organism Value: A. thaliana
  misc_feature: MA Experiment 20000234 PARAMETER Experiment Name: At_Siliques_P Parameter: Plant Line Value: WS
  misc_feature: MA Experiment 20000234 PARAMETER Experiment Name: At_Siliques_P Parameter: Tissue Value: Less Than 5mm Siliques vs. Whole Plant
  misc_feature: MA Experiment ID: 20000286 Result: Down-regulated in Transcription
  misc_feature: MA Experiment 20000286 PARAMETER Experiment Name: At_Open_Flower_P Parameter: Age (day) Value: 21
  misc_feature: MA Experiment 20000286 PARAMETER Experiment Name: At_Open_Flower_P Parameter: Plant Line Value: WS
  misc_feature: MA Experiment 20000286 PARAMETER Experiment Name: At_Open_Flower_P Parameter: Tissue Value: Half Open vs. Whole Plant
  misc_feature: MA Experiment ID: 20000437 Result: Up-regulated in Transcription
  misc_feature: MA Experiment 20000437 PARAMETER Experiment Name: At_Drought_P Parameter: Age (day) Value: 8
  misc_feature: MA Experiment 20000437 PARAMETER Experiment Name: At_Drought_P Parameter: Organism Value: A. thaliana
  misc_feature: MA Experiment 20000437 PARAMETER Experiment Name: At_Drought_P Parameter: Plant Line Value: WS
  misc_feature: MA Experiment 20000437 PARAMETER Experiment Name: At_Drought_P Parameter: Timepoint (hr) Value: 24
  misc_feature: MA Experiment 20000437 PARAMETER Experiment Name: At_Drought_P Parameter: Tissue Value: Whole Plant
  misc_feature: MA Experiment 20000437 PARAMETER Experiment Name: At_Drought_P Parameter: Treatment Value: Drought vs. No Drought
  misc_feature: MA Experiment ID: 20000460 Result: Up-regulated in Transcription
  misc_feature: MA Experiment 20000460 PARAMETER Experiment Name: At_10percent_PEG_P Parameter: Age (day) Value: 12
  misc_feature: MA Experiment 20000460 PARAMETER Experiment Name: At_10percent_PEG_P Parameter: Organism Value: A. thaliana
  misc_feature: MA Experiment 20000460 PARAMETER Experiment Name: At_10percent_PEG_P Parameter: Plant Line Value: WS
  misc_feature: MA Experiment 20000460 PARAMETER Experiment Name: At_10percent_PEG_P Parameter: Timepoint (day) Value: 12
  misc_feature: MA Experiment 20000460 PARAMETER Experiment Name: At_10percent_PEG_P Parameter: Tissue Value: Whole Plant
  misc_feature: MA Experiment 20000460 PARAMETER Experiment Name: At_10percent_PEG_P Parameter: Treatment Value: 10percent PEG vs. No Treatment
  misc_feature: MA Experiment ID: 20000495 Result: Down-regulated in Transcription
  misc_feature: MA Experiment 20000495 PARAMETER Experiment Name: At_Guard_Cells_P Parameter: Harvest Date Value: 8/2/2002
  misc_feature: MA Experiment 20000495 PARAMETER Experiment Name: At_Guard_Cells_P Parameter: Organism Value: A. thaliana
  misc_feature: MA Experiment 20000495 PARAMETER Experiment Name: At_Guard_Cells_P Parameter: Tissue Value: Guard Cells vs. Leaves
  misc_feature: MA Experiment ID: 20000709 Result: Up-regulated in Transcription
  misc_feature: MA Experiment 20000709 PARAMETER Experiment Name: At_15mM_NH4NO3_L-to-H_P Parameter: Age (hr) Value: 14
  misc_feature: MA Experiment 20000709 PARAMETER Experiment Name: At_15mM_NH4NO3_L-to-H_P Parameter: Organism Value: A. thaliana
  misc_feature: MA Experiment 20000709 PARAMETER Experiment Name: At_15mM_NH4NO3_L-to-H_P Parameter: Plant Line Value: WS
  misc_feature: MA Experiment 20000709 PARAMETER Experiment Name: At_15mM_NH4NO3_L-to-H_P Parameter: Timepoint (hr) Value: 4
  misc_feature: MA Experiment 20000709 PARAMETER Experiment Name: At_15mM_NH4NO3_L-to-H_P Parameter: Tissue Value: Aerial
  misc_feature: MA Experiment 20000709 PARAMETER Experiment Name: At_15mM_NH4NO3_L-to-H_P Parameter: Treatment Value: 15mM NH4NO3 vs. 30mM Mannitol
  misc_feature: MA Experiment ID: 20001451 Result: Down-regulated in Transcription
  misc_feature: MA Experiment 20001451 PARAMETER Experiment Name: At_Far-red-induction_P Parameter: Age (day) Value: 7
  misc_feature: MA Experiment 20001451 PARAMETER Experiment Name: At_Far-red-induction_P Parameter: Light Value: Far-red vs. White
  misc_feature: MA Experiment 20001451 PARAMETER Experiment Name: At_Far-red-induction_P Parameter: Organism Value: A. thaliana
  misc_feature: MA Experiment 20001451 PARAMETER Experiment Name: At_Far-red-induction_P Parameter: Plant Line Value: Columbia
  misc_feature: MA Experiment 20001451 PARAMETER Experiment Name: At_Far-red-induction_P Parameter: Timepoint (hr) Value: 24
  misc_feature: MA Experiment 20001451 PARAMETER Experiment Name: At_Far-red-induction_P Parameter: Tissue Value: Whole Plant
  misc_feature: MA Experiment ID: 20001905 Result: Up-regulated in Transcription
  misc_feature: MA Experiment 20001905 PARAMETER Experiment Name: At_Drought_Reproduction_P Parameter: Age (day) Value: 40
  misc_feature: MA Experiment 20001905 PARAMETER Experiment Name: At_Drought_Reproduction_P Parameter: Organism Value: A. thaliana
  misc_feature: MA Experiment 20001905 PARAMETER Experiment Name: At_Drought_Reproduction_P Parameter: Plant Line Value: WS
  misc_feature: MA Experiment 20001905 PARAMETER Experiment Name: At_Drought_Reproduction_P Parameter: Timepoint (day) Value: 10
  misc_feature: MA Experiment 20001905 PARAMETER Experiment Name: At_Drought_Reproduction_P Parameter: Tissue Value: Rosettes
  misc_feature: MA Experiment 20001905 PARAMETER Experiment Name: At_Drought_Reproduction_P Parameter: Treatment Value: Drought vs. No Drought
agactttcttaccgaccagcttagtcttctccattacggcatcattcacctataaatttcgccgctgggtttaattctctattcattcagaaccaaaaaagaagaaacctttttgattctctttgcgatttctttgttcaatctcttctcagattgtgtgaatcgggtttaaatcggggttttagggtctctgttttcaaaagggtaccaaaaagtttggagctttactgtagaaagatttgatttttcgttgacccactccgagattttcggatacaaatcagggttttagggtttttgttggaatggaagaggattatcaacagccgaggtttacgattggtaggcaatcatcaatggcgccggagaagattccggagccgtcggttcactcagaagaagaggtgtttgaggatggagaagagatcgatggtggtgtgagactaatgtatttggctaatgaaggtgacattgaagggattaaggagcttattgattcagggattgatgctaattacagagacattgatgatcggactgctttacacgtggcggcttgtcaaggattgaaagatgttgttgagcttcttcttgatcggaaagctgaggttgatcctaaagatcgttggggaagcactccatttgcagatgcgatattttacaagaacattgatgttatcaagattcttgagatacatggagctaaacatccgatggctccaatgcacgttaagactgctcgtgaagtccctgagtatgaaataaatcctagtgagcttgatttcactcaaagcaaagagataacaaagggaacttactgtatggcaatgtggcgtggtattcaagttgcggtgaaaaagctggatgatgaagttttgagcgatgacgatcaagtgaggaagttccatgatgagcttgcattgctccaaaggcttaggcatccaaacattgtgcagtttcttggtgctgtaacccaaagtaacccaatgatgattgtgactgaatatttgcccaggggggatttgcgtgaattgctcaaacgaaaaggacaattgaaaccagctactgctgttagatatgcccttgatattgctaggggaatgagctatcttcatgagatcaaaggagaccctataatccaccgcgatcttgaaccttcaaacattctgcgggatgattcagggcatctgaaagttgcagactttggagtaagcaagcttgttactgttaaagaagacaagccttttacatgtcaagacatttcttgtcgatatatagctcccgaggttttcactagtgaagaatacgatacaaaagctgatgttttctcatttgcattgatcgttcaggagatgatcgaaggccgaatgccgtttgctgaaaaggaagacagtgaagcttctgaagcttatgctggcaaacatcggccattattcaaagctccatcaaagaattacccacatggtcttaaaacgttgatagaagaatgctggcatgagaaacctgcaaagcgaccaactttcagagagatcattaaacgacttgagtccattcttcaccacatgggtcacaagcgacaatggaggatgaggccattgacatgctttcagaatttcgagcacaagaagaaacataattgggatttgagcagccatgacggctcatcatccggttcacatttgtgattctttaaacggttaaagaaaccattcttttgtatccattccttccggtttagtttgggtttccccaaagcaaccgaatttgactttgtatatttgttgtacactgaagaactcaagaaagtcttcgtgtatacaaaaactgcattttttttattctagtatacaaaattgttgtaagatctatgattttaaccgcaatatatatttgctgttgtaatctaaaaaattggtttaagaatatttatgatttttcccc

SEQ ID NO: 24622 - protein, 459 aa, Arabidopsis thaliana
  peptide (1)..(459): Ceres Seq. ID no. 12339072
  misc_feature (160)..(413): Pfam Name: Protein kinase domain Pfam Description: Protein kinase domain
  misc_feature (9)..(457): Homolog of NCBI NO: 11358145 NR Description: hypothetical protein T20N10.110 - Arabidopsis
  misc_feature (9)..(457): Homolog of NCBI NO: 18411024 NR Description: putative protein; protein id: At3g58760.1
  misc_feature (286)..(459): Homolog of NCBI NO: 7488240 NR Description: protein kinase homolog F13C5.120 - Arabidopsis
  misc_feature (9)..(427): Homolog of NCBI NO: 18700703 NR Description: putative ankyrin-kinase [Medicago sativa]
  misc_feature (286)..(458): Homolog of NCBI NO: 34909506 NR Description: putative protein kinase homolog
  misc_feature (8)..(197): Homolog of NCBI NO: 34909506 NR Description: putative protein kinase homolog
  misc_feature (9)..(427): Homolog of NCBI NO: 18700701 NR Description: ankyrin-kinase [Medicago truncatula]
  misc_feature (9)..(427): Homolog of NCBI NO: 15232181 NR Description: putative protein; protein id: At3g59830.1
  misc_feature (18)..(266): Homolog of NCBI NO: 7488240 NR Description: protein kinase homolog F13C5.120 - Arabidopsis
  misc_feature (1)..(459): Homolog of NCBI NO: 18415205 NR Description: protein kinase - like protein
MEEDYQQPRFTIGRQSSMAPEKIPEPSVHSEEEVFEDGEEIDGGVRLMYLANEGDIEGIKELIDSGIDANYRDIDDRTALHVAACQGLKDVVELLLDRKAEVDPKDRWGSTPFADAIFYKNIDVIKILEIHGAKHPMAPMHVKTAREVPEYEINPSELDFTQSKEITKGTYCMAMWRGIQVAVKKLDDEVLSDDDQVRKFHDELALLQRLRHPNIVQFLGAVTQSNPMMIVTEYLPRGDLRELLKRKGQLKPATAVRYALDIARGMSYLHEIKGDPIIHRDLEPSNILRDDSGHLKVADFGVSKLVTVKEDKPFTCQDISCRYIAPEVFTSEEYDTKADVFSFALIVQEMIEGRMPFAEKEDSEASEAYAGKHRPLFKAPSKNYPHGLKTLIEECWHEKPAKRPTFREIIKRLESILHHMGHKRQWRMRPLTCFQNFEHKKKHNWDLSSHDGSSSGSHL

SEQ ID NO: 24623 - protein, 442 aa, Arabidopsis thaliana
  peptide (1)..(442): Ceres Seq. ID no. 12339074
  misc_feature (143)..(396): Pfam Name: Protein kinase domain Pfam Description: Protein kinase domain
  misc_feature (1)..(410): Homolog of NCBI NO: 15232181 NR Description: putative protein; protein id: At3g59830.1
  misc_feature (1)..(410): Homolog of NCBI NO: 18700703 NR Description: putative ankyrin-kinase [Medicago sativa]
  misc_feature (1)..(410): Homolog of NCBI NO: 18700701 NR Description: ankyrin-kinase [Medicago truncatula]
  misc_feature (269)..(441): Homolog of NCBI NO: 34909506 NR Description: putative protein kinase homolog
  misc_feature (1)..(180): Homolog of NCBI NO: 34909506 NR Description: putative protein kinase homolog
  misc_feature (1)..(440): Homolog of NCBI NO: 11358145 NR Description: hypothetical protein T20N10.110 - Arabidopsis
  misc_feature (1)..(440): Homolog of NCBI NO: 18411024 NR Description: putative protein; protein id: At3g58760.1
  misc_feature (269)..(442): Homolog of NCBI NO: 7488240 NR Description: protein kinase homolog F13C5.120 - Arabidopsis
  misc_feature (1)..(249): Homolog of NCBI NO: 7488240 NR Description: protein kinase homolog F13C5.120 - Arabidopsis
  misc_feature (1)..(442): Homolog of NCBI NO: 18415205 NR Description: protein kinase - like protein
MAPEKIPEPSVHSEEEVFEDGEEIDGGVRLMYLANEGDIEGIKELIDSGIDANYRDIDDRTALHVAACQGLKDVVELLLDRKAEVDPKDRWGSTPFADAIFYKNIDVIKILEIHGAKHPMAPMHVKTAREVPEYEINPSELDFTQSKEITKGTYCMAMWRGIQVAVKKLDDEVLSDDDQVRKFHDELALLQRLRHPNIVQFLGAVTQSNPMMIVTEYLPRGDLRELLKRKGQLKPATAVRYALDIARGMSYLHEIKGDPIIHRDLEPSNILRDDSGHLKVADFGVSKLVTVKEDKPFTCQDISCRYIAPEVFTSEEYDTKADVFSFALIVQEMIEGRMPFAEKEDSEASEAYAGKHRPLFKAPSKNYPHGLKTLIEECWHEKPAKRPTFREIIKRLESILHHMGHKRQWRMRPLTCFQNFEHKKKHNWDLSSHDGSSSGSHL

SEQ ID NO: 24624 - protein, 412 aa, Arabidopsis thaliana
  peptide (1)..(412): Ceres Seq. ID no. 12339075
  misc_feature (113)..(366): Pfam Name: Protein kinase domain Pfam Description: Protein kinase domain
  misc_feature (1)..(380): Homolog of NCBI NO: 15232181 NR Description: putative protein; protein id: At3g59830.1
  misc_feature (1)..(380): Homolog of NCBI NO: 18700703 NR Description: putative ankyrin-kinase [Medicago sativa]
  misc_feature (1)..(380): Homolog of NCBI NO: 18700701 NR Description: ankyrin-kinase [Medicago truncatula]
  misc_feature (239)..(411): Homolog of NCBI NO: 34909506 NR Description: putative protein kinase homolog
  misc_feature (1)..(150): Homolog of NCBI NO: 34909506 NR Description: putative protein kinase homolog
  misc_feature (1)..(410): Homolog of NCBI NO: 11358145 NR Description: hypothetical protein T20N10.110 - Arabidopsis
  misc_feature (1)..(410): Homolog of NCBI NO: 18411024 NR Description: putative protein; protein id: At3g58760.1
  misc_feature (239)..(412): Homolog of NCBI NO: 7488240 NR Description: protein kinase homolog F13C5.120 - Arabidopsis
  misc_feature (1)..(219): Homolog of NCBI NO: 7488240 NR Description: protein kinase homolog F13C5.120 - Arabidopsis
  misc_feature (1)..(412): Homolog of NCBI NO: 18415205 NR Description: protein kinase - like protein
MYLANEGDIEGIKELIDSGIDANYRDIDDRTALHVAACQGLKDVVELLLDRKAEVDPKDRWGSTPFADAIFYKNIDVIKILEIHGAKHPMAPMHVKTAREVPEYEINPSELDFTQSKEITKGTYCMAMWRGIQVAVKKLDDEVLSDDDQVRKFHDELALLQRLRHPNIVQFLGAVTQSNPMMIVTEYLPRGDLRELLKRKGQLKPATAVRYALDIARGMSYLHEIKGDPIIHRDLEPSNILRDDSGHLKVADFGVSKLVTVKEDKPFTCQDISCRYIAPEVFTSEEYDTKADVFSFALIVQEMIEGRMPFAEKEDSEASEAYAGKHRPLFKAPSKNYPHGLKTLIEECWHEKPAKRPTFREIIKRLESILHHMGHKRQWRMRPLTCFQNFEHKKKHNWDLSSHDGSSSGSHL

SEQ ID NO: 24625 - DNA, 1218 bp, Arabidopsis thaliana
  misc_feature (1)..(1218): Ceres Seq. ID no. 12340206
  misc_feature: MA Experiment ID: 108434 Result: Down-regulated in Transcription
  misc_feature: MA Experiment 108434 PARAMETER Experiment Name: At_Root_Tips_cDNA_P Parameter: Tissue Value: Root Tips
  misc_feature: MA Experiment ID: 108435 Result: Down-regulated in Transcription
  misc_feature: MA Experiment 108435 PARAMETER Experiment Name: At_stm_Mutants_cDNA_P Parameter: Plant Line Value: wt Landsburg vs stm
  misc_feature: MA Experiment 108435 PARAMETER Experiment Name: At_stm_Mutants_cDNA_P Parameter: Tissue Value: Shoot Apical Meristem Region
  misc_feature: MA Experiment ID: 108488 Result: Up-regulated in Transcription
  misc_feature: MA Experiment ID: 108595 Result: Down-regulated in Transcription
  misc_feature: MA Experiment 108595 PARAMETER Experiment Name: At_Ler-pi_Ovule_cDNA_P Parameter: Plant Line Value: null
  misc_feature: MA Experiment ID: 20000069 Result: Down-regulated in Transcription
  misc_feature: MA Experiment 20000069 PARAMETER Experiment Name: At_100uM_ABA_Mutants_cDNA_P Parameter: Plant Line Value: CS23
  misc_feature: MA Experiment 20000069 PARAMETER Experiment Name: At_100uM_ABA_Mutants_cDNA_P Parameter: Timepoint (hr) Value: 6
  misc_feature: MA Experiment 20000069 PARAMETER Experiment Name: At_100uM_ABA_Mutants_cDNA_P Parameter: Tissue Value: Aerial
  misc_feature: MA Experiment 20000069 PARAMETER Experiment Name: At_100uM_ABA_Mutants_cDNA_P Parameter: Treatment Value: 100uM ABA vs. No Treatment
  misc_feature: MA Experiment ID: 20000070 Result: Down-regulated in Transcription
  misc_feature: MA Experiment 20000070 PARAMETER Experiment Name: At_100uM_ABA_Mutants_cDNA_P Parameter: Plant Line Value: CS24
  misc_feature: MA Experiment 20000070 PARAMETER Experiment Name: At_100uM_ABA_Mutants_cDNA_P Parameter: Timepoint (hr) Value: 6
  misc_feature: MA Experiment 20000070 PARAMETER Experiment Name: At_100uM_ABA_Mutants_cDNA_P Parameter: Tissue Value: Aerial
  misc_feature: MA Experiment 20000070 PARAMETER Experiment Name: At_100uM_ABA_Mutants_cDNA_P Parameter: Treatment Value: 100uM ABA vs. No Treatment
  misc_feature: MA Experiment ID: 20000071 Result: Down-regulated in Transcription
  misc_feature: MA Experiment 20000071 PARAMETER Experiment Name: At_100uM_ABA_Mutants_cDNA_P Parameter: Plant Line Value: CS8104
  misc_feature: MA Experiment 20000071 PARAMETER Experiment Name: At_100uM_ABA_Mutants_cDNA_P Parameter: Timepoint (hr) Value: 6
  misc_feature: MA Experiment 20000071 PARAMETER Experiment Name: At_100uM_ABA_Mutants_cDNA_P Parameter: Tissue Value: Aerial
  misc_feature: MA Experiment 20000071 PARAMETER Experiment Name: At_100uM_ABA_Mutants_cDNA_P Parameter: Treatment Value: 100uM ABA vs. No Treatment
  misc_feature: MA Experiment ID: 20000072 Result: Down-regulated in Transcription
  misc_feature: MA Experiment 20000072 PARAMETER Experiment Name: At_100uM_ABA_Mutants_cDNA_P Parameter: Plant Line Value: CS8105
  misc_feature: MA Experiment 20000072 PARAMETER Experiment Name: At_100uM_ABA_Mutants_cDNA_P Parameter: Timepoint (hr) Value: 6
  misc_feature: MA Experiment 20000072 PARAMETER Experiment Name: At_100uM_ABA_Mutants_cDNA_P Parameter: Tissue Value: Aerial
  misc_feature: MA Experiment 20000072 PARAMETER Experiment Name: At_100uM_ABA_Mutants_cDNA_P Parameter: Treatment Value: 100uM ABA vs. No Treatment
  misc_feature: MA Experiment ID: 20000086 Result: Down-regulated in Transcription
  misc_feature: MA Experiment 20000086 PARAMETER Experiment Name: At_100uM_ABA_Mutants_cDNA_P Parameter: Plant Line Value: CS22
  misc_feature: MA Experiment 20000086 PARAMETER Experiment Name: At_100uM_ABA_Mutants_cDNA_P Parameter: Timepoint (hr) Value: 6
  misc_feature: MA Experiment 20000086 PARAMETER Experiment Name: At_100uM_ABA_Mutants_cDNA_P Parameter: Tissue Value: Aerial
  misc_feature: MA Experiment 20000086 PARAMETER Experiment Name: At_100uM_ABA_Mutants_cDNA_P Parameter: Treatment Value: 100uM ABA vs. No Treatment
  misc_feature: MA Experiment ID: 20000088 Result: Down-regulated in Transcription
  misc_feature: MA Experiment 20000088 PARAMETER Experiment Name: At_100uM_ABA_Mutants_cDNA_P Parameter: Plant Line Value: Landsberg
  misc_feature: MA Experiment 20000088 PARAMETER Experiment Name: At_100uM_ABA_Mutants_cDNA_P Parameter: Timepoint (hr) Value: 6
  misc_feature: MA Experiment 20000088 PARAMETER Experiment Name: At_100uM_ABA_Mutants_cDNA_P Parameter: Tissue Value: Aerial
  misc_feature: MA Experiment 20000088 PARAMETER Experiment Name: At_100uM_ABA_Mutants_cDNA_P Parameter: Treatment Value: 100uM ABA vs. No Treatment
  misc_feature: MA Experiment ID: 20000089 Result: Down-regulated in Transcription
  misc_feature: MA Experiment ID: 20000090 Result: Down-regulated in Transcription
  misc_feature: MA Experiment ID: 20000117 Result: Down-regulated in Transcription
  misc_feature: MA Experiment 20000117 PARAMETER Experiment Name: At_100uM_ABA_Mutants_cDNA_P Parameter: Plant Line Value: Columbia
  misc_feature: MA Experiment 20000117 PARAMETER Experiment Name: At_100uM_ABA_Mutants_cDNA_P Parameter: Timepoint (hr) Value: 6
  misc_feature: MA Experiment 20000117 PARAMETER Experiment Name: At_100uM_ABA_Mutants_cDNA_P Parameter: Tissue Value: Aerial
  misc_feature: MA Experiment 20000117 PARAMETER Experiment Name: At_100uM_ABA_Mutants_cDNA_P Parameter: Treatment Value: 100uM ABA vs. No Treatment
  misc_feature: MA Experiment ID: 20001248 Result: Down-regulated in Transcription
  misc_feature: MA Experiment 20001248 PARAMETER Experiment Name: At_Far-red-induction_P Parameter: Age (day) Value: 7
  misc_feature: MA Experiment 20001248 PARAMETER Experiment Name: At_Far-red-induction_P Parameter: Light Value: Far-red vs. White
  misc_feature: MA Experiment 20001248 PARAMETER Experiment Name: At_Far-red-induction_P Parameter: Organism Value: A. thaliana
  misc_feature: MA Experiment 20001248 PARAMETER Experiment Name: At_Far-red-induction_P Parameter: Plant Line Value: Columbia
  misc_feature: MA Experiment 20001248 PARAMETER Experiment Name: At_Far-red-induction_P Parameter: Timepoint (hr) Value: 4
  misc_feature: MA Experiment 20001248 PARAMETER Experiment Name: At_Far-red-induction_P Parameter: Tissue Value: Whole Plant
  misc_feature: MA Experiment ID: 20001906 Result: Down-regulated in Transcription
  misc_feature: MA Experiment 20001906 PARAMETER Experiment Name: At_Drought_Reproduction_P Parameter: Age (day) Value: 35
  misc_feature: MA Experiment 20001906 PARAMETER Experiment Name: At_Drought_Reproduction_P Parameter: Organism Value: A. thaliana
  misc_feature: MA Experiment 20001906 PARAMETER Experiment Name: At_Drought_Reproduction_P Parameter: Plant Line Value: WS
  misc_feature: MA Experiment 20001906 PARAMETER Experiment Name: At_Drought_Reproduction_P Parameter: Timepoint (day) Value: 5
  misc_feature: MA Experiment 20001906 PARAMETER Experiment Name: At_Drought_Reproduction_P Parameter: Tissue Value: Siliques
  misc_feature: MA Experiment 20001906 PARAMETER Experiment Name: At_Drought_Reproduction_P Parameter: Treatment Value: Drought vs. No Drought
acttatttcaattcccaaaatcctctgcctcatcatcttcaaactgttaccacgtccatagggttgtcgaagagctaggaagagccttaccaagagcttcttcttcccctaacatttaggttggtaggagaagcaaaggaagagatcatttataatggctcctgcattcggaaaatgtttcatgttctgctgcgctaaaacctccccggaaaaagacgaaatggcaacggaatcgtacgaagccgccattaaaggactcaatgatcttctcagtacgaaagcggatctcggaaacgtcgccgccgcgaagatcaaagcgttgacggcggagctaaaggagcttgactcaagcaattcagacgcaattgaacgaatcaagaccggttttactcaattcaaaaccgagaaatatttgaagaatagtactttgttcaatcatcttgccaagactcagaccccaaagtttctggtgtttgcttgctctgattctcgagtttgtccatctcacatcttgaatttccaacctggtgaggcttttgttgtcagaaacatagccaatatggttccaccttttgaccagaagagacactctggagttggcgccgccgttgaatacgcagttgtacatctcaaggtggagaacattttggtgataggccatagctgctgtggtggtattaagggactcatgtccattgaagatgatgctgccccaactcaaagtgacttcattgaaaattgggtgaagataggcgcatcagcgaggaacaagatcaaggaggaacataaagacttgagctacgatgatcaatgcaacaagtgtgagaaggaagctgtgaacgtatcgcttggaaacttgctttcgtacccattcgtgagagctgaggtggtgaagaacacacttgcaataagaggaggtcactacaatttcgtcaaaggaacgtttgatctctgggagctcgatttcaagaccactcctgcttttgccttctcttaagaaagaaagctaccggaacatataaaactcttttgagataaaaaaagacactttgactcatctttcttcattctctcatgttgatgattcctctccaacttctttgatttctttttgttaattcaaaacttcaactttgctgcttctatttcaaaagctcaaacaataaagctgtaaccaacgtttgaaacttctatatttgtctaattgatgtttgaacc

SEQ ID NO: 24626 - protein, 280 aa, Arabidopsis thaliana
  peptide (1)..(280): Ceres Seq. ID no. 12340207
  misc_feature (4)..(275): Homolog of NCBI NO: 30685030 NR Description: CARBONIC ANHYDRASE 2 [Arabidopsis thaliana]
  misc_feature (20)..(278): Homolog of NCBI NO: 22550386 NR Description: beta-carbonic anhydrase [Nicotiana tabacum]
  misc_feature (23)..(275): Homolog of NCBI NO: 27652186 NR Description: carbonic anhydrase 3 [Flaveria bidentis]
  misc_feature (20)..(278): Homolog of NCBI NO: 7436815 NR Description: carbonate dehydratase (EC 4.2.1.1), chloroplast -
  misc_feature (20)..(278): Homolog of NCBI NO: 115473 NR Description: CARBONIC ANHYDRASE, CHLOROPLAST PRECURSOR
  misc_feature (20)..(278): Homolog of NCBI NO: 3061271 NR Description: NPCA1 [Nicotiana paniculata]
  misc_feature (5)..(270): Homolog of NCBI NO: 27652184 NR Description: carbonic anhydrase 2 [Flaveria bidentis]
  misc_feature (23)..(280): Homolog of NCBI NO: 15220853 NR Description: putative carbonic anhydrase
  misc_feature (23)..(280): Homolog of NCBI NO: 30698715 NR Description: carbonic anhydrase -related [Arabidopsis
  misc_feature (1)..(280): Homolog of NCBI NO: 15223141 NR Description: carbonic anhydrase, putative
MAPAFGKCFMFCCAKTSPEKDEMATESYEAAIKGLNDLLSTKADLGNVAAAKIKALTAELKELDSSNSDAIERIKTGFTQFKTEKYLKNSTLFNHLAKTQTPKFLVFACSDSRVCPSHILNFQPGEAFVVRNIANMVPPFDQKRHSGVGAAVEYAVVHLKVENILVIGHSCCGGIKGLMSIEDDAAPTQSDFIENWVKIGASARNKIKEEHKDLSYDDQCNKCEKEAVNVSLGNLLSYPFVRAEVVKNTLAIRGGHYNFVKGTFDLWELDFKTTPAFAFS

SEQ ID NO: 24627 - protein, 271 aa, Arabidopsis thaliana
  peptide (1)..(271): Ceres Seq. ID no. 12340208
  misc_feature (1)..(266): Homolog of NCBI NO: 30685030 NR Description: CARBONIC ANHYDRASE 2 [Arabidopsis thaliana]
  misc_feature (11)..(269): Homolog of NCBI NO: 22550386 NR Description: beta-carbonic anhydrase [Nicotiana tabacum]
  misc_feature (14)..(266): Homolog of NCBI NO: 27652186 NR Description: carbonic anhydrase 3 [Flaveria bidentis]
  misc_feature (11)..(269): Homolog of NCBI NO: 7436815 NR Description: carbonate dehydratase (EC 4.2.1.1), chloroplast -
  misc_feature (11)..(269): Homolog of NCBI NO: 115473 NR Description: CARBONIC ANHYDRASE, CHLOROPLAST PRECURSOR
  misc_feature (11)..(269): Homolog of NCBI NO: 3061271 NR Description: NPCA1 [Nicotiana paniculata]
  misc_feature (1)..(261): Homolog of NCBI NO: 27652184 NR Description: carbonic anhydrase 2 [Flaveria bidentis]
  misc_feature (14)..(271): Homolog of NCBI NO: 15220853 NR Description: putative carbonic anhydrase
  misc_feature (14)..(271): Homolog of NCBI NO: 30698715 NR Description: carbonic anhydrase -related [Arabidopsis
  misc_feature (1)..(271): Homolog of NCBI NO: 15223141 NR Description: carbonic anhydrase, putative
MFCCAKTSPEKDEMATESYEAAIKGLNDLLSTKADLGNVAAAKIKALTAELKELDSSNSDAIERIKTGFTQFKTEKYLKNSTLFNHLAKTQTPKFLVFACSDSRVCPSHILNFQPGEAFVVRNIANMVPPFDQKRHSGVGAAVEYAVVHLKVENILVIGHSCCGGIKGLMSIEDDAAPTQSDFIENWVKIGASARNKIKEEHKDLSYDDQCNKCEKEAVNVSLGNLLSYPFVRAEVVKNTLAIRGGHYNFVKGTFDLWELDFKTTPAFAFS

SEQ ID NO: 24628 - protein, 258 aa, Arabidopsis thaliana; identical to SEQ ID NO: 21610
  peptide (1)..(258): Ceres Seq. ID no. 12340209
  misc_feature (1)..(253): Homolog of NCBI NO: 30685030 NR Description: CARBONIC ANHYDRASE 2 [Arabidopsis thaliana]
  misc_feature (1)..(256): Homolog of NCBI NO: 22550386 NR Description: beta-carbonic anhydrase [Nicotiana tabacum]
  misc_feature (1)..(253): Homolog of NCBI NO: 27652186 NR Description: carbonic anhydrase 3 [Flaveria bidentis]
  misc_feature (1)..(256): Homolog of NCBI NO: 7436815 NR Description: carbonate dehydratase (EC 4.2.1.1), chloroplast -
  misc_feature (1)..(256): Homolog of NCBI NO: 115473 NR Description: CARBONIC ANHYDRASE, CHLOROPLAST PRECURSOR
  misc_feature (1)..(256): Homolog of NCBI NO: 3061271 NR Description: NPCA1 [Nicotiana paniculata]
  misc_feature (1)..(248): Homolog of NCBI NO: 27652184 NR Description: carbonic anhydrase 2 [Flaveria bidentis]
  misc_feature (1)..(258): Homolog of NCBI NO: 15220853 NR Description: putative carbonic anhydrase
  misc_feature (1)..(258): Homolog of NCBI NO: 30698715 NR Description: carbonic anhydrase -related [Arabidopsis
  misc_feature (1)..(258): Homolog of NCBI NO: 15223141 NR Description: carbonic anhydrase, putative

SEQ ID NO: 24629 - DNA, 894 bp, Arabidopsis thaliana
  misc_feature (1)..(894): Ceres Seq. ID no. 13497582
  misc_feature: MA Experiment ID: 108434 Result: Down-regulated in Transcription
  misc_feature: MA Experiment 108434 PARAMETER Experiment Name: At_Root_Tips_cDNA_P Parameter: Tissue Value: Root Tips
  misc_feature: MA Experiment ID: 108435 Result: Down-regulated in Transcription
  misc_feature: MA Experiment 108435 PARAMETER Experiment Name: At_stm_Mutants_cDNA_P Parameter: Plant Line Value: wt Landsburg vs stm
  misc_feature: MA Experiment 108435 PARAMETER Experiment Name: At_stm_Mutants_cDNA_P Parameter: Tissue Value: Shoot Apical Meristem Region
  misc_feature: MA Experiment ID: 108461 Result: Down-regulated in Transcription
  misc_feature: MA Experiment 108461 PARAMETER Experiment Name: At_Germinating_Seeds_cDNA_P Parameter: Age (day) Value: 1 vs. 0
  misc_feature: MA Experiment 108461 PARAMETER Experiment Name: At_Germinating_Seeds_cDNA_P Parameter: Tissue Value: Germinating Seeds
  misc_feature: MA Experiment ID: 108462 Result: Up-regulated in Transcription
  misc_feature: MA Experiment 108462 PARAMETER Experiment Name: At_Germinating_Seeds_cDNA_P Parameter: Age (day) Value: 2 vs. 0
  misc_feature: MA Experiment 108462 PARAMETER Experiment Name: At_Germinating_Seeds_cDNA_P Parameter: Tissue Value: Germinating Seeds
  misc_feature: MA Experiment ID: 108463 Result: Up-regulated in Transcription
  misc_feature: MA Experiment 108463 PARAMETER Experiment Name: At_Germinating_Seeds_cDNA_P Parameter: Age (day) Value: 3 vs. 0
  misc_feature: MA Experiment 108463 PARAMETER Experiment Name: At_Germinating_Seeds_cDNA_P Parameter: Tissue Value: Germinating Seeds
  misc_feature: MA Experiment ID: 108464 Result: Up-regulated in Transcription
  misc_feature: MA Experiment 108464 PARAMETER Experiment Name: At_Germinating_Seeds_cDNA_P Parameter: Age (day) Value: 4 vs. 0
  misc_feature: MA Experiment 108464 PARAMETER Experiment Name: At_Germinating_Seeds_cDNA_P Parameter: Tissue Value: Germinating Seeds
  misc_feature: MA Experiment ID: 108572 Result: Up-regulated in Transcription
  misc_feature: MA Experiment 108572 PARAMETER Experiment Name: At_Drought_cDNA_P Parameter: Timepoint (hr) Value: 1
  misc_feature: MA Experiment 108572 PARAMETER Experiment Name: At_Drought_cDNA_P Parameter: Tissue Value: Aerial
  misc_feature: MA Experiment 108572 PARAMETER Experiment Name: At_Drought_cDNA_P Parameter: Treatment Value: Drought vs. No Drought
  misc_feature: MA Experiment ID: 108574 Result: Up-regulated in Transcription
  misc_feature: MA Experiment 108574 PARAMETER Experiment Name: At_Wounding__cDNA_P Parameter: Timepoint (hr) Value: 1
  misc_feature: MA Experiment 108574 PARAMETER Experiment Name: At_Wounding__cDNA_P Parameter: Tissue Value: Aerial
  misc_feature: MA Experiment 108574 PARAMETER Experiment Name: At_Wounding__cDNA_P Parameter: Treatment Value: Wounding vs. No Wounding
  misc_feature: MA Experiment ID: 108576 Result: Up-regulated in Transcription
  misc_feature: MA Experiment 108576 PARAMETER Experiment Name: At_42deg_Heat_cDNA_P Parameter: Temperature (deg C) Value: 42 vs. 22
  misc_feature: MA Experiment 108576 PARAMETER Experiment Name: At_42deg_Heat_cDNA_P Parameter: Timepoint (hr) Value: 1
  misc_feature: MA Experiment 108576 PARAMETER Experiment Name: At_42deg_Heat_cDNA_P Parameter: Tissue Value: Aerial
  misc_feature: MA Experiment ID: 108585 Result: Up-regulated in Transcription
  misc_feature: MA Experiment 108585 PARAMETER Experiment Name: At_5mM_NaNP_cDNA_P Parameter: Timepoint (hr) Value: 6
  misc_feature: MA Experiment 108585 PARAMETER Experiment Name: At_5mM_NaNP_cDNA_P Parameter: Tissue Value: Aerial
  misc_feature: MA Experiment 108585 PARAMETER Experiment Name: At_5mM_NaNP_cDNA_P Parameter: Treatment Value: null
  misc_feature: MA Experiment ID: 108594 Result: Down-regulated in Transcription
  misc_feature: MA Experiment 108594 PARAMETER Experiment Name: At_Ler-rhl_Root_cDNA_P Parameter: Plant Line Value: null
  misc_feature: MA Experiment ID: 108667 Result: Up-regulated in Transcription
  misc_feature: MA Experiment 108667 PARAMETER Experiment Name: At_2mM_SA_cDNA_P Parameter: Plant Line Value: WS
  misc_feature: MA Experiment 108667 PARAMETER Experiment Name: At_2mM_SA_cDNA_P Parameter: Timepoint (hr) Value: 1
  misc_feature: MA Experiment 108667 PARAMETER Experiment Name: At_2mM_SA_cDNA_P Parameter: Treatment Value: 2mM SA vs. No Treatment
  misc_feature: MA Experiment ID: 108668 Result: Up-regulated in Transcription
  misc_feature: MA Experiment 108668 PARAMETER Experiment Name: At_2mM_SA_cDNA_P Parameter: Plant Line Value: WS
  misc_feature: MA Experiment 108668 PARAMETER Experiment Name: At_2mM_SA_cDNA_P Parameter: Timepoint (hr) Value: 6
  misc_feature: MA Experiment 108668 PARAMETER Experiment Name: At_2mM_SA_cDNA_P Parameter: Treatment Value: 2mM SA vs. No Treatment
  misc_feature: MA Experiment ID: 20000070 Result: Up-regulated in Transcription
  misc_feature: MA Experiment 20000070 PARAMETER Experiment Name: At_100uM_ABA_Mutants_cDNA_P Parameter: Plant Line Value: CS24
  misc_feature: MA Experiment 20000070 PARAMETER Experiment Name: At_100uM_ABA_Mutants_cDNA_P Parameter: Timepoint (hr) Value: 6
  misc_feature: MA Experiment 20000070 PARAMETER Experiment Name: At_100uM_ABA_Mutants_cDNA_P Parameter: Tissue Value: Aerial
  misc_feature: MA Experiment 20000070 PARAMETER Experiment Name: At_100uM_ABA_Mutants_cDNA_P Parameter: Treatment Value: 100uM ABA vs. No Treatment
  misc_feature: MA Experiment ID: 20000072 Result: Up-regulated in Transcription
  misc_feature: MA Experiment 20000072 PARAMETER Experiment Name: At_100uM_ABA_Mutants_cDNA_P Parameter: Plant Line Value: CS8105
  misc_feature: MA Experiment 20000072 PARAMETER Experiment Name: At_100uM_ABA_Mutants_cDNA_P Parameter: Timepoint (hr) Value: 6
  misc_feature: MA Experiment 20000072 PARAMETER Experiment Name: At_100uM_ABA_Mutants_cDNA_P Parameter: Tissue Value: Aerial
  misc_feature: MA Experiment 20000072 PARAMETER Experiment Name: At_100uM_ABA_Mutants_cDNA_P Parameter: Treatment Value: 100uM ABA vs. No Treatment
  misc_feature: MA Experiment ID: 20000093 Result: Up-regulated in Transcription
  misc_feature: MA Experiment 20000093 PARAMETER Experiment Name: At_42deg_Heat_cDNA_P Parameter: Temperature (deg C) Value: 42 vs. 22
  misc_feature: MA Experiment 20000093 PARAMETER Experiment Name: At_42deg_Heat_cDNA_P Parameter: Timepoint (hr) Value: 0.5
  misc_feature: MA Experiment 20000093 PARAMETER Experiment Name: At_42deg_Heat_cDNA_P Parameter: Tissue Value: Aerial
  misc_feature: MA Experiment ID: 20000112 Result: Up-regulated in Transcription
  misc_feature: MA Experiment 20000112 PARAMETER Experiment Name: At_42deg_Heat_cDNA_P Parameter: Temperature (deg C) Value: 42 vs. 22
  misc_feature: MA Experiment 20000112 PARAMETER Experiment Name: At_42deg_Heat_cDNA_P Parameter: Timepoint (hr) Value: 2
  misc_feature: MA Experiment 20000112 PARAMETER Experiment Name: At_42deg_Heat_cDNA_P Parameter: Tissue Value: Aerial
  misc_feature: MA Experiment ID: 20000180 Result: Down-regulated in Transcription
  misc_feature: MA Experiment 20000180 PARAMETER Experiment Name: At_Germinating_Seeds_P Parameter: Age (hr) Value: 24 vs. 0
  misc_feature: MA Experiment 20000180 PARAMETER Experiment Name: At_Germinating_Seeds_P Parameter: Tissue Value: Germinating Seeds
  misc_feature: MA Experiment ID: 20000182 Result: Up-regulated in Transcription
  misc_feature: MA Experiment 20000182 PARAMETER Experiment Name: At_2mM_SA_P Parameter: Age (day) Value: 14
  misc_feature: MA Experiment 20000182 PARAMETER Experiment Name: At_2mM_SA_P Parameter: Organism Value: A. thaliana
  misc_feature: MA Experiment 20000182 PARAMETER Experiment Name: At_2mM_SA_P Parameter: Plant Line Value: WS
  misc_feature: MA Experiment 20000182 PARAMETER Experiment Name: At_2mM_SA_P Parameter: Timepoint (hr) Value: 6
  misc_feature: MA Experiment 20000182 PARAMETER Experiment Name: At_2mM_SA_P Parameter: Tissue Value: Aerial
  misc_feature: MA Experiment 20000182 PARAMETER Experiment Name: At_2mM_SA_P Parameter: Treatment Value: 2mM SA vs. No Treatment
  misc_feature: MA Experiment ID: 20000185 Result: Up-regulated in Transcription
  misc_feature: MA Experiment 20000185 PARAMETER Experiment Name: At_Roots__P Parameter: Age (day) Value: 7 vs. 21
  misc_feature: MA Experiment 20000185 PARAMETER Experiment Name: At_Roots__P Parameter: Organism Value: A. thaliana
  misc_feature: MA Experiment 20000185 PARAMETER Experiment Name: At_Roots__P Parameter: Tissue Value: Roots vs. Whole Plant
  misc_feature: MA Experiment ID: 20000224 Result: Up-regulated in Transcription
  misc_feature: MA Experiment ID: 20000234 Result: Down-regulated in Transcription
  misc_feature: MA Experiment 20000234 PARAMETER Experiment Name: At_Siliques_P Parameter: Age (day) Value: 21
  misc_feature: MA Experiment 20000234 PARAMETER Experiment Name: At_Siliques_P Parameter: Organism Value: A. thaliana
  misc_feature: MA Experiment 20000234 PARAMETER Experiment Name: At_Siliques_P Parameter: Plant Line Value: WS
  misc_feature: MA Experiment 20000234 PARAMETER Experiment Name: At_Siliques_P Parameter: Tissue Value: Less Than 5mm Siliques vs. Whole Plant
  misc_feature: MA Experiment ID: 20000235 Result: Down-regulated in Transcription
  misc_feature: MA Experiment 20000235 PARAMETER Experiment Name: At_Siliques_P Parameter: Age (day) Value: 21
  misc_feature: MA Experiment 20000235 PARAMETER Experiment Name: At_Siliques_P Parameter: Organism Value: A. thaliana
  misc_feature: MA Experiment 20000235 PARAMETER Experiment Name: At_Siliques_P Parameter: Plant Line Value: WS
  misc_feature: MA Experiment 20000235 PARAMETER Experiment Name: At_Siliques_P Parameter: Tissue Value: 5-10mm Siliques vs. Whole Plant
  misc_feature: MA Experiment ID: 20000456 Result: Up-regulated in Transcription
  misc_feature: MA Experiment 20000456 PARAMETER Experiment Name: At_100uM_BA_P Parameter: Age (day) Value: 14
  misc_feature: MA Experiment 20000456 PARAMETER Experiment Name: At_100uM_BA_P Parameter: Organism Value: A. thaliana
  misc_feature: MA Experiment 20000456 PARAMETER Experiment Name: At_100uM_BA_P Parameter: Plant Line Value: WS
  misc_feature: MA Experiment 20000456 PARAMETER Experiment Name: At_100uM_BA_P Parameter: Timepoint (hr) Value: 6
  misc_feature: MA Experiment 20000456 PARAMETER Experiment Name: At_100uM_BA_P Parameter: Tissue Value: Aerial
  misc_feature: MA Experiment 20000456 PARAMETER Experiment Name: At_100uM_BA_P Parameter: Treatment Value: 100uM BA vs. No Treatment
  misc_feature: MA Experiment ID: 20000527 Result: Down-regulated in Transcription
  misc_feature: MA Experiment 20000527 PARAMETER Experiment Name: At_10percent_PEG_P Parameter: Age (day) Value: 20
  misc_feature: MA Experiment 20000527 PARAMETER Experiment Name: At_10percent_PEG_P Parameter: Organism Value: A. thaliana
  misc_feature: MA Experiment 20000527 PARAMETER Experiment Name: At_10percent_PEG_P Parameter: Plant Line Value: WS
  misc_feature: MA Experiment 20000527 PARAMETER Experiment Name: At_10percent_PEG_P Parameter: Timepoint (day) Value: 20
  misc_feature: MA Experiment 20000527 PARAMETER Experiment Name: At_10percent_PEG_P Parameter: Tissue Value: Whole Plant
  misc_feature: MA Experiment 20000527 PARAMETER Experiment Name: At_10percent_PEG_P Parameter: Treatment Value: 10percent PEG vs. No Treatment
  misc_feature: MA Experiment ID: 20000709 Result: Up-regulated in Transcription
  misc_feature: MA Experiment 20000709 PARAMETER Experiment Name: At_15mM_NH4NO3_L-to-H_P Parameter: Age (hr) Value: 14
  misc_feature: MA Experiment 20000709 PARAMETER Experiment Name: At_15mM_NH4NO3_L-to-H_P Parameter: Organism Value: A. thaliana
  misc_feature: MA Experiment 20000709 PARAMETER Experiment Name: At_15mM_NH4NO3_L-to-H_P Parameter: Plant Line Value: WS
  misc_feature: MA Experiment 20000709 PARAMETER Experiment Name: At_15mM_NH4NO3_L-to-H_P Parameter: Timepoint (hr) Value: 4
  misc_feature: MA Experiment 20000709 PARAMETER Experiment Name: At_15mM_NH4NO3_L-to-H_P Parameter: Tissue Value: Aerial
  misc_feature: MA Experiment 20000709 PARAMETER Experiment Name: At_15mM_NH4NO3_L-to-H_P Parameter: Treatment Value: 15mM NH4NO3 vs. 30mM Mannitol
  misc_feature: MA Experiment ID: 20001450 Result: Down-regulated in Transcription
  misc_feature: MA Experiment 20001450 PARAMETER Experiment Name: At_Far-red-induction_P Parameter: Age (day) Value: 7
  misc_feature: MA Experiment 20001450 PARAMETER Experiment Name: At_Far-red-induction_P Parameter: Light Value: Far-red vs. White
  misc_feature: MA Experiment 20001450 PARAMETER Experiment Name: At_Far-red-induction_P Parameter: Organism Value: A. thaliana
  misc_feature: MA Experiment 20001450 PARAMETER Experiment Name: At_Far-red-induction_P Parameter: Plant Line Value: Columbia
  misc_feature: MA Experiment 20001450 PARAMETER Experiment Name: At_Far-red-induction_P Parameter: Timepoint (hr) Value: 8
  misc_feature: MA Experiment 20001450 PARAMETER Experiment Name: At_Far-red-induction_P Parameter: Tissue Value: Whole Plant
  misc_feature: MA Experiment ID: 20001451 Result: Down-regulated in Transcription
  misc_feature: MA Experiment 20001451 PARAMETER Experiment Name: At_Far-red-induction_P Parameter: Age (day) Value: 7
  misc_feature: MA Experiment 20001451 PARAMETER Experiment Name: At_Far-red-induction_P Parameter: Light Value: Far-red vs. White
  misc_feature: MA Experiment 20001451 PARAMETER Experiment Name: At_Far-red-induction_P Parameter: Organism Value: A. thaliana
  misc_feature: MA Experiment 20001451 PARAMETER Experiment Name: At_Far-red-induction_P Parameter: Plant Line Value: Columbia
  misc_feature: MA Experiment 20001451 PARAMETER Experiment Name: At_Far-red-induction_P Parameter: Timepoint (hr) Value: 24
  misc_feature: MA Experiment 20001451 PARAMETER Experiment Name: At_Far-red-induction_P Parameter: Tissue Value: Whole Plant
  misc_feature: MA Experiment ID: 20001554 Result: Down-regulated in Transcription
  misc_feature: MA Experiment 20001554 PARAMETER Experiment Name: At_Drought_Soil_Dry_P Parameter: Age (day) Value: 21
  misc_feature: MA Experiment 20001554 PARAMETER Experiment Name: At_Drought_Soil_Dry_P Parameter: Organism Value: A. thaliana
  misc_feature: MA Experiment 20001554 PARAMETER Experiment Name: At_Drought_Soil_Dry_P Parameter: Plant Line Value: WS
  misc_feature: MA Experiment 20001554 PARAMETER Experiment Name: At_Drought_Soil_Dry_P Parameter: Post Timepoint (hr) Value: None
  misc_feature: MA Experiment 20001554 PARAMETER Experiment Name: At_Drought_Soil_Dry_P Parameter: Post-Treatment Value: None
  misc_feature: MA Experiment 20001554 PARAMETER Experiment Name: At_Drought_Soil_Dry_P Parameter: Timepoint (day) Value: 7
  misc_feature: MA Experiment 20001554 PARAMETER Experiment Name: At_Drought_Soil_Dry_P Parameter: Treatment Value: Drought vs. No Drought
  misc_feature: MA Experiment ID: 20001558 Result: Up-regulated in Transcription
  misc_feature: MA Experiment 20001558 PARAMETER Experiment Name: At_Drought_Soil_Dry_P Parameter: Age (day) Value: 27
  misc_feature: MA Experiment 20001558 PARAMETER Experiment Name: At_Drought_Soil_Dry_P Parameter: Organism Value: A. thaliana
  misc_feature: MA Experiment 20001558 PARAMETER Experiment Name: At_Drought_Soil_Dry_P Parameter: Plant Line Value: WS
  misc_feature: MA Experiment 20001558 PARAMETER Experiment Name: At_Drought_Soil_Dry_P Parameter: Post Timepoint (hr) Value: 6
  misc_feature: MA Experiment 20001558 PARAMETER Experiment Name: At_Drought_Soil_Dry_P Parameter: Post-Treatment Value: Re-Water vs. No Drought
  misc_feature: MA Experiment 20001558 PARAMETER Experiment Name: At_Drought_Soil_Dry_P Parameter: Timepoint (day) Value: 13
  misc_feature: MA Experiment 20001558 PARAMETER Experiment Name: At_Drought_Soil_Dry_P Parameter: Treatment Value: Drought vs. No Drought
  misc_feature: MA Experiment ID: 20001560 Result: Up-regulated in Transcription
  misc_feature: MA Experiment 20001560 PARAMETER Experiment Name: At_Drought_Soil_Dry_P Parameter: Age (day) Value: 28
  misc_feature: MA Experiment 20001560 PARAMETER Experiment Name: At_Drought_Soil_Dry_P Parameter: Organism Value: A. thaliana
  misc_feature: MA Experiment 20001560 PARAMETER Experiment Name: At_Drought_Soil_Dry_P Parameter: Plant Line Value: WS
  misc_feature: MA Experiment 20001560 PARAMETER Experiment Name: At_Drought_Soil_Dry_P Parameter: Post Timepoint (hr) Value: None
  misc_feature: MA Experiment 20001560 PARAMETER Experiment Name: At_Drought_Soil_Dry_P Parameter: Post-Treatment Value: None
  misc_feature: MA Experiment 20001560 PARAMETER Experiment Name: At_Drought_Soil_Dry_P Parameter: Timepoint (day) Value: 14
  misc_feature: MA Experiment 20001560 PARAMETER Experiment Name: At_Drought_Soil_Dry_P Parameter: Treatment Value: Drought vs. No Drought
atttgtgtatagaatatagtaaactcaagtaatcaagcaagtaaacgaaacataaaaagaaaagtattgcaagaaacagaggagttagataccaaaaagtgagagatatcgaatggcggagaaagaagagagtgtgaagcttctagggttttgggcaagcccttttagtcgtcgagtcgagatggctctcaaactcaaaggcgtgccatacgaatacttggaagaagatttgcccaacaagacccctttgcttctggagctaaacccgcttcacaagaaagttccggttcttgtccacaatgacaaaatattactcgagtcacatctgattctcgaatacaccatcagacgtggaagaacaatccaattcttcctcaagatccttacgagaaggccatggctcgattttgggcaaagttcatcgatgaccagatcctaacactagggtttaggtcccttgtaaaagcagagaaaggaagagaggttgctattgaagagactcgggaactgcttacgtttcttgagaaagaattgactggaaaagatttcttcggtggcaagacaatcggattcttggacatgatcgcaggaagtattatcccattttgtctagctagactttgggaaggtataggaattgatatgattccagaggagaagtttccggaattaaatagatggatcaagaatttggaagaagttgagatcgtgagagaatgtattcctccaagagagaaacaaattgagcgcatgaccaaaattgcagaaacaattaagtctgcctaaattaaagatacttcttgcctccgaaaatatttgatttatatgcttgcattgttttttatttttatttttttaagtttttcgaaaaatagaatgacctaatatttaagc

SEQ ID NO: 24630 - protein, 129 aa, Arabidopsis thaliana
  peptide (1)..(129): Ceres Seq. ID no. 13497583
  misc_feature (1)..(103): Pfam Name: Glutathione S-transferase, C-terminal domain Pfam Description: Glutathione S-transferase, C-terminal domain
  misc_feature (1)..(129): Homolog of NCBI NO: 15227082 NR Description: glutathione transferase, putative [Arabidopsis
  misc_feature (1)..(129): Homolog of NCBI NO: 15227551 NR Description: glutathione transferase, putative [Arabidopsis
  misc_feature (1)..(129): Homolog of NCBI NO: 15227084 NR Description: glutathione transferase, putative [Arabidopsis
  misc_feature (1)..(129): Homolog of NCBI NO: 15227085 NR Description: glutathione transferase (103-1A) [Arabidopsis
  misc_feature (1)..(128): Homolog of NCBI NO: 15227087 NR Description: glutathione transferase, putative [Arabidopsis
  misc_feature (1)..(129): Homolog of NCBI NO: 14423534 NR Description: putative glutathione S-transferase [Arabidopsis
  misc_feature (1)..(129): Homolog of NCBI NO: 15227086 NR Description: glutathione transferase, putative [Arabidopsis
  misc_feature (1)..(128): Homolog of NCBI NO: 15227550 NR Description: glutathione transferase, putative [Arabidopsis
MARFWAKFIDDQILTLGFRSLVKAEKGREVAIEETRELLTFLEKELTGKDFFGGKTIGFLDMIAGSIIPFCLARLWEGIGIDMIPEEKFPELNRWIKNLEEVEIVRECIPPREKQIERMTKIAETIKSA

SEQ ID NO: 24631 - protein, 108 aa, Arabidopsis thaliana
  peptide (1)..(108): Ceres Seq. ID no. 13497584
  misc_feature (1)..(76): Homolog of NCBI NO: 15227082 NR Description: glutathione transferase, putative [Arabidopsis
  misc_feature (4)..(76): Homolog of NCBI NO: 15227084 NR Description: glutathione transferase, putative [Arabidopsis
  misc_feature (1)..(76): Homolog of NCBI NO: 15227085 NR Description: glutathione transferase (103-1A) [Arabidopsis
  misc_feature (1)..(76): Homolog of NCBI NO: 15227087 NR Description: glutathione transferase, putative [Arabidopsis
  misc_feature (1)..(76): Homolog of NCBI NO: 14423534 NR Description: putative glutathione S-transferase [Arabidopsis
  misc_feature (1)..(76): Homolog of NCBI NO: 15227086 NR Description: glutathione transferase, putative [Arabidopsis
  misc_feature (1)..(76): Homolog of NCBI NO: 15227550 NR Description: glutathione transferase, putative [Arabidopsis
MAEKEESVKLLGFWASPFSRRVEMALKLKGVPYEYLEEDLPNKTPLLLELNPLHKKVPVLVHNDKILLESHLILEYTIRRGRTIQFFLKILTRRPWLDFGQSSSMTRS

SEQ ID NO: 24632 - protein, 85 aa, Arabidopsis thaliana
  peptide (1)..(85): Ceres Seq. ID no. 13497585
  misc_feature (1)..(53): Homolog of NCBI NO: 15227086 NR Description: glutathione transferase, putative [Arabidopsis
  misc_feature (1)..(53): Homolog of NCBI NO: 15227550 NR Description: glutathione transferase, putative [Arabidopsis
  misc_feature (1)..(53): Homolog of NCBI NO: 15227082 NR Description: glutathione transferase, putative [Arabidopsis
  misc_feature (1)..(53): Homolog of NCBI NO: 15227084 NR Description: glutathione transferase, putative [Arabidopsis
  misc_feature (1)..(53): Homolog of NCBI NO: 15227085 NR Description: glutathione transferase (103-1A) [Arabidopsis
  misc_feature (1)..(53): Homolog of NCBI NO: 15227087 NR Description: glutathione transferase, putative [Arabidopsis
  misc_feature (1)..(53): Homolog of NCBI NO: 14423534 NR Description: putative glutathione S-transferase [Arabidopsis
MALKLKGVPYEYLEEDLPNKTPLLLELNPLHKKVPVLVHNDKILLESHLILEYTIRRGRTIQFFLKILTRRPWLDFGQSSSMTRS

SEQ ID NO: 24633 - DNA, 1305 bp, Arabidopsis thaliana
  misc_feature (1)..(1305): Ceres Seq. ID no. 12348615
  misc_feature: MA Experiment ID: 108434 Result: Down-regulated in Transcription
  misc_feature: MA Experiment 108434 PARAMETER Experiment Name: At_Root_Tips_cDNA_P Parameter: Tissue Value: Root Tips
  misc_feature: MA Experiment ID: 108469 Result: Up-regulated in Transcription
  misc_feature: MA Experiment ID: 108474 Result: Down-regulated in Transcription
  misc_feature: MA Experiment 108474 PARAMETER Experiment Name: At_Drought_Flowers_cDNA_P Parameter: Timepoint (hr) Value: null
  misc_feature: MA Experiment 108474 PARAMETER Experiment Name: At_Drought_Flowers_cDNA_P Parameter: Treatment Value: Drought vs. No Drought
  misc_feature: MA Experiment ID: 108488 Result: Down-regulated in Transcription
  misc_feature: MA Experiment ID: 108489 Result: Up-regulated in Transcription
  misc_feature: MA Experiment ID: 108501 Result: Down-regulated in Transcription
  misc_feature: MA Experiment 108501 PARAMETER Experiment Name: At_ap2_floral_buds_cDNA_P Parameter: Plant Line Value: ap2 (Ler.)
  misc_feature: MA Experiment 108501 PARAMETER Experiment Name: At_ap2_floral_buds_cDNA_P Parameter: Tissue Value: Closed Flower
  misc_feature: MA Experiment ID: 108572 Result: Up-regulated in Transcription
  misc_feature: MA Experiment 108572 PARAMETER Experiment Name: At_Drought_cDNA_P Parameter: Timepoint (hr) Value: 1
  misc_feature: MA Experiment 108572 PARAMETER Experiment Name: At_Drought_cDNA_P Parameter: Tissue Value: Aerial
  misc_feature: MA Experiment 108572 PARAMETER Experiment Name: At_Drought_cDNA_P Parameter: Treatment Value: Drought vs. No Drought
  misc_feature: MA Experiment ID: 108573 Result: Up-regulated in Transcription
  misc_feature: MA Experiment 108573 PARAMETER Experiment Name: At_Drought_cDNA_P Parameter: Timepoint (hr) Value: 6
  misc_feature: MA Experiment 108573 PARAMETER Experiment Name: At_Drought_cDNA_P Parameter: Tissue Value: Aerial
  misc_feature: MA Experiment 108573 PARAMETER Experiment Name: At_Drought_cDNA_P Parameter: Treatment Value: Drought vs. No Drought
  misc_feature: MA Experiment ID: 108574 Result: Up-regulated in Transcription
  misc_feature: MA Experiment 108574 PARAMETER Experiment Name: At_Wounding__cDNA_P Parameter: Timepoint (hr) Value: 1
  misc_feature: MA Experiment 108574 PARAMETER Experiment Name: At_Wounding__cDNA_P Parameter: Tissue Value: Aerial
  misc_feature: MA Experiment 108574 PARAMETER Experiment Name: At_Wounding__cDNA_P Parameter: Treatment Value: Wounding vs. No Wounding
  misc_feature: MA Experiment ID: 108579 Result: Up-regulated in Transcription
  misc_feature: MA Experiment 108579 PARAMETER Experiment Name: At_4deg_Cold_cDNA_P Parameter: Temperature (deg C) Value: 4 vs. 22
  misc_feature: MA Experiment 108579 PARAMETER Experiment Name: At_4deg_Cold_cDNA_P Parameter: Timepoint (hr) Value: 6
  misc_feature: MA Experiment 108579 PARAMETER Experiment Name: At_4deg_Cold_cDNA_P Parameter: Tissue Value: Aerial
  misc_feature: MA Experiment ID: 108595 Result: Up-regulated in Transcription
  misc_feature: MA Experiment 108595 PARAMETER Experiment Name: At_Ler-pi_Ovule_cDNA_P Parameter: Plant Line Value: null
  misc_feature: MA Experiment ID: 108605 Result: Up-regulated in Transcription
  misc_feature: MA Experiment 108605 PARAMETER Experiment Name: At_100uM_ABA_cDNA_P Parameter: Timepoint (hr) Value: 6
  misc_feature: MA Experiment 108605 PARAMETER Experiment Name: At_100uM_ABA_cDNA_P Parameter: Tissue Value: Aerial
  misc_feature: MA Experiment 108605 PARAMETER Experiment Name: At_100uM_ABA_cDNA_P Parameter: Treatment Value: 100uM ABA vs. No Treatment
  misc_feature: MA Experiment ID: 108607 Result: Up-regulated in Transcription
  misc_feature: MA Experiment 108607 PARAMETER Experiment Name: At_100uM_ABA_cDNA_P Parameter: Timepoint (hr) Value: 4
  misc_feature: MA Experiment 108607 PARAMETER Experiment Name: At_100uM_ABA_cDNA_P Parameter: Tissue Value: Aerial
  misc_feature: MA Experiment 108607 PARAMETER Experiment Name: At_100uM_ABA_cDNA_P Parameter: Treatment Value: 100uM ABA vs. No Treatment
  misc_feature: MA Experiment ID: 108609 Result: Up-regulated in Transcription
  misc_feature: MA Experiment 108609 PARAMETER Experiment Name: At_100uM_ABA_cDNA_P Parameter: Timepoint (hr) Value: 24
  misc_feature: MA Experiment 108609 PARAMETER Experiment Name: At_100uM_ABA_cDNA_P Parameter: Tissue Value: Aerial
  misc_feature: MA Experiment 108609 PARAMETER Experiment Name: At_100uM_ABA_cDNA_P Parameter: Treatment Value: 100uM ABA vs. No Treatment
  misc_feature: MA Experiment ID: 108667 Result: Up-regulated in Transcription
  misc_feature: MA Experiment 108667 PARAMETER Experiment Name: At_2mM_SA_cDNA_P Parameter: Plant Line Value: WS
  misc_feature: MA Experiment 108667 PARAMETER Experiment Name: At_2mM_SA_cDNA_P Parameter: Timepoint (hr) Value: 1
  misc_feature: MA Experiment 108667 PARAMETER Experiment Name: At_2mM_SA_cDNA_P Parameter: Treatment Value: 2mM SA vs. No Treatment
  misc_feature: MA Experiment ID: 108668 Result: Up-regulated in Transcription
  misc_feature: MA Experiment 108668 PARAMETER Experiment Name: At_2mM_SA_cDNA_P Parameter: Plant Line Value: WS
  misc_feature: MA Experiment 108668 PARAMETER Experiment Name: At_2mM_SA_cDNA_P Parameter: Timepoint (hr) Value: 6
  misc_feature: MA Experiment 108668 PARAMETER Experiment Name: At_2mM_SA_cDNA_P Parameter: Treatment Value: 2mM SA vs. No Treatment
  misc_feature: MA Experiment ID: 20000069 Result: Up-regulated in Transcription
  misc_feature: MA Experiment 20000069 PARAMETER Experiment Name: At_100uM_ABA_Mutants_cDNA_P Parameter: Plant Line Value: CS23
  misc_feature: MA Experiment 20000069 PARAMETER Experiment Name: At_100uM_ABA_Mutants_cDNA_P Parameter: Timepoint (hr) Value: 6
  misc_feature: MA Experiment 20000069 PARAMETER Experiment Name: At_100uM_ABA_Mutants_cDNA_P Parameter: Tissue Value: Aerial
  misc_feature: MA Experiment 20000069 PARAMETER Experiment Name: At_100uM_ABA_Mutants_cDNA_P Parameter: Treatment Value: 100uM ABA vs. No Treatment
  misc_feature: MA Experiment ID: 20000070 Result: Up-regulated in Transcription
  misc_feature: MA Experiment 20000070 PARAMETER Experiment Name: At_100uM_ABA_Mutants_cDNA_P Parameter: Plant Line Value: CS24
  misc_feature: MA Experiment 20000070 PARAMETER Experiment Name: At_100uM_ABA_Mutants_cDNA_P Parameter: Timepoint (hr) Value: 6
  misc_feature: MA Experiment 20000070 PARAMETER Experiment Name: At_100uM_ABA_Mutants_cDNA_P Parameter: Tissue Value: Aerial
  misc_feature: MA Experiment 20000070 PARAMETER Experiment Name: At_100uM_ABA_Mutants_cDNA_P Parameter: Treatment Value: 100uM ABA vs. No Treatment
  misc_feature: MA Experiment ID: 20000071 Result: Up-regulated in Transcription
  misc_feature: MA Experiment 20000071 PARAMETER Experiment Name: At_100uM_ABA_Mutants_cDNA_P Parameter: Plant Line Value: CS8104
  misc_feature: MA Experiment 20000071 PARAMETER Experiment Name: At_100uM_ABA_Mutants_cDNA_P Parameter: Timepoint (hr) Value: 6
  misc_feature: MA Experiment 20000071 PARAMETER Experiment Name: At_100uM_ABA_Mutants_cDNA_P Parameter: Tissue Value: Aerial
  misc_feature: MA Experiment 20000071 PARAMETER Experiment Name: At_100uM_ABA_Mutants_cDNA_P Parameter: Treatment Value: 100uM ABA vs. No Treatment
  misc_feature: MA Experiment ID: 20000072 Result: Up-regulated in Transcription
  misc_feature: MA Experiment 20000072 PARAMETER Experiment Name: At_100uM_ABA_Mutants_cDNA_P Parameter: Plant Line Value: CS8105
  misc_feature: MA Experiment 20000072 PARAMETER Experiment Name: At_100uM_ABA_Mutants_cDNA_P Parameter: Timepoint (hr) Value: 6
  misc_feature: MA Experiment 20000072 PARAMETER Experiment Name: At_100uM_ABA_Mutants_cDNA_P Parameter: Tissue Value: Aerial
  misc_feature: MA Experiment 20000072 PARAMETER Experiment Name: At_100uM_ABA_Mutants_cDNA_P Parameter: Treatment Value: 100uM ABA vs. No Treatment
  misc_feature: MA Experiment ID: 20000086 Result: Up-regulated in Transcription
  misc_feature: MA Experiment 20000086 PARAMETER Experiment Name: At_100uM_ABA_Mutants_cDNA_P Parameter: Plant Line Value: CS22
  misc_feature: MA Experiment 20000086 PARAMETER Experiment Name: At_100uM_ABA_Mutants_cDNA_P Parameter: Timepoint (hr) Value: 6
  misc_feature: MA Experiment 20000086 PARAMETER Experiment Name: At_100uM_ABA_Mutants_cDNA_P Parameter: Tissue Value: Aerial
  misc_feature: MA Experiment 20000086 PARAMETER Experiment Name: At_100uM_ABA_Mutants_cDNA_P Parameter: Treatment Value: 100uM ABA vs. No Treatment
  misc_feature: MA Experiment ID: 20000087 Result: Up-regulated in Transcription
  misc_feature: MA Experiment 20000087 PARAMETER Experiment Name: At_100uM_ABA_Mutants_cDNA_P Parameter: Plant Line Value: WS
  misc_feature: MA Experiment 20000087 PARAMETER Experiment Name: At_100uM_ABA_Mutants_cDNA_P Parameter: Timepoint (hr) Value: 6
  misc_feature: MA Experiment 20000087 PARAMETER Experiment Name: At_100uM_ABA_Mutants_cDNA_P Parameter: Tissue Value: Aerial
  misc_feature: MA Experiment 20000087 PARAMETER Experiment Name: At_100uM_ABA_Mutants_cDNA_P Parameter: Treatment Value: 100uM ABA vs. No Treatment
  misc_feature: MA Experiment ID: 20000088 Result: Up-regulated in Transcription
  misc_feature: MA Experiment 20000088 PARAMETER Experiment Name: At_100uM_ABA_Mutants_cDNA_P Parameter: Plant Line Value: Landsberg
  misc_feature: MA Experiment 20000088 PARAMETER Experiment Name: At_100uM_ABA_Mutants_cDNA_P Parameter: Timepoint (hr) Value: 6
  misc_feature: MA Experiment 20000088 PARAMETER Experiment Name: At_100uM_ABA_Mutants_cDNA_P Parameter: Tissue Value: Aerial
  misc_feature: MA Experiment 20000088 PARAMETER Experiment Name: At_100uM_ABA_Mutants_cDNA_P Parameter: Treatment Value: 100uM ABA vs. No Treatment
  misc_feature: MA Experiment ID: 20000111 Result: Down-regulated in Transcription
  misc_feature: MA Experiment 20000111 PARAMETER Experiment Name: At_42deg_Heat_cDNA_P Parameter: Temperature (deg C) Value: 42 vs. 22
  misc_feature: MA Experiment 20000111 PARAMETER Experiment Name: At_42deg_Heat_cDNA_P Parameter: Timepoint (hr) Value: 6
  misc_feature: MA Experiment 20000111 PARAMETER Experiment Name: At_42deg_Heat_cDNA_P Parameter: Tissue Value: Aerial
  misc_feature: MA Experiment ID: 20000113 Result: Up-regulated in Transcription
  misc_feature: MA Experiment 20000113 PARAMETER Experiment Name: At_42deg_Heat_cDNA_P Parameter: Temperature (deg C) Value: 42 vs. 22
  misc_feature: MA Experiment 20000113 PARAMETER Experiment Name: At_42deg_Heat_cDNA_P Parameter: Timepoint (hr) Value: 8
  misc_feature: MA Experiment 20000113 PARAMETER Experiment Name: At_42deg_Heat_cDNA_P Parameter: Tissue Value: Aerial
  misc_feature: MA Experiment ID: 20000117 Result: Up-regulated in Transcription
  misc_feature: MA Experiment 20000117 PARAMETER Experiment Name: At_100uM_ABA_Mutants_cDNA_P Parameter: Plant Line Value: Columbia
  misc_feature: MA Experiment 20000117 PARAMETER Experiment Name: At_100uM_ABA_Mutants_cDNA_P Parameter: Timepoint (hr) Value: 6
  misc_feature: MA Experiment 20000117 PARAMETER Experiment Name: At_100uM_ABA_Mutants_cDNA_P Parameter: Tissue Value: Aerial
  misc_feature: MA Experiment 20000117 PARAMETER Experiment Name: At_100uM_ABA_Mutants_cDNA_P Parameter: Treatment Value: 100uM ABA vs. No Treatment
  misc_feature: MA Experiment ID: 20000173 Result: Down-regulated in Transcription
  misc_feature: MA Experiment 20000173 PARAMETER Experiment Name: At_42deg_Heat_P Parameter: Age (day) Value: 14
  misc_feature: MA Experiment 20000173 PARAMETER Experiment Name: At_42deg_Heat_P Parameter: Organism Value: A. thaliana
  misc_feature: MA Experiment 20000173 PARAMETER Experiment Name: At_42deg_Heat_P Parameter: Plant Line Value: WS
  misc_feature: MA Experiment 20000173 PARAMETER Experiment Name: At_42deg_Heat_P Parameter: Temperature (deg C) Value: 42 vs. 22
  misc_feature: MA Experiment 20000173 PARAMETER Experiment Name: At_42deg_Heat_P Parameter: Timepoint (hr) Value: 6
  misc_feature: MA Experiment 20000173 PARAMETER Experiment Name: At_42deg_Heat_P Parameter: Tissue Value: Aerial
  misc_feature: MA Experiment ID: 20000179 Result: Down-regulated in Transcription
  misc_feature: MA Experiment 20000179 PARAMETER Experiment Name: At_Germinating_Seeds_P Parameter: Age (hr) Value: 6 vs. 0
  misc_feature: MA Experiment 20000179 PARAMETER Experiment Name: At_Germinating_Seeds_P Parameter: Tissue Value: Germinating Seeds
  misc_feature: MA Experiment ID: 20000182 Result: Up-regulated in Transcription
  misc_feature: MA Experiment 20000182 PARAMETER Experiment Name: At_2mM_SA_P Parameter: Age (day) Value: 14
  misc_feature: MA Experiment 20000182 PARAMETER Experiment Name: At_2mM_SA_P Parameter: Organism Value: A. thaliana
  misc_feature: MA Experiment 20000182 PARAMETER Experiment Name: At_2mM_SA_P Parameter: Plant Line Value: WS
  misc_feature: MA Experiment 20000182 PARAMETER Experiment Name: At_2mM_SA_P Parameter: Timepoint (hr) Value: 6
  misc_feature: MA Experiment 20000182 PARAMETER Experiment Name: At_2mM_SA_P Parameter: Tissue Value: Aerial
  misc_feature: MA Experiment 20000182 PARAMETER Experiment Name: At_2mM_SA_P Parameter: Treatment Value: 2mM SA vs. No Treatment
  misc_feature: MA Experiment ID: 20000184 Result: Down-regulated in Transcription
  misc_feature: MA Experiment 20000184 PARAMETER Experiment Name: At_Shoots__P Parameter: Age (day) Value: 7
  misc_feature: MA Experiment 20000184 PARAMETER Experiment Name: At_Shoots__P Parameter: Tissue Value: Shoots vs. Whole Plant
  misc_feature: MA Experiment ID: 20000211 Result: Up-regulated in Transcription
  misc_feature: MA Experiment 20000211 PARAMETER Experiment Name: At_0.001percent_MeJA__P Parameter: Age (day) Value: 14
  misc_feature: MA Experiment 20000211 PARAMETER Experiment Name: At_0.001percent_MeJA__P Parameter: Organism Value: A. thaliana
  misc_feature: MA Experiment 20000211 PARAMETER Experiment Name: At_0.001percent_MeJA__P Parameter: Plant Line Value: WS
  misc_feature: MA Experiment 20000211 PARAMETER Experiment Name: At_0.001percent_MeJA__P Parameter: Timepoint (hr) Value: 1
  misc_feature: MA Experiment 20000211 PARAMETER Experiment Name: At_0.001percent_MeJA__P Parameter: Tissue Value: Aerial
  misc_feature: MA Experiment 20000211 PARAMETER Experiment Name: At_0.001percent_MeJA__P Parameter: Treatment Value: 0.001percent MeJA vs. No Treatment
  misc_feature: MA Experiment ID: 20000213 Result: Up-regulated in Transcription
  misc_feature: MA Experiment 20000213 PARAMETER Experiment Name: At_4deg_Cold_P Parameter: Timepoint (hr) Value: 2
  misc_feature: MA Experiment ID: 20000227 Result: Down-regulated in Transcription
  misc_feature: MA Experiment 20000227 PARAMETER Experiment Name: At_Root-Tips-vs-Tops_P Parameter: Tissue Value: Root Tips vs. Root Tops
  misc_feature: MA Experiment ID: 20000234 Result: Down-regulated in Transcription
  misc_feature: MA Experiment 20000234 PARAMETER Experiment Name: At_Siliques_P Parameter: Age (day) Value: 21
  misc_feature: MA Experiment 20000234 PARAMETER Experiment Name: At_Siliques_P Parameter: Organism Value: A. thaliana
  misc_feature: MA Experiment 20000234 PARAMETER Experiment Name: At_Siliques_P Parameter: Plant Line Value: WS
  misc_feature: MA Experiment 20000234 PARAMETER Experiment Name: At_Siliques_P Parameter: Tissue Value: Less Than 5mm Siliques vs. Whole Plant
  misc_feature: MA Experiment ID: 20000235 Result: Down-regulated in Transcription
  misc_feature: MA Experiment 20000235 PARAMETER Experiment Name: At_Siliques_P Parameter: Age (day) Value: 21
  misc_feature: MA Experiment 20000235 PARAMETER Experiment Name: At_Siliques_P Parameter: Organism Value: A. thaliana
  misc_feature: MA Experiment 20000235 PARAMETER Experiment Name: At_Siliques_P Parameter: Plant Line Value: WS
  misc_feature: MA Experiment 20000235 PARAMETER Experiment Name: At_Siliques_P Parameter: Tissue Value: 5-10mm Siliques vs. Whole Plant
  misc_feature: MA Experiment ID: 20000267 Result: Up-regulated in Transcription
  misc_feature: MA Experiment 20000267 PARAMETER Experiment Name: At_Drought_P Parameter: Age (day) Value: 7
  misc_feature: MA Experiment 20000267 PARAMETER Experiment Name: At_Drought_P Parameter: Organism Value: A. thaliana
  misc_feature: MA Experiment 20000267 PARAMETER Experiment Name: At_Drought_P Parameter: Plant Line Value: WS
  misc_feature: MA Experiment 20000267 PARAMETER Experiment Name: At_Drought_P Parameter: Timepoint (hr) Value: 6
  misc_feature: MA Experiment 20000267 PARAMETER Experiment Name: At_Drought_P Parameter: Tissue Value: Whole Plant
  misc_feature: MA Experiment 20000267 PARAMETER Experiment Name: At_Drought_P Parameter: Treatment Value: Drought vs. No Drought
  misc_feature: MA Experiment ID: 20000308 Result: Up-regulated in Transcription
  misc_feature: MA Experiment 20000308 PARAMETER Experiment Name: At_100mM_NaCl__P Parameter: Age (day) Value: 17
  misc_feature: MA Experiment 20000308 PARAMETER Experiment Name: At_100mM_NaCl__P Parameter: Organism Value: A. thaliana
  misc_feature: MA Experiment 20000308 PARAMETER Experiment Name: At_100mM_NaCl__P Parameter: Plant Line Value: WS
  misc_feature: MA Experiment 20000308 PARAMETER Experiment Name: At_100mM_NaCl__P Parameter: Timepoint (hr) Value: 72
  misc_feature: MA Experiment 20000308 PARAMETER Experiment Name: At_100mM_NaCl__P Parameter: Tissue Value: Whole Plant
  misc_feature: MA Experiment 20000308 PARAMETER Experiment Name: At_100mM_NaCl__P Parameter: Treatment Value: 100mM NaCl vs. No Treatment
  misc_feature: MA Experiment ID: 20000436 Result: Up-regulated in Transcription
  misc_feature: MA Experiment 20000436 PARAMETER Experiment Name: At_Drought_P Parameter: Age (day) Value: 7
  misc_feature: MA Experiment 20000436 PARAMETER Experiment Name: At_Drought_P Parameter: Organism Value: A. thaliana
  misc_feature: MA Experiment 20000436 PARAMETER Experiment Name: At_Drought_P Parameter: Plant Line Value: WS
  misc_feature: MA Experiment 20000436 PARAMETER Experiment Name: At_Drought_P Parameter: Timepoint (hr) Value: 12
  misc_feature: MA Experiment 20000436 PARAMETER Experiment Name: At_Drought_P Parameter: Tissue Value: Whole Plant
  misc_feature: MA Experiment 20000436 PARAMETER Experiment Name: At_Drought_P Parameter: Treatment Value: Drought vs. No Drought
  misc_feature: MA Experiment ID: 20000437 Result: Up-regulated in Transcription
  misc_feature: MA Experiment 20000437 PARAMETER Experiment Name: At_Drought_P Parameter: Age (day) Value: 8
  misc_feature: MA Experiment 20000437 PARAMETER Experiment Name: At_Drought_P Parameter: Organism Value: A. thaliana
  misc_feature: MA Experiment 20000437 PARAMETER Experiment Name: At_Drought_P Parameter: Plant Line Value: WS
  misc_feature: MA Experiment 20000437 PARAMETER Experiment Name: At_Drought_P Parameter: Timepoint (hr) Value: 24
  misc_feature: MA Experiment 20000437 PARAMETER Experiment Name: At_Drought_P Parameter: Tissue Value: Whole Plant
  misc_feature: MA Experiment 20000437 PARAMETER Experiment Name: At_Drought_P Parameter: Treatment Value: Drought vs. No Drought
  misc_feature: MA Experiment ID: 20000438 Result: Down-regulated in Transcription
  misc_feature: MA Experiment 20000438 PARAMETER Experiment Name: At_Shoots__P Parameter: Age (day) Value: 14
  misc_feature: MA Experiment 20000438 PARAMETER Experiment Name: At_Shoots__P Parameter: Tissue Value: Shoots vs. Whole Plant
  misc_feature: MA Experiment ID: 20000453 Result: Up-regulated in Transcription
  misc_feature: MA Experiment 20000453 PARAMETER Experiment Name: At_100uM_ABA_P Parameter: Age (day) Value: 15
  misc_feature: MA Experiment 20000453 PARAMETER Experiment Name: At_100uM_ABA_P Parameter: Organism Value: A. thaliana
  misc_feature: MA Experiment 20000453 PARAMETER Experiment Name: At_100uM_ABA_P Parameter: Plant Line Value: WS
  misc_feature: MA Experiment 20000453 PARAMETER Experiment Name: At_100uM_ABA_P Parameter: Timepoint (hr) Value: 24
  misc_feature: MA Experiment 20000453 PARAMETER Experiment Name: At_100uM_ABA_P Parameter: Tissue Value: Aerial
  misc_feature: MA Experiment 20000453 PARAMETER Experiment Name: At_100uM_ABA_P Parameter: Treatment Value: 100uM ABA vs. No Treatment
  misc_feature: MA Experiment ID: 20000460 Result: Up-regulated in Transcription
  misc_feature: MA Experiment 20000460 PARAMETER Experiment Name: At_10percent_PEG_P Parameter: Age (day) Value: 12
  misc_feature: MA Experiment 20000460 PARAMETER Experiment Name: At_10percent_PEG_P Parameter: Organism Value: A. thaliana
  misc_feature: MA Experiment 20000460 PARAMETER Experiment Name: At_10percent_PEG_P Parameter: Plant Line Value: WS
  misc_feature: MA Experiment 20000460 PARAMETER Experiment Name: At_10percent_PEG_P Parameter: Timepoint (day) Value: 12
  misc_feature: MA Experiment 20000460 PARAMETER Experiment Name: At_10percent_PEG_P Parameter: Tissue Value: Whole Plant
  misc_feature: MA Experiment 20000460 PARAMETER Experiment Name: At_10percent_PEG_P Parameter: Treatment Value: 10percent PEG vs. No Treatment
  misc_feature: MA Experiment ID: 20000495 Result: Down-regulated in Transcription
  misc_feature: MA Experiment 20000495 PARAMETER Experiment Name: At_Guard_Cells_P Parameter: Harvest Date Value: 8/2/2002
  misc_feature: MA Experiment 20000495 PARAMETER Experiment Name: At_Guard_Cells_P Parameter: Organism Value: A. thaliana
  misc_feature: MA Experiment 20000495 PARAMETER Experiment Name: At_Guard_Cells_P Parameter: Tissue Value: Guard Cells vs. Leaves
  misc_feature: MA Experiment ID: 20000606 Result: Up-regulated in Transcription
  misc_feature: MA Experiment 20000606 PARAMETER Experiment Name: At_CS8548_Mutant_P Parameter: Age (day) Value: 14
  misc_feature: MA Experiment 20000606 PARAMETER Experiment Name: At_CS8548_Mutant_P Parameter: Plant Line Value: CS8548 vs. wt
  misc_feature: MA Experiment 20000606 PARAMETER Experiment Name: At_CS8548_Mutant_P Parameter: Tissue Value: Whole Plant
  misc_feature: MA Experiment ID: 20001451 Result: Down-regulated in Transcription
  misc_feature: MA Experiment 20001451 PARAMETER Experiment Name: At_Far-red-induction_P Parameter: Age (day) Value: 7
  misc_feature: MA Experiment 20001451 PARAMETER Experiment Name: At_Far-red-induction_P Parameter: Light Value: Far-red vs. White
  misc_feature: MA Experiment 20001451 PARAMETER Experiment Name: At_Far-red-induction_P Parameter: Organism Value: A. thaliana
  misc_feature: MA Experiment 20001451 PARAMETER Experiment Name: At_Far-red-induction_P Parameter: Plant Line Value: Columbia
  misc_feature: MA Experiment 20001451 PARAMETER Experiment Name: At_Far-red-induction_P Parameter: Timepoint (hr) Value: 24
  misc_feature: MA Experiment 20001451 PARAMETER Experiment Name: At_Far-red-induction_P Parameter: Tissue Value: Whole Plant
  misc_feature: MA Experiment ID: 20001557 Result: Up-regulated in Transcription
  misc_feature: MA Experiment 20001557 PARAMETER Experiment Name: At_Drought_Soil_Dry_P Parameter: Age (day) Value: 27
  misc_feature: MA Experiment 20001557 PARAMETER Experiment Name: At_Drought_Soil_Dry_P Parameter: Organism Value: A. thaliana
  misc_feature: MA Experiment 20001557 PARAMETER Experiment Name: At_Drought_Soil_Dry_P Parameter: Plant Line Value: WS
  misc_feature: MA Experiment 20001557 PARAMETER Experiment Name: At_Drought_Soil_Dry_P Parameter: Post Timepoint (hr) Value: 3
  misc_feature: MA Experiment 20001557 PARAMETER Experiment Name: At_Drought_Soil_Dry_P Parameter: Post-Treatment Value: Re-Water vs. No Drought
  misc_feature: MA Experiment 20001557 PARAMETER Experiment Name: At_Drought_Soil_Dry_P Parameter: Timepoint (day) Value: 13
  misc_feature: MA Experiment 20001557 PARAMETER Experiment Name: At_Drought_Soil_Dry_P Parameter: Treatment Value: Drought vs. No Drought
  misc_feature: MA Experiment ID: 20001904 Result: Up-regulated in Transcription
  misc_feature: MA Experiment 20001904 PARAMETER Experiment Name: At_Drought_Reproduction_P Parameter: Age (day) Value: 37
  misc_feature: MA Experiment 20001904 PARAMETER Experiment Name: At_Drought_Reproduction_P Parameter: Organism Value: A. thaliana
  misc_feature: MA Experiment 20001904 PARAMETER Experiment Name: At_Drought_Reproduction_P Parameter: Plant Line Value: WS
  misc_feature: MA Experiment 20001904 PARAMETER Experiment Name: At_Drought_Reproduction_P Parameter: Timepoint (day) Value: 7
  misc_feature: MA Experiment 20001904 PARAMETER Experiment Name: At_Drought_Reproduction_P Parameter: Tissue Value: Rosettes
  misc_feature: MA Experiment 20001904 PARAMETER Experiment Name: At_Drought_Reproduction_P Parameter: Treatment Value: Drought vs. No Drought
  misc_feature: MA Experiment ID: 20001905 Result: Up-regulated in Transcription
  misc_feature: MA Experiment 20001905 PARAMETER Experiment Name: At_Drought_Reproduction_P Parameter: Age (day) Value: 40
  misc_feature: MA Experiment 20001905 PARAMETER Experiment Name: At_Drought_Reproduction_P Parameter: Organism Value: A. thaliana
  misc_feature: MA Experiment 20001905 PARAMETER Experiment Name: At_Drought_Reproduction_P Parameter: Plant Line Value: WS
  misc_feature: MA Experiment 20001905 PARAMETER Experiment Name: At_Drought_Reproduction_P Parameter: Timepoint (day) Value: 10
  misc_feature: MA Experiment 20001905 PARAMETER Experiment Name: At_Drought_Reproduction_P Parameter: Tissue Value: Rosettes
  misc_feature: MA Experiment 20001905 PARAMETER Experiment Name: At_Drought_Reproduction_P Parameter: Treatment Value: Drought vs. No Drought
atattggaggtaggaagaagaactctgcaaccaaaccaaccaaccccaaagccaaacaaagttttatagagaccttccatttctccctctcgtgacaaacgcaatttgcagagaagcaacagcaacaacaagaagaagaagaaaaagatttgagattactttgtatcgatttagctattcgagaaactcttgccgtttgaaagttttaattgttaaagatgtcgagttctatggaatgttctgagttcgtcggtagccggagatttactgggaagaagcctagcttctcacagacgtgtagtcgattgagtcagtatctaaaagagaacggtagctttggagatctgagcttaggaatggcatgcaagcctgatgtcaatggaactttaggcaactcacgtcagccgacaacaaccatgagtttattcccttgtgaagcttctaacatggattccatggttcaagatgttaaaccgacgaatctgtttcctaggcaaccaagcttttcttcctcatcttcctctcttccaaaggaagatgttttgaaaatgacacagactaccagatctgtgaaaccagagtctcaaactgcaccattgactatattctacgccgggcaagtgattgtattcaatgacttttctgctgagaaagccaaagaagtgatcaacttggcgagcaaaggcaccgctaatagcttagccaagaatcaaaccgatatcagaagcaacatcgctactatcgcaaaccaagttcctcatccaagaaaaaccacaacacaagagccaatccaatcctccccaacaccattgacagaacttcctattgctagaagagcttcacttcaccggttcttggagaagagaaaggacagagttacgtcaaaggcaccataccaattatgcgatccagccaaagcgtcttcaaaccctcaaaccacaggcaacatgtcgtggctcggtttagcagctgaaatatgaatgctaaccaccctcaagccgtaccaagaaattcttttgacgacgttgcttcaagacaagatataaaagctcctatcttcatgctttttgatttaagatacaaactactcaatgattaggaaacttcatatatttgtatgtattgattagtgatcaattattgttagtattcgttatagtctgtttttctactagttattgtcgcctgtctaaatccccttgctatgggttatctcaaaattagtttcgtatgtaactaattttgtaagaacaataatttttgttgacgaaccatactatcaaatactctaaattatatcttgat

SEQ ID NO: 24634 - protein, 253 aa, Arabidopsis thaliana
  peptide (1)..(253): Ceres Seq. ID no. 12348616
  misc_feature (120)..(155): Pfam Name: ZIM motif Pfam Description: ZIM motif
  misc_feature (19)..(228): Homolog of NCBI NO: 21593242 NR Description: unknown [Arabidopsis thaliana]
  misc_feature (19)..(228): Homolog of NCBI NO: 18394473 NR Description: expressed protein
  misc_feature (89)..(253): Homolog of NCBI NO: 29788814 NR Description: unknown protein [Oryza sativa (japonica
  misc_feature (61)..(249): Homolog of NCBI NO: 23237931 NR Description: contains ESTs
  misc_feature (19)..(228): Homolog of NCBI NO: 18410088 NR Description: expressed protein
  misc_feature (1)..(247): Homolog of NCBI NO: 21592605 NR Description: unknown [Arabidopsis thaliana]
  misc_feature (1)..(247): Homolog of NCBI NO: 18410737 NR Description: expressed protein
  misc_feature (1)..(182): Homolog of NCBI NO: 16604489 NR Description: At1g19180/T29M8_5 [Arabidopsis thaliana]
  misc_feature (1)..(253): Homolog of NCBI NO: 21593416 NR Description: unknown [Arabidopsis thaliana]
  misc_feature (1)..(253): Homolog of NCBI NO: 18394706 NR Description: expressed protein
MSSSMECSEFVGSRRFTGKKPSFSQTCSRLSQYLKENGSFGDLSLGMACKPDVNGTLGNSRQPTTTMSLFPCEASNMDSMVQDVKPTNLFPRQPSFSSSSSSLPKEDVLKMTQTTRSVKPESQTAPLTIFYAGQVIVFNDFSAEKAKEVINLASKGTANSLAKNQTDIRSNIATIANQVPHPRKTTTQEPIQSSPTPLTELPIARRASLHRFLEKRKDRVTSKAPYQLCDPAKASSNPQTTGNMSWLGLAAEI

SEQ ID NO: 24635 - protein, 249 aa, Arabidopsis thaliana
  peptide (1)..(249): Ceres Seq. ID no. 12348617
  misc_feature (116)..(151): Pfam Name: ZIM motif Pfam Description: ZIM motif
  misc_feature (15)..(224): Homolog of NCBI NO: 21593242 NR Description: unknown [Arabidopsis thaliana]
  misc_feature (15)..(224): Homolog of NCBI NO: 18394473 NR Description: expressed protein
  misc_feature (85)..(249): Homolog of NCBI NO: 29788814 NR Description: unknown protein [Oryza sativa (japonica
  misc_feature (57)..(245): Homolog of NCBI NO: 23237931 NR Description: contains ESTs
  misc_feature (15)..(224): Homolog of NCBI NO: 18410088 NR Description: expressed protein
  misc_feature (1)..(243): Homolog of NCBI NO: 21592605 NR Description: unknown [Arabidopsis thaliana]
  misc_feature (1)..(243): Homolog of NCBI NO: 18410737 NR Description: expressed protein
  misc_feature (1)..(178): Homolog of NCBI NO: 16604489 NR Description: At1g19180/T29M8_5 [Arabidopsis thaliana]
  misc_feature (1)..(249): Homolog of NCBI NO: 21593416 NR Description: unknown [Arabidopsis thaliana]
  misc_feature (1)..(249): Homolog of NCBI NO: 18394706 NR Description: expressed protein
MECSEFVGSRRFTGKKPSFSQTCSRLSQYLKENGSFGDLSLGMACKPDVNGTLGNSRQPTTTMSLFPCEASNMDSMVQDVKPTNLFPRQPSFSSSSSSLPKEDVLKMTQTTRSVKPESQTAPLTIFYAGQVIVFNDFSAEKAKEVINLASKGTANSLAKNQTDIRSNIATIANQVPHPRKTTTQEPIQSSPTPLTELPIARRASLHRFLEKRKDRVTSKAPYQLCDPAKASSNPQTTGNMSWLGLAAEI

SEQ ID NO: 24636 - protein, 207 aa, Arabidopsis thaliana
  peptide (1)..(207): Ceres Seq. ID no. 12348618
  misc_feature (74)..(109): Pfam Name: ZIM motif Pfam Description: ZIM motif
  misc_feature (1)..(182): Homolog of NCBI NO: 21593242 NR Description: unknown [Arabidopsis thaliana]
  misc_feature (1)..(182): Homolog of NCBI NO: 18394473 NR Description: expressed protein
  misc_feature (43)..(207): Homolog of NCBI NO: 29788814 NR Description: unknown protein [Oryza sativa (japonica
  misc_feature (15)..(203): Homolog of NCBI NO: 23237931 NR Description: contains ESTs
  misc_feature (1)..(182): Homolog of NCBI NO: 18410088 NR Description: expressed protein
  misc_feature (1)..(201): Homolog of NCBI NO: 21592605 NR Description: unknown [Arabidopsis thaliana]
  misc_feature (1)..(201): Homolog of NCBI NO: 18410737 NR Description: expressed protein
  misc_feature (1)..(136): Homolog of NCBI NO: 16604489 NR Description: At1g19180/T29M8_5 [Arabidopsis thaliana]
  misc_feature (1)..(207): Homolog of NCBI NO: 21593416 NR Description: unknown [Arabidopsis thaliana]
  misc_feature (1)..(207): Homolog of NCBI NO: 18394706 NR Description: expressed protein
MACKPDVNGTLGNSRQPTTTMSLFPCEASNMDSMVQDVKPTNLFPRQPSFSSSSSSLPKEDVLKMTQTTRSVKPESQTAPLTIFYAGQVIVFNDFSAEKAKEVINLASKGTANSLAKNQTDIRSNIATIANQVPHPRKTTTQEPIQSSPTPLTELPIARRASLHRFLEKRKDRVTSKAPYQLCDPAKASSNPQTTGNMSWLGLAAEI

SEQ ID NO: 24637 - DNA, 750 bp, Arabidopsis thaliana
  misc_feature (1)..(750): Ceres Seq. ID no. 12393092
  misc_feature: MA Experiment ID: 108434 Result: Up-regulated in Transcription
  misc_feature: MA Experiment 108434 PARAMETER Experiment Name: At_Root_Tips_cDNA_P Parameter: Tissue Value: Root Tips
  misc_feature: MA Experiment ID: 108577 Result: Down-regulated in Transcription
  misc_feature: MA Experiment 108577 PARAMETER Experiment Name: At_42deg_Heat_cDNA_P Parameter: Temperature (deg C) Value: 42 vs. 22
  misc_feature: MA Experiment 108577 PARAMETER Experiment Name: At_42deg_Heat_cDNA_P Parameter: Timepoint (hr) Value: 6
  misc_feature: MA Experiment 108577 PARAMETER Experiment Name: At_42deg_Heat_cDNA_P Parameter: Tissue Value: Aerial
  misc_feature: MA Experiment ID: 20000111 Result: Down-regulated in Transcription
  misc_feature: MA Experiment 20000111 PARAMETER Experiment Name: At_42deg_Heat_cDNA_P Parameter: Temperature (deg C) Value: 42 vs. 22
  misc_feature: MA Experiment 20000111 PARAMETER Experiment Name: At_42deg_Heat_cDNA_P Parameter: Timepoint (hr) Value: 6
  misc_feature: MA Experiment 20000111 PARAMETER Experiment Name: At_42deg_Heat_cDNA_P Parameter: Tissue Value: Aerial
  misc_feature: MA Experiment ID: 20000113 Result: Down-regulated in Transcription
  misc_feature: MA Experiment 20000113 PARAMETER Experiment Name: At_42deg_Heat_cDNA_P Parameter: Temperature (deg C) Value: 42 vs. 22
  misc_feature: MA Experiment 20000113 PARAMETER Experiment Name: At_42deg_Heat_cDNA_P Parameter: Timepoint (hr) Value: 8
  misc_feature: MA Experiment 20000113 PARAMETER Experiment Name: At_42deg_Heat_cDNA_P Parameter: Tissue Value: Aerial
  misc_feature: MA Experiment ID: 20000173 Result: Down-regulated in Transcription
  misc_feature: MA Experiment 20000173 PARAMETER Experiment Name: At_42deg_Heat_P Parameter: Age (day) Value: 14
  misc_feature: MA Experiment 20000173 PARAMETER Experiment Name: At_42deg_Heat_P Parameter: Organism Value: A. thaliana
  misc_feature: MA Experiment 20000173 PARAMETER Experiment Name: At_42deg_Heat_P Parameter: Plant Line Value: WS
  misc_feature: MA Experiment 20000173 PARAMETER Experiment Name: At_42deg_Heat_P Parameter: Temperature (deg C) Value: 42 vs. 22
  misc_feature: MA Experiment 20000173 PARAMETER Experiment Name: At_42deg_Heat_P Parameter: Timepoint (hr) Value: 6
  misc_feature: MA Experiment 20000173 PARAMETER Experiment Name: At_42deg_Heat_P Parameter: Tissue Value: Aerial
  misc_feature: MA Experiment ID: 20000180 Result: Up-regulated in Transcription
  misc_feature: MA Experiment 20000180 PARAMETER Experiment Name: At_Germinating_Seeds_P Parameter: Age (hr) Value: 24 vs. 0
  misc_feature: MA Experiment 20000180 PARAMETER Experiment Name: At_Germinating_Seeds_P Parameter: Tissue Value: Germinating Seeds
  misc_feature: MA Experiment ID: 20000224 Result: Down-regulated in Transcription
  misc_feature: MA Experiment ID: 20001911 Result: Down-regulated in Transcription
  misc_feature: MA Experiment 20001911 PARAMETER Experiment Name: At_Drought_Reproduction_P Parameter: Age (day) Value: 40
  misc_feature: MA Experiment 20001911 PARAMETER Experiment Name: At_Drought_Reproduction_P Parameter: Organism Value: A. thaliana
  misc_feature: MA Experiment 20001911 PARAMETER Experiment Name: At_Drought_Reproduction_P Parameter: Plant Line Value: WS
  misc_feature: MA Experiment 20001911 PARAMETER Experiment Name: At_Drought_Reproduction_P Parameter: Timepoint (day) Value: 10
  misc_feature: MA Experiment 20001911 PARAMETER Experiment Name: At_Drought_Reproduction_P Parameter: Tissue Value: Flowers
  misc_feature: MA Experiment 20001911 PARAMETER Experiment Name: At_Drought_Reproduction_P Parameter: Treatment Value: Drought vs. No Drought
gttaaaagttacaaacgcgactctctgatcctaaatttcgttgtacagagaagaagcaaaagagagaaacatctgacccggaatctgacctgaaaacccggaagaatcgaaaaatggggaaagatggtctgagcgacgatcaggtctcgtcgatgaaggaagccttcatgctcttcgacaccgatggcgacggcaaaatcgcaccgtcagagctcgggatcctcatgcgatctctcggcggaaacccgacccaagcccagctgaaatccataatcgcatccgagaatctctcttcaccgtttgatttcaacagattcctcgatctcatggcgaaacatctgaagacggaacctttcgatcgccagctccgtgacgcattcaaagtgctcgataaggaaggtaccgggttcgttgctgtggcggatctgaggcatattctgaccagtatcggagagaagctggagcctaatgagttcgatgagtggatcaaggaggtggatgttggatccgatggaaagatccggtatgaagatttcatagcaaggatggttgctaagtgagatctaatcttttatgttttgaaagttgaaatttttaagaagagattctttgtgtttttttcacttgtttgtttgatttcgagcgaatcctagctagggtttgttttatcattgtggaatttgcttactaactttgtcttcttcatgtttgttttcatttttaatggaaatgttgtctgtgtgattcctt

SEQ ID NO: 24638 - protein, 148 aa, Arabidopsis thaliana
  peptide (1)..(148): Ceres Seq. ID no. 12393093
  misc_feature (120)..(148): Pfam Name: EF hand Pfam Description: EF hand
  misc_feature (4)..(148): Homolog of NCBI NO: 4959618 NR Description: calmodulin mutant SYNCAM45 [synthetic construct]
  misc_feature (4)..(148): Homolog of NCBI NO: 4959645 NR Description: calmodulin mutant SYNCAM31 [synthetic construct]
  misc_feature (4)..(148): Homolog of NCBI NO: 4959636 NR Description: calmodulin mutant SYNCAM36 [synthetic construct]
  misc_feature (4)..(148): Homolog of NCBI NO: 4959168 NR Description: calmodulin mutant SYNCAM62 [synthetic construct]
  misc_feature (1)..(148): Homolog of NCBI NO: 29367559 NR Description: putative serine/threonine kinase
  misc_feature (1)..(148): Homolog of NCBI NO: 28629126 NR Description: putative serine/threonine kinase [Vitis vinifera]
  misc_feature (1)..(148): Homolog of NCBI NO: 6630454 NR Description: F23N19.18 [Arabidopsis thaliana]
  misc_feature (1)..(148): Homolog of NCBI NO: 15221593 NR Description: calmodulin, putative
  misc_feature (1)..(147): Homolog of NCBI NO: 25402719 NR Description: protein F5O11.4 [imported] - Arabidopsis thaliana
  misc_feature (1)..(148): Homolog of NCBI NO: 15221284 NR Description: putative serine/threonine kinase
MGKDGLSDDQVSSMKEAFMLFDTDGDGKIAPSELGILMRSLGGNPTQAQLKSIIASENLSSPFDFNRFLDLMAKHLKTEPFDRQLRDAFKVLDKEGTGFVAVADLRHILTSIGEKLEPNEFDEWIKEVDVGSDGKIRYEDFIARMVAK

SEQ ID NO: 24639 - protein, 135 aa, Arabidopsis thaliana
  peptide (1)..(135): Ceres Seq. ID no. 12393094
  misc_feature (107)..(135): Pfam Name: EF hand Pfam Description: EF hand
  misc_feature (1)..(135): Homolog of NCBI NO: 4959618 NR Description: calmodulin mutant SYNCAM45 [synthetic construct]
  misc_feature (1)..(135): Homolog of NCBI NO: 4959645 NR Description: calmodulin mutant SYNCAM31 [synthetic construct]
  misc_feature (1)..(135): Homolog of NCBI NO: 4959636 NR Description: calmodulin mutant SYNCAM36 [synthetic construct]
  misc_feature (1)..(135): Homolog of NCBI NO: 4959168 NR Description: calmodulin mutant SYNCAM62 [synthetic construct]
  misc_feature (1)..(135): Homolog of NCBI NO: 29367559 NR Description: putative serine/threonine kinase
  misc_feature (1)..(135): Homolog of NCBI NO: 28629126 NR Description: putative serine/threonine kinase [Vitis vinifera]
  misc_feature (1)..(135): Homolog of NCBI NO: 6630454 NR Description: F23N19.18 [Arabidopsis thaliana]
  misc_feature (1)..(135): Homolog of NCBI NO: 15221593 NR Description: calmodulin, putative
  misc_feature (1)..(134): Homolog of NCBI NO: 25402719 NR Description: protein F5O11.4 [imported] - Arabidopsis thaliana
  misc_feature (1)..(135): Homolog of NCBI NO: 15221284 NR Description: putative serine/threonine kinase
MKEAFMLFDTDGDGKIAPSELGILMRSLGGNPTQAQLKSIIASENLSSPFDFNRFLDLMAKHLKTEPFDRQLRDAFKVLDKEGTGFVAVADLRHILTSIGEKLEPNEFDEWIKEVDVGSDGKIRYEDFIARMVAK

SEQ ID NO: 24640 - protein, 130 aa, Arabidopsis thaliana
  peptide (1)..(130): Ceres Seq. ID no. 12393095
  misc_feature (102)..(130): Pfam Name: EF hand Pfam Description: EF hand
  misc_feature (1)..(130): Homolog of NCBI NO: 4959618 NR Description: calmodulin mutant SYNCAM45 [synthetic construct]
  misc_feature (1)..(130): Homolog of NCBI NO: 4959636 NR Description: calmodulin mutant SYNCAM36 [synthetic construct]
  misc_feature (1)..(130): Homolog of NCBI NO: 4959645 NR Description: calmodulin mutant SYNCAM31 [synthetic construct]
  misc_feature (1)..(130): Homolog of NCBI NO: 4959168 NR Description: calmodulin mutant SYNCAM62 [synthetic construct]
  misc_feature (1)..(130): Homolog of NCBI NO: 29367559 NR Description: putative serine/threonine kinase
  misc_feature (1)..(130): Homolog of NCBI NO: 28629126 NR Description: putative serine/threonine kinase [Vitis vinifera]
  misc_feature (1)..(130): Homolog of NCBI NO: 6630454 NR Description: F23N19.18 [Arabidopsis thaliana]
  misc_feature (1)..(130): Homolog of NCBI NO: 15221593 NR Description: calmodulin, putative
  misc_feature (1)..(129): Homolog of NCBI NO: 25402719 NR Description: protein F5O11.4 [imported] - Arabidopsis thaliana
  misc_feature (1)..(130): Homolog of NCBI NO: 15221284 NR Description: putative serine/threonine kinase
MLFDTDGDGKIAPSELGILMRSLGGNPTQAQLKSIIASENLSSPFDFNRFLDLMAKHLKTEPFDRQLRDAFKVLDKEGTGFVAVADLRHILTSIGEKLEPNEFDEWIKEVDVGSDGKIRYEDFIARMVAK

SEQ ID NO: 24641 - DNA, 1622 bp, Arabidopsis thaliana
  misc_feature (1)..(1622): Ceres Seq. ID no. 12482499
  misc_feature: MA Experiment ID: 108461 Result: Down-regulated in Transcription
  misc_feature: MA Experiment 108461 PARAMETER Experiment Name: At_Germinating_Seeds_cDNA_P Parameter: Age (day) Value: 1 vs. 0
  misc_feature: MA Experiment 108461 PARAMETER Experiment Name: At_Germinating_Seeds_cDNA_P Parameter: Tissue Value: Germinating Seeds
  misc_feature: MA Experiment ID: 108607 Result: Down-regulated in Transcription
  misc_feature: MA Experiment 108607 PARAMETER Experiment Name: At_100uM_ABA_cDNA_P Parameter: Timepoint (hr) Value: 4
  misc_feature: MA Experiment 108607 PARAMETER Experiment Name: At_100uM_ABA_cDNA_P Parameter: Tissue Value: Aerial
  misc_feature: MA Experiment 108607 PARAMETER Experiment Name: At_100uM_ABA_cDNA_P Parameter: Treatment Value: 100uM ABA vs. No Treatment
  misc_feature: MA Experiment ID: 108668 Result: Down-regulated in Transcription
  misc_feature: MA Experiment 108668 PARAMETER Experiment Name: At_2mM_SA_cDNA_P Parameter: Plant Line Value: WS
  misc_feature: MA Experiment 108668 PARAMETER Experiment Name: At_2mM_SA_cDNA_P Parameter: Timepoint (hr) Value: 6
  misc_feature: MA Experiment 108668 PARAMETER Experiment Name: At_2mM_SA_cDNA_P Parameter: Treatment Value: 2mM SA vs. No Treatment
  misc_feature: MA Experiment ID: 20000030 Result: Down-regulated in Transcription
  misc_feature: MA Experiment 20000030 PARAMETER Experiment Name: At_CS6630_Roots_cDNA_P Parameter: Plant Line Value: CS6630 vs. WS
  misc_feature: MA Experiment 20000030 PARAMETER Experiment Name: At_CS6630_Roots_cDNA_P Parameter: Tissue Value: Roots
  misc_feature: MA Experiment ID: 20000068 Result: Down-regulated in Transcription
  misc_feature: MA Experiment ID: 20000069 Result: Down-regulated in Transcription
  misc_feature: MA Experiment 20000069 PARAMETER Experiment Name: At_100uM_ABA_Mutants_cDNA_P Parameter: Plant Line Value: CS23
  misc_feature: MA Experiment 20000069 PARAMETER Experiment Name: At_100uM_ABA_Mutants_cDNA_P Parameter: Timepoint (hr) Value: 6
  misc_feature: MA Experiment 20000069 PARAMETER Experiment Name: At_100uM_ABA_Mutants_cDNA_P Parameter: Tissue Value: Aerial
  misc_feature: MA Experiment 20000069 PARAMETER Experiment Name: At_100uM_ABA_Mutants_cDNA_P Parameter: Treatment Value: 100uM ABA vs. No Treatment
  misc_feature: MA Experiment ID: 20000224 Result: Down-regulated in Transcription
  misc_feature: MA Experiment ID: 20000355 Result: Down-regulated in Transcription
  misc_feature: MA Experiment 20000355 PARAMETER Experiment Name: At_Siliques_Sub_P Parameter: Age (day) Value: 21
  misc_feature: MA Experiment 20000355 PARAMETER Experiment Name: At_Siliques_Sub_P Parameter: Organism Value: A. thaliana
  misc_feature: MA Experiment 20000355 PARAMETER Experiment Name: At_Siliques_Sub_P Parameter: Plant Line Value: WS
  misc_feature: MA Experiment 20000355 PARAMETER Experiment Name: At_Siliques_Sub_P Parameter: Tissue Value: Less Than 5mm Siliques vs. Whole Plant
ctctctccctccctccctcttccattaaatctttgtggttctcttttattgttttgatactgtgctctgcttcggagagtgtagaaagagacagagctaaagtctctgtgtttcttctcagcaggactaaaaggaaaaaaggaaatcgattgctaatgtcgggtgagaaacaagcggaggagtcaatagtagtctccggggaggatgaggtggccggtagaaaagtggaagattcagcggcggaggaggatattgacggcaacgggggcaatggatttagtatgaagagcttcctctggcatggcgggtccgcttgggacgcctggtttagctgtgcatcaaatcaagtggcacaagtgctgttgacgctgccgtattcgttctcgcagttgggaatgttatcaggaatattgcttcaaatattctatgggttaatgggatcttggactgcttatctcatcagtgttctttacgtcgagtatcgtgcccgtatggagaaacaagaagccaaatccttcaaaaaccacgttattcaatggtttgaagtgcttgatgggctgctgggtccgtactggaaagcagcggggctcgcatttaattgcaccttcttgttattcggatcagtcatccagctcattgcttgtgctagcaatatatattacataaacgataggttagacaagaggacatggacttatatatttggggcttgctgtgccacgaccgttttcataccatctttccacaattaccgtatttggtctttcctcggccttggcatgaccacctacaccgcttggtacctcaccatcgcctcttttctccatggtcaggcggagggtgtgacacattccggtccaaccaagcttgtgttgtactttaccggagccaccaacatcctctataccttcggtggacacgctgtgaccgtggaaataatgcatgcgatgtggaaaccaaggaagtttaagagcatctacttgatggcaactctgtacgtcttcacattaacgcttccgtcagcctccgccgtctactgggctttcggcgaccaacttctcaaccactcaaacgctttctctctcctccctaaaacgcgtttccgtgacaccgccgttatcctcatgctcatccatcagtttataacgttcgggtttgcgtgtacaccattgtacttcgtatgggaaaaagcgatcggaatgcaccacacaaagagcttatgtctaagagcgctggtgaggctaccggtggtggttccgatatggtttttggcaatcatctttccctttttcgggccaataaactcggcagttggagccttacttgttaccttcaccgtctatatcatccctgccttagcccacatgctcacgtaccgcaccgcctctgcccgccggaacgcggcggagaaaccaccgttttttatccctagctgggctggagtttacgtgataaacgctttcatagtggtttgggtcctagttctcgggttcgggtttggcggatgggccagtatgaccaacttcatcaggcaaattgatacttttggcctctttgccaaatgctaccaatgcaaaccacctccagctccgatcgccgccggagctcaccaccgccgttag

SEQ ID NO: 24642 - protein, 539 aa, Arabidopsis thaliana
  peptide (1)..(539): Ceres Seq. ID no. 12482500
  misc_feature (52)..(537): Homolog of NCBI NO: 10800918 NR Description: putative AUX1-like permease [Medicago truncatula]
  misc_feature (52)..(537): Homolog of NCBI NO: 10441742 NR Description: putative AUX1-like permease
  misc_feature (52)..(536): Homolog of NCBI NO: 25956260 NR Description: AUX1-like auxin transport protein [Cucumis
  misc_feature (52)..(530): Homolog of NCBI NO: 6650716 NR Description: AUX1-like protein [Populus tremula x Populus
  misc_feature (52)..(538): Homolog of NCBI NO: 21586468 NR Description: auxin influx carrier protein [Medicago truncatula]
  misc_feature (60)..(538): Homolog of NCBI NO: 18404642 NR Description: expressed protein
  misc_feature (52)..(537): Homolog of NCBI NO: 10800920 NR Description: putative AUX1-like permease [Medicago truncatula]
  misc_feature (52)..(535): Homolog of NCBI NO: 37651177 NR Description: AUX1-like auxin influx carrier protein [Pisum
  misc_feature (52)..(539): Homolog of NCBI NO: 5881784 NR Description: putative AUX1-like permease [Arabidopsis thaliana]
  misc_feature (52)..(539): Homolog of NCBI NO: 15240927 NR Description: LAX1 / AUX1 -like permease; protein id:
LSLPPSSIKSLWFSFIVLILCSASESVERDRAKVSVFLLSRTKRKKGNRLLMSGEKQAEESIVVSGEDEVAGRKVEDSAAEEDIDGNGGNGFSMKSFLWHGGSAWDAWFSCASNQVAQVLLTLPYSFSQLGMLSGILLQIFYGLMGSWTAYLISVLYVEYRARMEKQEAKSFKNHVIQWFEVLDGLLGPYWKAAGLAFNCTFLLFGSVIQLIACASNIYYINDRLDKRTWTYIFGACCATTVFIPSFHNYRIWSFLGLGMTTYTAWYLTIASFLHGQAEGVTHSGPTKLVLYFTGATNILYTFGGHAVTVEIMHAMWKPRKFKSIYLMATLYVFTLTLPSASAVYWAFGDQLLNHSNAFSLLPKTRFRDTAVILMLIHQFITFGFACTPLYFVWEKAIGMHHTKSLCLRALVRLPVVVPIWFLAIIFPFFGPINSAVGALLVTFTVYIIPALAHMLTYRTASARRNAAEKPPFFIPSWAGVYVINAFIVVWVLVLGFGFGGWASMTNFIRQIDTFGLFAKCYQCKPPPAPIAAGAHHRR

SEQ ID NO: 24643 - protein, 488 aa, Arabidopsis thaliana
  peptide (1)..(488): Ceres Seq. ID no. 12482501
  misc_feature (1)..(486): Homolog of NCBI NO: 10800918 NR Description: putative AUX1-like permease [Medicago truncatula]
  misc_feature (1)..(486): Homolog of NCBI NO: 10441742 NR Description: putative AUX1-like permease
  misc_feature (1)..(485): Homolog of NCBI NO: 25956260 NR Description: AUX1-like auxin transport protein [Cucumis
  misc_feature (1)..(479): Homolog of NCBI NO: 6650716 NR Description: AUX1-like protein [Populus tremula x Populus
  misc_feature (1)..(487): Homolog of NCBI NO: 21586468 NR Description: auxin influx carrier protein [Medicago truncatula]
  misc_feature (9)..(487): Homolog of NCBI NO: 18404642 NR Description: expressed protein
  misc_feature (1)..(486): Homolog of NCBI NO: 10800920 NR Description: putative AUX1-like permease [Medicago truncatula]
  misc_feature (1)..(484): Homolog of NCBI NO: 37651177 NR Description: AUX1-like auxin influx carrier protein [Pisum
  misc_feature (1)..(488): Homolog of NCBI NO: 5881784 NR Description: putative AUX1-like permease [Arabidopsis thaliana]
  misc_feature (1)..(488): Homolog of NCBI NO: 15240927 NR Description: LAX1 / AUX1 -like permease; protein id:
MSGEKQAEESIVVSGEDEVAGRKVEDSAAEEDIDGNGGNGFSMKSFLWHGGSAWDAWFSCASNQVAQVLLTLPYSFSQLGMLSGILLQIFYGLMGSWTAYLISVLYVEYRARMEKQEAKSFKNHVIQWFEVLDGLLGPYWKAAGLAFNCTFLLFGSVIQLIACASNIYYINDRLDKRTWTYIFGACCATTVFIPSFHNYRIWSFLGLGMTTYTAWYLTIASFLHGQAEGVTHSGPTKLVLYFTGATNILYTFGGHAVTVEIMHAMWKPRKFKSIYLMATLYVFTLTLPSASAVYWAFGDQLLNHSNAFSLLPKTRFRDTAVILMLIHQFITFGFACTPLYFVWEKAIGMHHTKSLCLRALVRLPVVVPIWFLAIIFPFFGPINSAVGALLVTFTVYIIPALAHMLTYRTASARRNAAEKPPFFIPSWAGVYVINAFIVVWVLVLGFGFGGWASMTNFIRQIDTFGLFAKCYQCKPPPAPIAAGAHHRR

SEQ ID NO: 24644 - protein, 446 aa, Arabidopsis thaliana
  peptide (1)..(446): Ceres Seq. ID no. 12482502
  misc_feature (1)..(444): Homolog of NCBI NO: 10800918 NR Description: putative AUX1-like permease [Medicago truncatula]
  misc_feature (1)..(444): Homolog of NCBI NO: 10441742 NR Description: putative AUX1-like permease
  misc_feature (1)..(443): Homolog of NCBI NO: 25956260 NR Description: AUX1-like auxin transport protein [Cucumis
  misc_feature (1)..(437): Homolog of NCBI NO: 6650716 NR Description: AUX1-like protein [Populus tremula x Populus
  misc_feature (1)..(445): Homolog of NCBI NO: 21586468 NR Description: auxin influx carrier protein [Medicago truncatula]
  misc_feature (1)..(445): Homolog of NCBI NO: 18404642 NR Description: expressed protein
  misc_feature (1)..(444): Homolog of NCBI NO: 10800920 NR Description: putative AUX1-like permease [Medicago truncatula]
  misc_feature (1)..(442): Homolog of NCBI NO: 37651177 NR Description: AUX1-like auxin influx carrier protein [Pisum
  misc_feature (1)..(446): Homolog of NCBI NO: 5881784 NR Description: putative AUX1-like permease [Arabidopsis thaliana]
  misc_feature (1)..(446): Homolog of NCBI NO: 15240927 NR Description: LAX1 / AUX1 -like permease; protein id:
MKSFLWHGGSAWDAWFSCASNQVAQVLLTLPYSFSQLGMLSGILLQIFYGLMGSWTAYLISVLYVEYRARMEKQEAKSFKNHVIQWFEVLDGLLGPYWKAAGLAFNCTFLLFGSVIQLIACASNIYYINDRLDKRTWTYIFGACCATTVFIPSFHNYRIWSFLGLGMTTYTAWYLTIASFLHGQAEGVTHSGPTKLVLYFTGATNILYTFGGHAVTVEIMHAMWKPRKFKSIYLMATLYVFTLTLPSASAVYWAFGDQLLNHSNAFSLLPKTRFRDTAVILMLIHQFITFGFACTPLYFVWEKAIGMHHTKSLCLRALVRLPVVVPIWFLAIIFPFFGPINSAVGALLVTFTVYIIPALAHMLTYRTASARRNAAEKPPFFIPSWAGVYVINAFIVVWVLVLGFGFGGWASMTNFIRQIDTFGLFAKCYQCKPPPAPIAAGAHHRR

SEQ ID NO: 24645 - DNA, 1645 bp, Arabidopsis thaliana
  misc_feature (1)..(1645): Ceres Seq. ID no. 13494027
  misc_feature: MA Experiment ID: 108488 Result: Down-regulated in Transcription
  misc_feature: MA Experiment ID: 108561 Result: Up-regulated in Transcription
  misc_feature: MA Experiment 108561 PARAMETER Experiment Name: At_100uM_ABA_cDNA_P Parameter: Timepoint (hr) Value: 6
  misc_feature: MA Experiment 108561 PARAMETER Experiment Name: At_100uM_ABA_cDNA_P Parameter: Tissue Value: Aerial
  misc_feature: MA Experiment 108561 PARAMETER Experiment Name: At_100uM_ABA_cDNA_P Parameter: Treatment Value: 100uM ABA vs. No Treatment
  misc_feature: MA Experiment ID: 108572 Result: Up-regulated in Transcription
  misc_feature: MA Experiment 108572 PARAMETER Experiment Name: At_Drought_cDNA_P Parameter: Timepoint (hr) Value: 1
  misc_feature: MA Experiment 108572 PARAMETER Experiment Name: At_Drought_cDNA_P Parameter: Tissue Value: Aerial
  misc_feature: MA Experiment 108572 PARAMETER Experiment Name: At_Drought_cDNA_P Parameter: Treatment Value: Drought vs. No Drought
  misc_feature: MA Experiment ID: 108573 Result: Up-regulated in Transcription
  misc_feature: MA Experiment 108573 PARAMETER Experiment Name: At_Drought_cDNA_P Parameter: Timepoint (hr) Value: 6
  misc_feature: MA Experiment 108573 PARAMETER Experiment Name: At_Drought_cDNA_P Parameter: Tissue Value: Aerial
  misc_feature: MA Experiment 108573 PARAMETER Experiment Name: At_Drought_cDNA_P Parameter: Treatment Value: Drought vs. No Drought
  misc_feature: MA Experiment ID: 108585 Result: Up-regulated in Transcription
  misc_feature: MA Experiment 108585 PARAMETER Experiment Name: At_5mM_NaNP_cDNA_P Parameter: Timepoint (hr) Value: 6
  misc_feature: MA Experiment 108585 PARAMETER Experiment Name: At_5mM_NaNP_cDNA_P Parameter: Tissue Value: Aerial
  misc_feature: MA Experiment 108585 PARAMETER Experiment Name: At_5mM_NaNP_cDNA_P Parameter: Treatment Value: null
  misc_feature: MA Experiment ID: 108605 Result: Up-regulated in Transcription
  misc_feature: MA Experiment 108605 PARAMETER Experiment Name: At_100uM_ABA_cDNA_P Parameter: Timepoint (hr) Value: 6
  misc_feature: MA Experiment 108605 PARAMETER Experiment Name: At_100uM_ABA_cDNA_P Parameter: Tissue Value: Aerial
  misc_feature: MA Experiment 108605 PARAMETER Experiment Name: At_100uM_ABA_cDNA_P Parameter: Treatment Value: 100uM ABA vs. No Treatment
  misc_feature: MA Experiment ID: 108607 Result: Up-regulated in Transcription
  misc_feature: MA Experiment 108607 PARAMETER Experiment Name: At_100uM_ABA_cDNA_P Parameter: Timepoint (hr) Value: 4
  misc_feature: MA Experiment 108607 PARAMETER Experiment Name: At_100uM_ABA_cDNA_P Parameter: Tissue Value: Aerial
  misc_feature: MA Experiment 108607 PARAMETER Experiment Name: At_100uM_ABA_cDNA_P Parameter: Treatment Value: 100uM ABA vs. No Treatment
  misc_feature: MA Experiment ID: 20000069 Result: Up-regulated in Transcription
  misc_feature: MA Experiment 20000069 PARAMETER Experiment Name: At_100uM_ABA_Mutants_cDNA_P Parameter: Plant Line Value: CS23
  misc_feature: MA Experiment 20000069 PARAMETER Experiment Name: At_100uM_ABA_Mutants_cDNA_P Parameter: Timepoint (hr) Value: 6
  misc_feature: MA Experiment 20000069 PARAMETER Experiment Name: At_100uM_ABA_Mutants_cDNA_P Parameter: Tissue Value: Aerial
  misc_feature: MA Experiment 20000069 PARAMETER Experiment Name: At_100uM_ABA_Mutants_cDNA_P Parameter: Treatment Value: 100uM ABA vs. No Treatment
  misc_feature: MA Experiment ID: 20000070 Result: Up-regulated in Transcription
  misc_feature: MA Experiment 20000070 PARAMETER Experiment Name: At_100uM_ABA_Mutants_cDNA_P Parameter: Plant Line Value: CS24
  misc_feature: MA Experiment 20000070 PARAMETER Experiment Name: At_100uM_ABA_Mutants_cDNA_P Parameter: Timepoint (hr) Value: 6
  misc_feature: MA Experiment 20000070 PARAMETER Experiment Name: At_100uM_ABA_Mutants_cDNA_P Parameter: Tissue Value: Aerial
  misc_feature: MA Experiment 20000070 PARAMETER Experiment Name: At_100uM_ABA_Mutants_cDNA_P Parameter: Treatment Value: 100uM ABA vs. No Treatment
  misc_feature: MA Experiment ID: 20000071 Result: Up-regulated in Transcription
  misc_feature: MA Experiment 20000071 PARAMETER Experiment Name: At_100uM_ABA_Mutants_cDNA_P Parameter: Plant Line Value: CS8104
  misc_feature: MA Experiment 20000071 PARAMETER Experiment Name: At_100uM_ABA_Mutants_cDNA_P Parameter: Timepoint (hr) Value: 6
  misc_feature: MA Experiment 20000071 PARAMETER Experiment Name: At_100uM_ABA_Mutants_cDNA_P Parameter: Tissue Value: Aerial
  misc_feature: MA Experiment 20000071 PARAMETER Experiment Name: At_100uM_ABA_Mutants_cDNA_P Parameter: Treatment Value: 100uM ABA vs. No Treatment
  misc_feature: MA Experiment ID: 20000087 Result: Up-regulated in Transcription
  misc_feature: MA Experiment 20000087 PARAMETER Experiment Name: At_100uM_ABA_Mutants_cDNA_P Parameter: Plant Line Value: WS
  misc_feature: MA Experiment 20000087 PARAMETER Experiment Name: At_100uM_ABA_Mutants_cDNA_P Parameter: Timepoint (hr) Value: 6
  misc_feature: MA Experiment 20000087 PARAMETER Experiment Name: At_100uM_ABA_Mutants_cDNA_P Parameter: Tissue Value: Aerial
  misc_feature: MA Experiment 20000087 PARAMETER Experiment Name: At_100uM_ABA_Mutants_cDNA_P Parameter: Treatment Value: 100uM ABA vs. No Treatment
  misc_feature: MA Experiment ID: 20000169 Result: Up-regulated in Transcription
  misc_feature: MA Experiment 20000169 PARAMETER Experiment Name: At_100uM_ABA_P Parameter: Age (day) Value: 14
  misc_feature: MA Experiment 20000169 PARAMETER Experiment Name: At_100uM_ABA_P Parameter: Organism Value: A. thaliana
  misc_feature: MA Experiment 20000169 PARAMETER Experiment Name: At_100uM_ABA_P Parameter: Plant Line Value: WS
  misc_feature: MA Experiment 20000169 PARAMETER Experiment Name: At_100uM_ABA_P Parameter: Timepoint (hr) Value: 6
  misc_feature: MA Experiment 20000169 PARAMETER Experiment Name: At_100uM_ABA_P Parameter: Tissue Value: Aerial
  misc_feature: MA Experiment 20000169 PARAMETER Experiment Name: At_100uM_ABA_P Parameter: Treatment Value: 100uM ABA vs. No Treatment
  misc_feature: MA Experiment ID: 20000436 Result: Up-regulated in Transcription
  misc_feature: MA Experiment 20000436 PARAMETER Experiment Name: At_Drought_P Parameter: Age (day) Value: 7
  misc_feature: MA Experiment 20000436 PARAMETER Experiment Name: At_Drought_P Parameter: Organism Value: A. thaliana
  misc_feature: MA Experiment 20000436 PARAMETER Experiment Name: At_Drought_P Parameter: Plant Line Value: WS
  misc_feature: MA Experiment 20000436 PARAMETER Experiment Name: At_Drought_P Parameter: Timepoint (hr) Value: 12
  misc_feature: MA Experiment 20000436 PARAMETER Experiment Name: At_Drought_P Parameter: Tissue Value: Whole Plant
  misc_feature: MA Experiment 20000436 PARAMETER Experiment Name: At_Drought_P Parameter: Treatment Value: Drought vs. No Drought
  misc_feature: MA Experiment ID: 20000437 Result: Up-regulated in Transcription
  misc_feature: MA Experiment 20000437 PARAMETER Experiment Name: At_Drought_P Parameter: Age (day) Value: 8
  misc_feature: MA Experiment 20000437 PARAMETER Experiment Name: At_Drought_P Parameter: Organism Value: A. thaliana
  misc_feature: MA Experiment 20000437 PARAMETER Experiment Name: At_Drought_P Parameter: Plant Line Value: WS
  misc_feature: MA Experiment 20000437 PARAMETER Experiment Name: At_Drought_P Parameter: Timepoint (hr) Value: 24
  misc_feature: MA Experiment 20000437 PARAMETER Experiment Name: At_Drought_P Parameter: Tissue Value: Whole Plant
  misc_feature: MA Experiment 20000437 PARAMETER Experiment Name: At_Drought_P Parameter: Treatment Value: Drought vs. No Drought
  misc_feature: MA Experiment ID: 20000495 Result: Up-regulated in Transcription
  misc_feature: MA Experiment 20000495 PARAMETER Experiment Name: At_Guard_Cells_P Parameter: Harvest Date Value: 8/2/2002
  misc_feature: MA Experiment 20000495 PARAMETER Experiment Name: At_Guard_Cells_P Parameter: Organism Value: A. thaliana
  misc_feature: MA Experiment 20000495 PARAMETER Experiment Name: At_Guard_Cells_P Parameter: Tissue Value: Guard Cells vs. Leaves
  misc_feature: MA Experiment ID: 20000794 Result: Up-regulated in Transcription
  misc_feature: MA Experiment 20000794 PARAMETER Experiment Name: At_Petals_P Parameter: Age (day) Value: 23-25 days
  misc_feature: MA Experiment 20000794 PARAMETER Experiment Name: At_Petals_P Parameter: Plant Line Value: WS
  misc_feature: MA Experiment 20000794 PARAMETER Experiment Name: At_Petals_P Parameter: Tissue Value: Petals vs. Whole plant
  misc_feature: MA Experiment ID: 20001554 Result: Up-regulated in Transcription
  misc_feature: MA Experiment 20001554 PARAMETER Experiment Name: At_Drought_Soil_Dry_P Parameter: Age (day) Value: 21
  misc_feature: MA Experiment 20001554 PARAMETER Experiment Name: At_Drought_Soil_Dry_P Parameter: Organism Value: A. thaliana
  misc_feature: MA Experiment 20001554 PARAMETER Experiment Name: At_Drought_Soil_Dry_P Parameter: Plant Line Value: WS
  misc_feature: MA Experiment 20001554 PARAMETER Experiment Name: At_Drought_Soil_Dry_P Parameter: Post Timepoint (hr) Value: None
  misc_feature: MA Experiment 20001554 PARAMETER Experiment Name: At_Drought_Soil_Dry_P Parameter: Post-Treatment Value: None
  misc_feature: MA Experiment 20001554 PARAMETER Experiment Name: At_Drought_Soil_Dry_P Parameter: Timepoint (day) Value: 7
  misc_feature: MA Experiment 20001554 PARAMETER Experiment Name: At_Drought_Soil_Dry_P Parameter: Treatment Value: Drought vs. No Drought
  misc_feature: MA Experiment ID: 20001555 Result: Up-regulated in Transcription
  misc_feature: MA Experiment 20001555 PARAMETER Experiment Name: At_Drought_Soil_Dry_P Parameter: Age (day) Value: 24
  misc_feature: MA Experiment 20001555 PARAMETER Experiment Name: At_Drought_Soil_Dry_P Parameter: Organism Value: A. thaliana
  misc_feature: MA Experiment 20001555 PARAMETER Experiment Name: At_Drought_Soil_Dry_P Parameter: Plant Line Value: WS
  misc_feature: MA Experiment 20001555 PARAMETER Experiment Name: At_Drought_Soil_Dry_P Parameter: Post Timepoint (hr) Value: None
  misc_feature: MA Experiment 20001555 PARAMETER Experiment Name: At_Drought_Soil_Dry_P Parameter: Post-Treatment Value: None
  misc_feature: MA Experiment 20001555 PARAMETER Experiment Name: At_Drought_Soil_Dry_P Parameter: Timepoint (day) Value: 10
  misc_feature: MA Experiment 20001555 PARAMETER Experiment Name: At_Drought_Soil_Dry_P Parameter: Treatment Value: Drought vs. No Drought
  misc_feature: MA Experiment ID: 20001911 Result: Up-regulated in Transcription
  misc_feature: MA Experiment 20001911 PARAMETER Experiment Name: At_Drought_Reproduction_P Parameter: Age (day) Value: 40
  misc_feature: MA Experiment 20001911 PARAMETER Experiment Name: At_Drought_Reproduction_P Parameter: Organism Value: A. thaliana
  misc_feature: MA Experiment 20001911 PARAMETER Experiment Name: At_Drought_Reproduction_P Parameter: Plant Line Value: WS
  misc_feature: MA Experiment 20001911 PARAMETER Experiment Name: At_Drought_Reproduction_P Parameter: Timepoint (day) Value: 10
  misc_feature: MA Experiment 20001911 PARAMETER Experiment Name: At_Drought_Reproduction_P Parameter: Tissue Value: Flowers
  misc_feature: MA Experiment 20001911 PARAMETER Experiment Name: At_Drought_Reproduction_P Parameter: Treatment Value: Drought vs. No Drought
  misc_feature: Phenotype: FERTILITY Fertility-Reduced
  misc_feature: Phenotype: FERTILITY Fertility-Reduced
  misc_feature: Phenotype: FERTILITY Fertility-Reduced
  misc_feature: Phenotype: ROSETTE LEAVES Shape-Lanceolate
  misc_feature: Phenotype: WHOLE PLANT Size-Small
  misc_feature: Phenotype: FERTILITY Fertility-Reduced
aaagaaaaaaaaaagaaagctttttgggaacataaacaccatcgaaggagggtgggaggtgttttatgttcatgggtggagcttcttggccaacctgaccccattcatcatatcattacccactttcttctcctaaattattctctcttatctctctctctctctttttattttctttctttcttaattcatctaaactctctctgcttttgcttttcgtaattccttacatttcactcaatattaatccccagaatctccgatccacccacaaatttagcaattttctgagatttgatcatttgggtcaccaaaaaatcttgtctttttgatctgggtttaacgccaataacatatgggaaacattagcagcagcggtggtgaaggtagacgccgtcgacggcgaaaccatacggcggctccaccaccacctcctcctcctccttcttcttctcttcctccaccacctctacctacagaaatccaagctaatcccatcgttttcgctgccgttactccctatcctaatcctaatcctaatccggtttaccagtaccctgcttcttactaccaccatcctcccccgggagccatgcctcttccgccgtacgaccaccacctccaacatcatccaccgcatccttaccacaaccactcttgggctcccgtggcgatggccagatacccttatgctggtcacatgatggctcaaccgactccttacgttgaacaccagaaagccgtcacgattcgtaacgacgttaatctcaagaaggagtctcttaggcttgaacccgacccggataatccgggtcgctttctcgtctcctttacgtttgatgcaaccgtctccggaaggattagtgtcattttctttgctaaagaatccgaagattgcaaactcacagcgacaaaggaagatatactgccacctatcactctagatttcgagaaaggacttggtcagaagtttaaacaatcatctggttctggtatagacttttcggtctttgaggacgttgagctgttcaaagcggccgcagacacagagatctatccattagcggttaaggcagaagcagctccctcaggtggtgagaatgaagaagaagaaaggtcggggtcgaagaatgcgcagattactcaagcggtttatgagaaggataaaggagagattaagattagagtggtgaagcagatactatgggttaatggaacgagatatgagttgcaggagatttatgggattgggaatacagttgagggggatgatgattcagctgatgatgctaatgatcctggtaaagaatgtgttatatgtttgtctgaaccacgagacaccactgttcttccatgtcgacatatgtgtatgtgtagcggatgtgctaaggtattgaggtttcagacaaatcgatgccccatttgcaggcaacctgttgaaaggcttttggagataaaagttcacggtaacaacggaagcgggaataacaccggacagggagaaacagttgaacaagagtagctaaacacggccgagtatggattgaaatgccatcgaaatattagtagtatatgcatgtttgatccttgtatgttaacaacaaaatgtgtgattgtcaattcataatatagagattacgaaacc

SEQ ID NO: 24646 - protein, 388 aa, Arabidopsis thaliana
  peptide (1)..(388): Ceres Seq. ID no. 13494028
  misc_feature (319)..(357): Pfam Name: Zinc finger, C3HC4 type (RING finger) Pfam Description: Zinc finger, C3HC4 type (RING finger)
  misc_feature (6)..(373): Homolog of NCBI NO: 6862918 NR Description: putative RING zinc finger protein [Arabidopsis
  misc_feature (12)..(373): Homolog of NCBI NO: 21928149 NR Description: AT5g19080/T16G12_120 [Arabidopsis thaliana]
  misc_feature (12)..(373): Homolog of NCBI NO: 15239642 NR Description: expressed protein [Arabidopsis thaliana]
  misc_feature (84)..(373): Homolog of NCBI NO: 15231808 NR Description: expressed protein [Arabidopsis thaliana]
  misc_feature (21)..(374): Homolog of NCBI NO: 37532246 NR Description: putative hydroxyproline-rich glycoprotein
  misc_feature (32)..(371): Homolog of NCBI NO: 26449588 NR Description: unknown protein [Arabidopsis thaliana]
  misc_feature (32)..(371): Homolog of NCBI NO: 21618140 NR Description: putative RING zinc finger protein [Arabidopsis
  misc_feature (32)..(371): Homolog of NCBI NO: 15242675 NR Description: expressed protein [Arabidopsis thaliana]
  misc_feature (1)..(337): Homolog of NCBI NO: 30681003 NR Description: putative RING zinc finger protein [Arabidopsis
  misc_feature (1)..(388): Homolog of NCBI NO: 18398633 NR Description: putative RING zinc finger protein [Arabidopsis
MGNISSSGGEGRRRRRRNHTAAPPPPPPPPSSSLPPPPLPTEIQANPIVFAAVTPYPNPNPNPVYQYPASYYHHPPPGAMPLPPYDHHLQHHPPHPYHNHSWAPVAMARYPYAGHMMAQPTPYVEHQKAVTIRNDVNLKKESLRLEPDPDNPGRFLVSFTFDATVSGRISVIFFAKESEDCKLTATKEDILPPITLDFEKGLGQKFKQSSGSGIDFSVFEDVELFKAAADTEIYPLAVKAEAAPSGGENEEEERSGSKNAQITQAVYEKDKGEIKIRVVKQILWVNGTRYELQEIYGIGNTVEGDDDSADDANDPGKECVICLSEPRDTTVLPCRHMCMCSGCAKVLRFQTNRCPICRQPVERLLEIKVHGNNGSGNNTGQGETVEQE

SEQ ID NO: 24647 - protein, 309 aa, Arabidopsis thaliana
  peptide (1)..(309): Ceres Seq. ID no. 13494029
  misc_feature (240)..(278): Pfam Name: Zinc finger, C3HC4 type (RING finger) Pfam Description: Zinc finger, C3HC4 type (RING finger)
  misc_feature (1)..(294): Homolog of NCBI NO: 6862918 NR Description: putative RING zinc finger protein [Arabidopsis
  misc_feature (1)..(294): Homolog of NCBI NO: 21928149 NR Description: AT5g19080/T16G12_120 [Arabidopsis thaliana]
  misc_feature (1)..(294): Homolog of NCBI NO: 15239642 NR Description: expressed protein [Arabidopsis thaliana]
  misc_feature (5)..(294): Homolog of NCBI NO: 15231808 NR Description: expressed protein [Arabidopsis thaliana]
  misc_feature (1)..(295): Homolog of NCBI NO: 37532246 NR Description: putative hydroxyproline-rich glycoprotein
  misc_feature (1)..(292): Homolog of NCBI NO: 26449588 NR Description: unknown protein [Arabidopsis thaliana]
  misc_feature (1)..(292): Homolog of NCBI NO: 21618140 NR Description: putative RING zinc finger protein [Arabidopsis
  misc_feature (1)..(292): Homolog of NCBI NO: 15242675 NR Description: expressed protein [Arabidopsis thaliana]
  misc_feature (1)..(258): Homolog of NCBI NO: 30681003 NR Description: putative RING zinc finger protein [Arabidopsis
  misc_feature (1)..(309): Homolog of NCBI NO: 18398633 NR Description: putative RING zinc finger protein [Arabidopsis
MPLPPYDHHLQHHPPHPYHNHSWAPVAMARYPYAGHMMAQPTPYVEHQKAVTIRNDVNLKKESLRLEPDPDNPGRFLVSFTFDATVSGRISVIFFAKESEDCKLTATKEDILPPITLDFEKGLGQKFKQSSGSGIDFSVFEDVELFKAAADTEIYPLAVKAEAAPSGGENEEEERSGSKNAQITQAVYEKDKGEIKIRVVKQILWVNGTRYELQEIYGIGNTVEGDDDSADDANDPGKECVICLSEPRDTTVLPCRHMCMCSGCAKVLRFQTNRCPICRQPVERLLEIKVHGNNGSGNNTGQGETVEQE

SEQ ID NO: 24648 - protein, 282 aa, Arabidopsis thaliana
  peptide (1)..(282): Ceres Seq. ID no. 13494030
  misc_feature (213)..(251): Pfam Name: Zinc finger, C3HC4 type (RING finger) Pfam Description: Zinc finger, C3HC4 type (RING finger)
  misc_feature (1)..(267): Homolog of NCBI NO: 6862918 NR Description: putative RING zinc finger protein [Arabidopsis
  misc_feature (1)..(267): Homolog of NCBI NO: 21928149 NR Description: AT5g19080/T16G12_120 [Arabidopsis thaliana]
  misc_feature (1)..(267): Homolog of NCBI NO: 15239642 NR Description: expressed protein [Arabidopsis thaliana]
  misc_feature (1)..(267): Homolog of NCBI NO: 15231808 NR Description: expressed protein [Arabidopsis thaliana]
  misc_feature (1)..(268): Homolog of NCBI NO: 37532246 NR Description: putative hydroxyproline-rich glycoprotein
  misc_feature (1)..(265): Homolog of NCBI NO: 26449588 NR Description: unknown protein [Arabidopsis thaliana]
  misc_feature (1)..(265): Homolog of NCBI NO: 21618140 NR Description: putative RING zinc finger protein [Arabidopsis
  misc_feature (1)..(265): Homolog of NCBI NO: 15242675 NR Description: expressed protein [Arabidopsis thaliana]
  misc_feature (1)..(231): Homolog of NCBI NO: 30681003 NR Description: putative RING zinc finger protein [Arabidopsis
  misc_feature (1)..(282): Homolog of NCBI NO: 18398633 NR Description: putative RING zinc finger protein [Arabidopsis
MARYPYAGHMMAQPTPYVEHQKAVTIRNDVNLKKESLRLEPDPDNPGRFLVSFTFDATVSGRISVIFFAKESEDCKLTATKEDILPPITLDFEKGLGQKFKQSSGSGIDFSVFEDVELFKAAADTEIYPLAVKAEAAPSGGENEEEERSGSKNAQITQAVYEKDKGEIKIRVVKQILWVNGTRYELQEIYGIGNTVEGDDDSADDANDPGKECVICLSEPRDTTVLPCRHMCMCSGCAKVLRFQTNRCPICRQPVERLLEIKVHGNNGSGNNTGQGETVEQE

SEQ ID NO: 24649 - DNA, 1450 bp, Arabidopsis thaliana
  misc_feature (1)..(1450): Ceres Seq. ID no. 12682693
  misc_feature: MA Experiment ID: 20000307 Result: Down-regulated in Transcription
  misc_feature: MA Experiment 20000307 PARAMETER Experiment Name: At_Germinating_Seeds_Sub_P Parameter: Age (hr) Value: 24 vs. 0
  misc_feature: MA Experiment 20000307 PARAMETER Experiment Name: At_Germinating_Seeds_Sub_P Parameter: Organism Value: A. thaliana
  misc_feature: MA Experiment 20000307 PARAMETER Experiment Name: At_Germinating_Seeds_Sub_P Parameter: Plant Line Value: WS
  misc_feature: MA Experiment 20000307 PARAMETER Experiment Name: At_Germinating_Seeds_Sub_P Parameter: Tissue Value: Germinating Seeds
agttaattattggtgcgtctctcgaattagggttctaggatctctgctcttaaaactcttatcgccgctaaaactctctacccatcgcagagcctctctaaagaatggattctcagatcaagcacgctgttgtagtgaaagtgatgggaaggactggatcaaggggtcaagtgactcaggttagagtgaagttcactgactcggaccgttacatcatgaggaacgttaaaggacctgtcagagagggagatattctcaccttgctggagtccgagagagaagctagaagacttcgttgattctctttgcaaattgtttttggttgctttgaagaacaaatgttatatcgtttggataattaaattcttattatgatgttaaaaaatttaattatcaaagattgatgctttagactctaaatctatattatattaaaaaaaaaaaaaaaaaaaaaaaggacttgaaatattgaaatccctattctttacgcgtactcgagatttttcgctcttgagagaatcacttcgacaatgtcggtaacggctgctttcattgattcggatcaaactcagcacaacattcttatggattcccaatcaactgtctccggtgtgaaaactgtcaagattagcaatgtttcactaattgtttctaagaaagatgtcaaagagttcttttctttctctggtgacattcaatacgtcgagatgcgaagtgagacacaagagagtcaggtcgcatatgttacttttaaggattcacaaggagctgaaactgcaatgctcttaacgggagctgtcattgcagatcttcgtgttagtataactcctgctgttaactatcagctaccaccagaagcccttgcacttgactcggaacattcgtttaatggtttttctgtcaagaaagctgaagatgtggtgaacatcatggtgggaagaggttatgctcttggaaaagacgccatggagaaagccaaagcatttgatgacagacacaacttgatctcaaacgcttctgcaaccattgcatcgcttgacgataagatgggtctgagcgaaaagctaagcataggaacaactgtggttaatgagaagttgagagatatcgatgagcgatatcaggtgagggagataacgaaatctgctttagcagctgctgaagagacagcaatcagtgcaagaacggctttaatggcaaacccttatgtatcaagtggagcttcgtggttttcaaacgcgtttggcgcagtgacaaaggcggttaaagagaaagttgagaatggaggagaaggaagaaaggagatcatcacacttgatccctcttcacccaaagttcctgctgtagttcctgttaagctcggttgatgcagatctcatcaaaccaatcggatctcgactaaattctttgataggtttgttgttcatatatatgctttcgtatgctaaag

SEQ ID NO: 24650 - protein, 278 aa, Arabidopsis thaliana; identical to SEQ ID NO: 23413
  peptide (1)..(278): Ceres Seq. ID no. 12682694
  misc_feature (31)..(98): Pfam Name: RNA recognition motif. (a.k.a. RRM, RBD, or RNP domain) Pfam Description: RNA recognition motif. (a.k.a. RRM, RBD, or RNP
  misc_feature (31)..(98): Pfam Name: RNA recognition motif. (a.k.a. RRM, RBD, or RNP domain) Pfam Description: RNA recognition motif. (a.k.a. RRM, RBD, or RNP
  misc_feature (30)..(247): Homolog of NCBI NO: 18414951 NR Description: RRM-containing protein
  misc_feature (28)..(263): Homolog of NCBI NO: 38344181 NR Description: OSJNBa0053K19.20 [Oryza sativa (japonica
  misc_feature (26)..(266): Homolog of NCBI NO: 38347069 NR Description: OSJNBa0006A01.10 [Oryza sativa (japonica
  misc_feature (28)..(260): Homolog of NCBI NO: 18071362 NR Description: putative splicing regulatory protein
  misc_feature (60)..(278): Homolog of NCBI NO: 25404689 NR Description: unknown protein, 64612-65506 [imported] -
  misc_feature (30)..(247): Homolog of NCBI NO: 18414951 NR Description: RRM-containing protein
  misc_feature (26)..(266): Homolog of NCBI NO: 38347069 NR Description: OSJNBa0006A01.10 [Oryza sativa (japonica
  misc_feature (60)..(278): Homolog of NCBI NO: 25404689 NR Description: unknown protein, 64612-65506 [imported] -
  misc_feature (1)..(278): Homolog of NCBI NO: 18408904 NR Description: RRM-containing protein
  misc_feature (1)..(278): Homolog of NCBI NO: 30697598 NR Description: RNA recognition motif (RRM)-containing protein
  misc_feature (1)..(278): Homolog of NCBI NO: 30697595 NR Description: RNA recognition motif (RRM)-containing protein
  misc_feature (1)..(248): Homolog of NCBI NO: 26450623 NR Description: unknown protein [Arabidopsis thaliana]
  misc_feature (60)..(278): Homolog of NCBI NO: 30697600 NR Description: RNA recognition motif (RRM)-containing protein
  misc_feature (28)..(260): Homolog of NCBI NO: 18071362 NR Description: putative splicing regulatory protein
  misc_feature (28)..(263): Homolog of NCBI NO: 38344181 NR Description: OSJNBa0053K19.20 [Oryza sativa (japonica
  misc_feature (60)..(278): Homolog of NCBI NO: 30697600 NR Description: RNA recognition motif (RRM)-containing protein
  misc_feature (1)..(248): Homolog of NCBI NO: 26450623 NR Description: unknown protein [Arabidopsis thaliana]
  misc_feature (1)..(278): Homolog of NCBI NO: 30697595 NR Description: RNA recognition motif (RRM)-containing protein
  misc_feature (1)..(278): Homolog of NCBI NO: 30697598 NR Description: RNA recognition motif (RRM)-containing protein
  misc_feature (1)..(278): Homolog of NCBI NO: 18408904 NR Description: RRM-containing protein

SEQ ID NO: 24651 - protein, 260 aa, Arabidopsis thaliana; identical to SEQ ID NO: 23414
  peptide (1)..(260): Ceres Seq. ID no. 12682695
  misc_feature (13)..(80): Pfam Name: RNA recognition motif. (a.k.a. RRM, RBD, or RNP domain) Pfam Description: RNA recognition motif. (a.k.a. RRM, RBD, or RNP
  misc_feature (13)..(80): Pfam Name: RNA recognition motif. (a.k.a. RRM, RBD, or RNP domain) Pfam Description: RNA recognition motif. (a.k.a. RRM, RBD, or RNP
  misc_feature (12)..(229): Homolog of NCBI NO: 18414951 NR Description: RRM-containing protein
  misc_feature (10)..(245): Homolog of NCBI NO: 38344181 NR Description: OSJNBa0053K19.20 [Oryza sativa (japonica
  misc_feature (8)..(248): Homolog of NCBI NO: 38347069 NR Description: OSJNBa0006A01.10 [Oryza sativa (japonica
  misc_feature (10)..(242): Homolog of NCBI NO: 18071362 NR Description: putative splicing regulatory protein
  misc_feature (42)..(260): Homolog of NCBI NO: 25404689 NR Description: unknown protein, 64612-65506 [imported] -
  misc_feature (12)..(229): Homolog of NCBI NO: 18414951 NR Description: RRM-containing protein
  misc_feature (8)..(248): Homolog of NCBI NO: 38347069 NR Description: OSJNBa0006A01.10 [Oryza sativa (japonica
  misc_feature (42)..(260): Homolog of NCBI NO: 25404689 NR Description: unknown protein, 64612-65506 [imported] -
  misc_feature (1)..(260): Homolog of NCBI NO: 18408904 NR Description: RRM-containing protein
  misc_feature (1)..(260): Homolog of NCBI NO: 30697598 NR Description: RNA recognition motif (RRM)-containing protein
  misc_feature (1)..(260): Homolog of NCBI NO: 30697595 NR Description: RNA recognition motif (RRM)-containing protein
  misc_feature (1)..(230): Homolog of NCBI NO: 26450623 NR Description: unknown protein [Arabidopsis thaliana]
  misc_feature (42)..(260): Homolog of NCBI NO: 30697600 NR Description: RNA recognition motif (RRM)-containing protein
  misc_feature (10)..(242): Homolog of NCBI NO: 18071362 NR Description: putative splicing regulatory protein
  misc_feature (10)..(245): Homolog of NCBI NO: 38344181 NR Description: OSJNBa0053K19.20 [Oryza sativa (japonica
  misc_feature (42)..(260): Homolog of NCBI NO: 30697600 NR Description: RNA recognition motif (RRM)-containing protein
  misc_feature (1)..(230): Homolog of NCBI NO: 26450623 NR Description: unknown protein [Arabidopsis thaliana]
  misc_feature (1)..(260): Homolog of NCBI NO: 30697595 NR Description: RNA recognition motif (RRM)-containing protein
  misc_feature (1)..(260): Homolog of NCBI NO: 30697598 NR Description: RNA recognition motif (RRM)-containing protein
  misc_feature (1)..(260): Homolog of NCBI NO: 18408904 NR Description: RRM-containing protein

SEQ ID NO: 24652 - protein, 219 aa, Arabidopsis thaliana; identical to SEQ ID NO: 23415
  peptide (1)..(219): Ceres Seq. ID no. 12682696
  misc_feature (1)..(188): Homolog of NCBI NO: 18414951 NR Description: RRM-containing protein
  misc_feature (1)..(204): Homolog of NCBI NO: 38344181 NR Description: OSJNBa0053K19.20 [Oryza sativa (japonica
  misc_feature (1)..(207): Homolog of NCBI NO: 38347069 NR Description: OSJNBa0006A01.10 [Oryza sativa (japonica
  misc_feature (1)..(201): Homolog of NCBI NO: 18071362 NR Description: putative splicing regulatory protein
  misc_feature (1)..(219): Homolog of NCBI NO: 25404689 NR Description: unknown protein, 64612-65506 [imported] -
  misc_feature (1)..(219): Homolog of NCBI NO: 30697600 NR Description: RNA recognition motif (RRM)-containing protein
  misc_feature (1)..(189): Homolog of NCBI NO: 26450623 NR Description: unknown protein [Arabidopsis thaliana]
  misc_feature (1)..(219): Homolog of NCBI NO: 30697595 NR Description: RNA recognition motif (RRM)-containing protein
  misc_feature (1)..(219): Homolog of NCBI NO: 30697598 NR Description: RNA recognition motif (RRM)-containing protein
  misc_feature (1)..(219): Homolog of NCBI NO: 18408904 NR Description: RRM-containing protein
  misc_feature (1)..(188): Homolog of NCBI NO: 18414951 NR Description: RRM-containing protein
  misc_feature (1)..(204): Homolog of NCBI NO: 38344181 NR Description: OSJNBa0053K19.20 [Oryza sativa (japonica
  misc_feature (1)..(207): Homolog of NCBI NO: 38347069 NR Description: OSJNBa0006A01.10 [Oryza sativa (japonica
  misc_feature (1)..(201): Homolog of NCBI NO: 18071362 NR Description: putative splicing regulatory protein
  misc_feature (1)..(219): Homolog of NCBI NO: 25404689 NR Description: unknown protein, 64612-65506 [imported] -
  misc_feature (1)..(219): Homolog of NCBI NO: 30697600 NR Description: RNA recognition motif (RRM)-containing protein
  misc_feature (1)..(189): Homolog of NCBI NO: 26450623 NR Description: unknown protein [Arabidopsis thaliana]
  misc_feature (1)..(219): Homolog of NCBI NO: 30697595 NR Description: RNA recognition motif (RRM)-containing protein
  misc_feature (1)..(219): Homolog of NCBI NO: 30697598 NR Description: RNA recognition motif (RRM)-containing protein
  misc_feature (1)..(219): Homolog of NCBI NO: 18408904 NR Description: RRM-containing protein

SEQ ID NO: 24653 - DNA, 813 bp, Arabidopsis thaliana
  misc_feature (1)..(813): Ceres Seq. ID no. 12370365
  misc_feature: MA Experiment ID: 108595 Result: Up-regulated in Transcription
  misc_feature: MA Experiment 108595 PARAMETER Experiment Name: At_Ler-pi_Ovule_cDNA_P Parameter: Plant Line Value: null
  misc_feature: MA Experiment ID: 20000171 Result: Down-regulated in Transcription
  misc_feature: MA Experiment 20000171 PARAMETER Experiment Name: At_42deg_Heat_P Parameter: Age (day) Value: 14
  misc_feature: MA Experiment 20000171 PARAMETER Experiment Name: At_42deg_Heat_P Parameter: Organism Value: A. thaliana
  misc_feature: MA Experiment 20000171 PARAMETER Experiment Name: At_42deg_Heat_P Parameter: Plant Line Value: WS
  misc_feature: MA Experiment 20000171 PARAMETER Experiment Name: At_42deg_Heat_P Parameter: Temperature (deg C) Value: 42 vs. 22
  misc_feature: MA Experiment 20000171 PARAMETER Experiment Name: At_42deg_Heat_P Parameter: Timepoint (hr) Value: 1
  misc_feature: MA Experiment 20000171 PARAMETER Experiment Name: At_42deg_Heat_P Parameter: Tissue Value: Aerial
  misc_feature: MA Experiment ID: 20000173 Result: Down-regulated in Transcription
  misc_feature: MA Experiment 20000173 PARAMETER Experiment Name: At_42deg_Heat_P Parameter: Age (day) Value: 14
  misc_feature: MA Experiment 20000173 PARAMETER Experiment Name: At_42deg_Heat_P Parameter: Organism Value: A. thaliana
  misc_feature: MA Experiment 20000173 PARAMETER Experiment Name: At_42deg_Heat_P Parameter: Plant Line Value: WS
  misc_feature: MA Experiment 20000173 PARAMETER Experiment Name: At_42deg_Heat_P Parameter: Temperature (deg C) Value: 42 vs. 22
  misc_feature: MA Experiment 20000173 PARAMETER Experiment Name: At_42deg_Heat_P Parameter: Timepoint (hr) Value: 6
  misc_feature: MA Experiment 20000173 PARAMETER Experiment Name: At_42deg_Heat_P Parameter: Tissue Value: Aerial
  misc_feature: MA Experiment ID: 20000437 Result: Down-regulated in Transcription
  misc_feature: MA Experiment 20000437 PARAMETER Experiment Name: At_Drought_P Parameter: Age (day) Value: 8
  misc_feature: MA Experiment 20000437 PARAMETER Experiment Name: At_Drought_P Parameter: Organism Value: A. thaliana
  misc_feature: MA Experiment 20000437 PARAMETER Experiment Name: At_Drought_P Parameter: Plant Line Value: WS
  misc_feature: MA Experiment 20000437 PARAMETER Experiment Name: At_Drought_P Parameter: Timepoint (hr) Value: 24
  misc_feature: MA Experiment 20000437 PARAMETER Experiment Name: At_Drought_P Parameter: Tissue Value: Whole Plant
  misc_feature: MA Experiment 20000437 PARAMETER Experiment Name: At_Drought_P Parameter: Treatment Value: Drought vs. No Drought
  misc_feature: MA Experiment ID: 20001248 Result: Up-regulated in Transcription
  misc_feature: MA Experiment 20001248 PARAMETER Experiment Name: At_Far-red-induction_P Parameter: Age (day) Value: 7
  misc_feature: MA Experiment 20001248 PARAMETER Experiment Name: At_Far-red-induction_P Parameter: Light Value: Far-red vs. White
  misc_feature: MA Experiment 20001248 PARAMETER Experiment Name: At_Far-red-induction_P Parameter: Organism Value: A. thaliana
  misc_feature: MA Experiment 20001248 PARAMETER Experiment Name: At_Far-red-induction_P Parameter: Plant Line Value: Columbia
  misc_feature: MA Experiment 20001248 PARAMETER Experiment Name: At_Far-red-induction_P Parameter: Timepoint (hr) Value: 4
  misc_feature: MA Experiment 20001248 PARAMETER Experiment Name: At_Far-red-induction_P Parameter: Tissue Value: Whole Plant
  misc_feature: MA Experiment ID: 20001451 Result: Up-regulated in Transcription
  misc_feature: MA Experiment 20001451 PARAMETER Experiment Name: At_Far-red-induction_P Parameter: Age (day) Value: 7
  misc_feature: MA Experiment 20001451 PARAMETER Experiment Name: At_Far-red-induction_P Parameter: Light Value: Far-red vs. White
  misc_feature: MA Experiment 20001451 PARAMETER Experiment Name: At_Far-red-induction_P Parameter: Organism Value: A. thaliana
  misc_feature: MA Experiment 20001451 PARAMETER Experiment Name: At_Far-red-induction_P Parameter: Plant Line Value: Columbia
  misc_feature: MA Experiment 20001451 PARAMETER Experiment Name: At_Far-red-induction_P Parameter: Timepoint (hr) Value: 24
  misc_feature: MA Experiment 20001451 PARAMETER Experiment Name: At_Far-red-induction_P Parameter: Tissue Value: Whole Plant
agaatcgtatttgtgggtatctagaagaggcgttaggattgtctccaagctgggtgttttttcatcttgatggccaactaatcgaatctcctactctaaagatatttttgtttatttctgtcatgtgtgatttggtcgcgcgtacgggtcgtctccagcagcggtacgaggatggctctcgtctcgtcgccgggtgtattccgtttaggtatgtaaattctgacaaagatggtaattctgaatctgggaaagtgattcaagtgttgatgatcagctcgtctagtggaccgggacttttgtttcccaagggaggatgggagaatgatgagacagtcagggaggctgcagcgagggaagcagtggaagaagcagttttttttttttttttttggggaattatgagttcaagagcaaatcacaccaagatgagtttagcccagaaggtttatgtaaagcggcaatgtacgcgttgtatgtgaaagaagagctagcgacgtggccggaacatgagacgagaacacggaaatggctgacaattgaagaagcggtagagagttgcaggcacccttggatgaaggacgcattggtggaaggattctgtaaatggcataaggagaagatggttaaaggagaggagataactggtgaacattgaagcaaatgtgcataaacctctgagcgttggtttcattcctttcgattttgtttttacctttttgtttttgtttttgaagtcttatgcatggataatctcttgtgactgcgaaacgtaatagtttcgaagatttaaagttcaattattgccctattttc

SEQ ID NO: 24654 - protein, 158 aa, Arabidopsis thaliana
  peptide (1)..(158): Ceres Seq. ID no. 12370366
  misc_feature (59)..(123): Pfam Name: NUDIX domain Pfam Description: NUDIX domain
  misc_feature (40)..(123): Homolog of NCBI NO: 21595695 NR Description: unknown [Arabidopsis thaliana]
  misc_feature (40)..(123): Homolog of NCBI NO: 18379275 NR Description: expressed protein
  misc_feature (40)..(123): Homolog of NCBI NO: 15223919 NR Description: hypothetical protein; protein id: At1g14860.1
  misc_feature (30)..(123): Homolog of NCBI NO: 15221055 NR Description: unknown protein; protein id: At1g18300.1
  misc_feature (41)..(123): Homolog of NCBI NO: 25518008 NR Description: F13K23.14 protein - Arabidopsis thaliana
  misc_feature (41)..(123): Homolog of NCBI NO: 15231598 NR Description: MutT-like protein; protein id: At3g26690.1
  misc_feature (41)..(123): Homolog of NCBI NO: 18391450 NR Description: expressed protein
  misc_feature (41)..(123): Homolog of NCBI NO: 34900054 NR Description: MutT-like protein~contains ESTs
  misc_feature (41)..(123): Homolog of NCBI NO: 38175436 NR Description: MutT-like protein [Oryza sativa (japonica
  misc_feature (41)..(123): Homolog of NCBI NO: 18399682 NR Description: expressed protein; protein id: At3g12600.1
NRICGYLEEALGLSPSWVFFHLDGQLIESPTLKIFLFISVMCDLVARTGRLQQRYEDGSRLVAGCIPFRYVNSDKDGNSESGKVIQVLMISSSSGPGLLFPKGGWENDETVREAAAREAVEEAVFFFFFWGIMSSRANHTKMSLAQKVYVKRQCTRCM

SEQ ID NO: 24655 - protein, 118 aa, Arabidopsis thaliana
  peptide (1)..(118): Ceres Seq. ID no. 12370367
  misc_feature (19)..(83): Pfam Name: NUDIX domain Pfam Description: NUDIX domain
  misc_feature (1)..(83): Homolog of NCBI NO: 21595695 NR Description: unknown [Arabidopsis thaliana]
  misc_feature (1)..(83): Homolog of NCBI NO: 18379275 NR Description: expressed protein
  misc_feature (1)..(83): Homolog of NCBI NO: 15223919 NR Description: hypothetical protein; protein id: At1g14860.1
  misc_feature (1)..(83): Homolog of NCBI NO: 15221055 NR Description: unknown protein; protein id: At1g18300.1
  misc_feature (1)..(83): Homolog of NCBI NO: 25518008 NR Description: F13K23.14 protein - Arabidopsis thaliana
  misc_feature (1)..(83): Homolog of NCBI NO: 15231598 NR Description: MutT-like protein; protein id: At3g26690.1
  misc_feature (1)..(83): Homolog of NCBI NO: 18391450 NR Description: expressed protein
  misc_feature (1)..(83): Homolog of NCBI NO: 34900054 NR Description: MutT-like protein~contains ESTs
  misc_feature (1)..(83): Homolog of NCBI NO: 38175436 NR Description: MutT-like protein [Oryza sativa (japonica
  misc_feature (1)..(83): Homolog of NCBI NO: 18399682 NR Description: expressed protein; protein id: At3g12600.1
MCDLVARTGRLQQRYEDGSRLVAGCIPFRYVNSDKDGNSESGKVIQVLMISSSSGPGLLFPKGGWENDETVREAAAREAVEEAVFFFFFWGIMSSRANHTKMSLAQKVYVKRQCTRCM

SEQ ID NO: 24656 - DNA, 1709 bp, Arabidopsis thaliana
  misc_feature (1)..(1709): Ceres Seq. ID no. 13490821
  misc_feature: MA Experiment ID: 108501 Result: Up-regulated in Transcription
  misc_feature: MA Experiment 108501 PARAMETER Experiment Name: At_ap2_floral_buds_cDNA_P Parameter: Plant Line Value: ap2 (Ler.)
  misc_feature: MA Experiment 108501 PARAMETER Experiment Name: At_ap2_floral_buds_cDNA_P Parameter: Tissue Value: Closed Flower
  misc_feature: MA Experiment ID: 108595 Result: Up-regulated in Transcription
  misc_feature: MA Experiment 108595 PARAMETER Experiment Name: At_Ler-pi_Ovule_cDNA_P Parameter: Plant Line Value: null
  misc_feature: MA Experiment ID: 20000169 Result: Up-regulated in Transcription
  misc_feature: MA Experiment 20000169 PARAMETER Experiment Name: At_100uM_ABA_P Parameter: Age (day) Value: 14
  misc_feature: MA Experiment 20000169 PARAMETER Experiment Name: At_100uM_ABA_P Parameter: Organism Value: A. thaliana
  misc_feature: MA Experiment 20000169 PARAMETER Experiment Name: At_100uM_ABA_P Parameter: Plant Line Value: WS
  misc_feature: MA Experiment 20000169 PARAMETER Experiment Name: At_100uM_ABA_P Parameter: Timepoint (hr) Value: 6
  misc_feature: MA Experiment 20000169 PARAMETER Experiment Name: At_100uM_ABA_P Parameter: Tissue Value: Aerial
  misc_feature: MA Experiment 20000169 PARAMETER Experiment Name: At_100uM_ABA_P Parameter: Treatment Value: 100uM ABA vs. No Treatment
  misc_feature: MA Experiment ID: 20000214 Result: Down-regulated in Transcription
  misc_feature: MA Experiment 20000214 PARAMETER Experiment Name: At_4deg_Cold_P Parameter: Timepoint (hr) Value: 6
  misc_feature: MA Experiment ID: 20000267 Result: Up-regulated in Transcription
  misc_feature: MA Experiment 20000267 PARAMETER Experiment Name: At_Drought_P Parameter: Age (day) Value: 7
  misc_feature: MA Experiment 20000267 PARAMETER Experiment Name: At_Drought_P Parameter: Organism Value: A. thaliana
  misc_feature: MA Experiment 20000267 PARAMETER Experiment Name: At_Drought_P Parameter: Plant Line Value: WS
  misc_feature: MA Experiment 20000267 PARAMETER Experiment Name: At_Drought_P Parameter: Timepoint (hr) Value: 6
  misc_feature: MA Experiment 20000267 PARAMETER Experiment Name: At_Drought_P Parameter: Tissue Value: Whole Plant
  misc_feature: MA Experiment 20000267 PARAMETER Experiment Name: At_Drought_P Parameter: Treatment Value: Drought vs. No Drought
  misc_feature: MA Experiment ID: 20000268 Result: Up-regulated in Transcription
  misc_feature: MA Experiment 20000268 PARAMETER Experiment Name: At_100mM_NaCl__P Parameter: Age (day) Value: 14
  misc_feature: MA Experiment 20000268 PARAMETER Experiment Name: At_100mM_NaCl__P Parameter: Organism Value: A. thaliana
  misc_feature: MA Experiment 20000268 PARAMETER Experiment Name: At_100mM_NaCl__P Parameter: Plant Line Value: WS
  misc_feature: MA Experiment 20000268 PARAMETER Experiment Name: At_100mM_NaCl__P Parameter: Timepoint (hr) Value: 6
  misc_feature: MA Experiment 20000268 PARAMETER Experiment Name: At_100mM_NaCl__P Parameter: Tissue Value: Whole Plant
  misc_feature: MA Experiment 20000268 PARAMETER Experiment Name: At_100mM_NaCl__P Parameter: Treatment Value: 100mM NaCl vs. No Treatment
  misc_feature: MA Experiment ID: 20000436 Result: Up-regulated in Transcription
  misc_feature: MA Experiment 20000436 PARAMETER Experiment Name: At_Drought_P Parameter: Age (day) Value: 7
  misc_feature: MA Experiment 20000436 PARAMETER Experiment Name: At_Drought_P Parameter: Organism Value: A. thaliana
  misc_feature: MA Experiment 20000436 PARAMETER Experiment Name: At_Drought_P Parameter: Plant Line Value: WS
  misc_feature: MA Experiment 20000436 PARAMETER Experiment Name: At_Drought_P Parameter: Timepoint (hr) Value: 12
  misc_feature: MA Experiment 20000436 PARAMETER Experiment Name: At_Drought_P Parameter: Tissue Value: Whole Plant
  misc_feature: MA Experiment 20000436 PARAMETER Experiment Name: At_Drought_P Parameter: Treatment Value: Drought vs. No Drought
  misc_feature: MA Experiment ID: 20000437 Result: Up-regulated in Transcription
  misc_feature: MA Experiment 20000437 PARAMETER Experiment Name: At_Drought_P Parameter: Age (day) Value: 8
  misc_feature: MA Experiment 20000437 PARAMETER Experiment Name: At_Drought_P Parameter: Organism Value: A. thaliana
  misc_feature: MA Experiment 20000437 PARAMETER Experiment Name: At_Drought_P Parameter: Plant Line Value: WS
  misc_feature: MA Experiment 20000437 PARAMETER Experiment Name: At_Drought_P Parameter: Timepoint (hr) Value: 24
  misc_feature: MA Experiment 20000437 PARAMETER Experiment Name: At_Drought_P Parameter: Tissue Value: Whole Plant
  misc_feature: MA Experiment 20000437 PARAMETER Experiment Name: At_Drought_P Parameter: Treatment Value: Drought vs. No Drought
  misc_feature: MA Experiment ID: 20000439 Result: Down-regulated in Transcription
  misc_feature: MA Experiment 20000439 PARAMETER Experiment Name: At_Roots__P Parameter: Age (day) Value: 14 vs. 21
  misc_feature: MA Experiment 20000439 PARAMETER Experiment Name: At_Roots__P Parameter: Organism Value: A. thaliana
  misc_feature: MA Experiment 20000439 PARAMETER Experiment Name: At_Roots__P Parameter: Tissue Value: Roots vs. Whole Plant
  misc_feature: MA Experiment ID: 20000453 Result: Up-regulated in Transcription
  misc_feature: MA Experiment 20000453 PARAMETER Experiment Name: At_100uM_ABA_P Parameter: Age (day) Value: 15
  misc_feature: MA Experiment 20000453 PARAMETER Experiment Name: At_100uM_ABA_P Parameter: Organism Value: A. thaliana
  misc_feature: MA Experiment 20000453 PARAMETER Experiment Name: At_100uM_ABA_P Parameter: Plant Line Value: WS
  misc_feature: MA Experiment 20000453 PARAMETER Experiment Name: At_100uM_ABA_P Parameter: Timepoint (hr) Value: 24
  misc_feature: MA Experiment 20000453 PARAMETER Experiment Name: At_100uM_ABA_P Parameter: Tissue Value: Aerial
  misc_feature: MA Experiment 20000453 PARAMETER Experiment Name: At_100uM_ABA_P Parameter: Treatment Value: 100uM ABA vs. No Treatment
  misc_feature: MA Experiment ID: 20000455 Result: Up-regulated in Transcription
  misc_feature: MA Experiment 20000455 PARAMETER Experiment Name: At_100uM_ABA_P Parameter: Age (day) Value: 16
  misc_feature: MA Experiment 20000455 PARAMETER Experiment Name: At_100uM_ABA_P Parameter: Organism Value: A. thaliana
  misc_feature: MA Experiment 20000455 PARAMETER Experiment Name: At_100uM_ABA_P Parameter: Plant Line Value: WS
  misc_feature: MA Experiment 20000455 PARAMETER Experiment Name: At_100uM_ABA_P Parameter: Timepoint (hr) Value: 48
  misc_feature: MA Experiment 20000455 PARAMETER Experiment Name: At_100uM_ABA_P Parameter: Tissue Value: Aerial
  misc_feature: MA Experiment 20000455 PARAMETER Experiment Name: At_100uM_ABA_P Parameter: Treatment Value: 100uM ABA vs. No Treatment
  misc_feature: MA Experiment ID: 20000794 Result: Up-regulated in Transcription
  misc_feature: MA Experiment 20000794 PARAMETER Experiment Name: At_Petals_P Parameter: Age (day) Value: 23-25 days
  misc_feature: MA Experiment 20000794 PARAMETER Experiment Name: At_Petals_P Parameter: Plant Line Value: WS
  misc_feature: MA Experiment 20000794 PARAMETER Experiment Name: At_Petals_P Parameter: Tissue Value: Petals vs. Whole plant
  misc_feature: MA Experiment ID: 20001554 Result: Up-regulated in Transcription
  misc_feature: MA Experiment 20001554 PARAMETER Experiment Name: At_Drought_Soil_Dry_P Parameter: Age (day) Value: 21
  misc_feature: MA Experiment 20001554 PARAMETER Experiment Name: At_Drought_Soil_Dry_P Parameter: Organism Value: A. thaliana
  misc_feature: MA Experiment 20001554 PARAMETER Experiment Name: At_Drought_Soil_Dry_P Parameter: Plant Line Value: WS
  misc_feature: MA Experiment 20001554 PARAMETER Experiment Name: At_Drought_Soil_Dry_P Parameter: Post Timepoint (hr) Value: None
  misc_feature: MA Experiment 20001554 PARAMETER Experiment Name: At_Drought_Soil_Dry_P Parameter: Post-Treatment Value: None
  misc_feature: MA Experiment 20001554 PARAMETER Experiment Name: At_Drought_Soil_Dry_P Parameter: Timepoint (day) Value: 7
  misc_feature: MA Experiment 20001554 PARAMETER Experiment Name: At_Drought_Soil_Dry_P Parameter: Treatment Value: Drought vs. No Drought
  misc_feature: MA Experiment ID: 20001555 Result: Up-regulated in Transcription
  misc_feature: MA Experiment 20001555 PARAMETER Experiment Name: At_Drought_Soil_Dry_P Parameter: Age (day) Value: 24
  misc_feature: MA Experiment 20001555 PARAMETER Experiment Name: At_Drought_Soil_Dry_P Parameter: Organism Value: A. thaliana
  misc_feature: MA Experiment 20001555 PARAMETER Experiment Name: At_Drought_Soil_Dry_P Parameter: Plant Line Value: WS
  misc_feature: MA Experiment 20001555 PARAMETER Experiment Name: At_Drought_Soil_Dry_P Parameter: Post Timepoint (hr) Value: None
  misc_feature: MA Experiment 20001555 PARAMETER Experiment Name: At_Drought_Soil_Dry_P Parameter: Post-Treatment Value: None
  misc_feature: MA Experiment 20001555 PARAMETER Experiment Name: At_Drought_Soil_Dry_P Parameter: Timepoint (day) Value: 10
  misc_feature: MA Experiment 20001555 PARAMETER Experiment Name: At_Drought_Soil_Dry_P Parameter: Treatment Value: Drought vs. No Drought
  misc_feature: MA Experiment ID: 20001559 Result: Up-regulated in Transcription
  misc_feature: MA Experiment 20001559 PARAMETER Experiment Name: At_Drought_Soil_Dry_P Parameter: Age (day) Value: 28
  misc_feature: MA Experiment 20001559 PARAMETER Experiment Name: At_Drought_Soil_Dry_P Parameter: Organism Value: A. thaliana
  misc_feature: MA Experiment 20001559 PARAMETER Experiment Name: At_Drought_Soil_Dry_P Parameter: Plant Line Value: WS
  misc_feature: MA Experiment 20001559 PARAMETER Experiment Name: At_Drought_Soil_Dry_P Parameter: Post Timepoint (hr) Value: 29
  misc_feature: MA Experiment 20001559 PARAMETER Experiment Name: At_Drought_Soil_Dry_P Parameter: Post-Treatment Value: Re-Water vs. No Drought
  misc_feature: MA Experiment 20001559 PARAMETER Experiment Name: At_Drought_Soil_Dry_P Parameter: Timepoint (day) Value: 14
  misc_feature: MA Experiment 20001559 PARAMETER Experiment Name: At_Drought_Soil_Dry_P Parameter: Treatment Value: Drought vs. No Drought
  misc_feature: MA Experiment ID: 20001904 Result: Up-regulated in Transcription
  misc_feature: MA Experiment 20001904 PARAMETER Experiment Name: At_Drought_Reproduction_P Parameter: Age (day) Value: 37
  misc_feature: MA Experiment 20001904 PARAMETER Experiment Name: At_Drought_Reproduction_P Parameter: Organism Value: A. thaliana
  misc_feature: MA Experiment 20001904 PARAMETER Experiment Name: At_Drought_Reproduction_P Parameter: Plant Line Value: WS
  misc_feature: MA Experiment 20001904 PARAMETER Experiment Name: At_Drought_Reproduction_P Parameter: Timepoint (day) Value: 7
  misc_feature: MA Experiment 20001904 PARAMETER Experiment Name: At_Drought_Reproduction_P Parameter: Tissue Value: Rosettes
  misc_feature: MA Experiment 20001904 PARAMETER Experiment Name: At_Drought_Reproduction_P Parameter: Treatment Value: Drought vs. No Drought
  misc_feature: Phenotype: ROSETTE LEAVES Shape-Serrate
  misc_feature: Phenotype: WHOLE PLANT Size-Large
  misc_feature: Phenotype: INFLORESCENCE Strength-Strong
  misc_feature: Phenotype: INFLORESCENCE Height-Short
  misc_feature: Phenotype: FERTILITY Fertility-Reduced
  misc_feature: Phenotype: INFLORESCENCE Height-Short
gttgattataattagacttcttcatttactctctctctgacttaaaacatttattttatcttcttcttgttctctctttctctttctctcatcactatgaagagtttcaacacagaaggacacaaccactccacggcggaatccggcgatgcctacaccgtgtcggacccgacaaagaacgtcgatgaagatggtcgagagaagcgtaccgggacgtggcttacggcgagtgcgcatattatcacggcggtgataggctccggagtgttgtctttagcatgggctatagctcagcttggttggatcgcagggacatcgatcttactcattttctcgttcattacttacttcacctccaccatgcttgccgattgctaccgtgcgccggatcccgtcaccggaaaacggaattacacttacatggacgttgttcgatcttacctcggtggtaggaaagtgcagctctgtggagtggcacaatatgggaatctgattggggtcactgttggttacaccatcactgcttctattagtttggtagcggtagggaaatcgaactgcttccacgataaagggcacactgcggattgtactatatcgaattatccgtatatggcggtttttggtatcattcaagttattcttagccagatcccaaatttccacaagctctcttttctttccattatggccgcagtcatgtcctttacttatgcaactattggaatcggtctagccatcgcaaccgtcgcaggtgggaaagtgggtaagacgagtatgacgggcacagcggttggagtagatgtaaccgcagctcaaaagatatggagatcgtttcaagcggttggggacatagcgttcgcctatgcttatgccacggttctcatcgagattcaggatacactaagatctagcccagctgagaacaaagccatgaaaagagcaagtcttgtgggagtatcaaccaccacttttttctacatcttatgtggatgcatcggctatgctgcatttggaaacaatgcccctggagatttcctcacagatttcgggtttttcgagcccttttggctcattgactttgcaaacgcttgcatcgctgtccaccttattggtgcctatcaggtgttcgcgcagccgatattccagtttgttgagaaaaaatgcaacagaaactatccagacaacaagttcatcacttctgaatattcagtaaacgtacctttccttggaaaattcaacattagcctcttcagattggtgtggaggacagcttatgtggttataaccactgttgtagctatgatattccctttcttcaacgcgatcttaggtcttatcggagcagcttccttctggcctttaacggtttatttccctgtggagatgcacattgcacaaaccaagattaagaagtactctgctagatggattgcgctgaaaacgatgtgctatgtttgcttgatcgtctcgctcttagctgcagccggatccatcgcaggacttataagtagtgtcaaaacctacaagcccttccggactatgcatgagtgagtttgagatcctcaagagagtcaaaaatatatgtagtagtttggtctttctgttaaactatctggtgtctaaatccaatgagaatgctttattgctaaaacttcatgaatctctctgtatctacatctttcaatctaatacatatgagctcttcc

SEQ ID NO: 24657 - protein, 485 aa, Arabidopsis thaliana
  peptide (1)..(485): Ceres Seq. ID no. 13490822
  misc_feature (15)..(481): Homolog of NCBI NO: 15240523 NR Description: amino acid permease 6 (AAP6) [Arabidopsis
  misc_feature (9)..(483): Homolog of NCBI NO: 15218370 NR Description: amino acid permease, putative [Arabidopsis
  misc_feature (1)..(485): Homolog of NCBI NO: 2654019 NR Description: neutral amino acid transport system II
  misc_feature (1)..(485): Homolog of NCBI NO: 15217945 NR Description: amino acid permease I (AAP1) [Arabidopsis
  misc_feature (24)..(482): Homolog of NCBI NO: 27447655 NR Description: amino acid transporter [Lycopersicon esculentum]
  misc_feature (24)..(457): Homolog of NCBI NO: 24370975 NR Description: amino acid transporter [Solanum tuberosum]
  misc_feature (10)..(482): Homolog of NCBI NO: 21553710 NR Description: amino acid carrier, putative [Arabidopsis
  misc_feature (7)..(484): Homolog of NCBI NO: 7442735 NR Description: amino acid transport protein AAP1 - castor bean
  misc_feature (20)..(482): Homolog of NCBI NO: 27447657 NR Description: amino acid transporter [Lycopersicon esculentum]
  misc_feature (47)..(430): Homolog of NCBI NO: 7442731 NR Description: probable amino acid transporter protein AAP1 -
MKSFNTEGHNHSTAESGDAYTVSDPTKNVDEDGREKRTGTWLTASAHIITAVIGSGVLSLAWAIAQLGWIAGTSILLIFSFITYFTSTMLADCYRAPDPVTGKRNYTYMDVVRSYLGGRKVQLCGVAQYGNLIGVTVGYTITASISLVAVGKSNCFHDKGHTADCTISNYPYMAVFGIIQVILSQIPNFHKLSFLSIMAAVMSFTYATIGIGLAIATVAGGKVGKTSMTGTAVGVDVTAAQKIWRSFQAVGDIAFAYAYATVLIEIQDTLRSSPAENKAMKRASLVGVSTTTFFYILCGCIGYAAFGNNAPGDFLTDFGFFEPFWLIDFANACIAVHLIGAYQVFAQPIFQFVEKKCNRNYPDNKFITSEYSVNVPFLGKFNISLFRLVWRTAYVVITTVVAMIFPFFNAILGLIGAASFWPLTVYFPVEMHIAQTKIKKYSARWIALKTMCYVCLIVSLLAAAGSIAGLISSVKTYKPFRTMHE

SEQ ID NO: 24658 - protein, 397 aa, Arabidopsis thaliana
  peptide (1)..(397): Ceres Seq. ID no. 13490823
  misc_feature (1)..(394): Homolog of NCBI NO: 21553710 NR Description: amino acid carrier, putative [Arabidopsis
  misc_feature (1)..(396): Homolog of NCBI NO: 7442735 NR Description: amino acid transport protein AAP1 - castor bean
  misc_feature (1)..(394): Homolog of NCBI NO: 27447657 NR Description: amino acid transporter [Lycopersicon esculentum]
  misc_feature (1)..(342): Homolog of NCBI NO: 7442731 NR Description: probable amino acid transporter protein AAP1 -
  misc_feature (1)..(394): Homolog of NCBI NO: 27447655 NR Description: amino acid transporter [Lycopersicon esculentum]
  misc_feature (1)..(369): Homolog of NCBI NO: 24370975 NR Description: amino acid transporter [Solanum tuberosum]
  misc_feature (1)..(393): Homolog of NCBI NO: 15240523 NR Description: amino acid permease 6 (AAP6) [Arabidopsis
  misc_feature (1)..(395): Homolog of NCBI NO: 15218370 NR Description: amino acid permease, putative [Arabidopsis
  misc_feature (1)..(397): Homolog of NCBI NO: 2654019 NR Description: neutral amino acid transport system II
  misc_feature (1)..(397): Homolog of NCBI NO: 15217945 NR Description: amino acid permease I (AAP1) [Arabidopsis
MLADCYRAPDPVTGKRNYTYMDVVRSYLGGRKVQLCGVAQYGNLIGVTVGYTITASISLVAVGKSNCFHDKGHTADCTISNYPYMAVFGIIQVILSQIPNFHKLSFLSIMAAVMSFTYATIGIGLAIATVAGGKVGKTSMTGTAVGVDVTAAQKIWRSFQAVGDIAFAYAYATVLIEIQDTLRSSPAENKAMKRASLVGVSTTTFFYILCGCIGYAAFGNNAPGDFLTDFGFFEPFWLIDFANACIAVHLIGAYQVFAQPIFQFVEKKCNRNYPDNKFITSEYSVNVPFLGKFNISLFRLVWRTAYVVITTVVAMIFPFFNAILGLIGAASFWPLTVYFPVEMHIAQTKIKKYSARWIALKTMCYVCLIVSLLAAAGSIAGLISSVKTYKPFRTMHE

SEQ ID NO: 24659 - protein, 377 aa, Arabidopsis thaliana
  peptide (1)..(377): Ceres Seq. ID no. 13490824
  misc_feature (1)..(374): Homolog of NCBI NO: 21553710 NR Description: amino acid carrier, putative [Arabidopsis
  misc_feature (1)..(376): Homolog of NCBI NO: 7442735 NR Description: amino acid transport protein AAP1 - castor bean
  misc_feature (1)..(374): Homolog of NCBI NO: 27447657 NR Description: amino acid transporter [Lycopersicon esculentum]
  misc_feature (1)..(322): Homolog of NCBI NO: 7442731 NR Description: probable amino acid transporter protein AAP1 -
  misc_feature (1)..(374): Homolog of NCBI NO: 27447655 NR Description: amino acid transporter [Lycopersicon esculentum]
  misc_feature (1)..(349): Homolog of NCBI NO: 24370975 NR Description: amino acid transporter [Solanum tuberosum]
  misc_feature (1)..(373): Homolog of NCBI NO: 15240523 NR Description: amino acid permease 6 (AAP6) [Arabidopsis
  misc_feature (1)..(375): Homolog of NCBI NO: 15218370 NR Description: amino acid permease, putative [Arabidopsis
  misc_feature (1)..(377): Homolog of NCBI NO: 2654019 NR Description: neutral amino acid transport system II
  misc_feature (1)..(377): Homolog of NCBI NO: 15217945 NR Description: amino acid permease I (AAP1) [Arabidopsis
MDVVRSYLGGRKVQLCGVAQYGNLIGVTVGYTITASISLVAVGKSNCFHDKGHTADCTISNYPYMAVFGIIQVILSQIPNFHKLSFLSIMAAVMSFTYATIGIGLAIATVAGGKVGKTSMTGTAVGVDVTAAQKIWRSFQAVGDIAFAYAYATVLIEIQDTLRSSPAENKAMKRASLVGVSTTTFFYILCGCIGYAAFGNNAPGDFLTDFGFFEPFWLIDFANACIAVHLIGAYQVFAQPIFQFVEKKCNRNYPDNKFITSEYSVNVPFLGKFNISLFRLVWRTAYVVITTVVAMIFPFFNAILGLIGAASFWPLTVYFPVEMHIAQTKIKKYSARWIALKTMCYVCLIVSLLAAAGSIAGLISSVKTYKPFRTMHE

SEQ ID NO: 24660 - DNA, 882 bp, Arabidopsis thaliana
  misc_feature (1)..(882): Ceres Seq. ID no. 12335781
  misc_feature: MA Experiment ID: 108577 Result: Up-regulated in Transcription
  misc_feature: MA Experiment 108577 PARAMETER Experiment Name: At_42deg_Heat_cDNA_P Parameter: Temperature (deg C) Value: 42 vs. 22
  misc_feature: MA Experiment 108577 PARAMETER Experiment Name: At_42deg_Heat_cDNA_P Parameter: Timepoint (hr) Value: 6
  misc_feature: MA Experiment 108577 PARAMETER Experiment Name: At_42deg_Heat_cDNA_P Parameter: Tissue Value: Aerial
  misc_feature: MA Experiment ID: 20000169 Result: Down-regulated in Transcription
  misc_feature: MA Experiment 20000169 PARAMETER Experiment Name: At_100uM_ABA_P Parameter: Age (day) Value: 14
  misc_feature: MA Experiment 20000169 PARAMETER Experiment Name: At_100uM_ABA_P Parameter: Organism Value: A. thaliana
  misc_feature: MA Experiment 20000169 PARAMETER Experiment Name: At_100uM_ABA_P Parameter: Plant Line Value: WS
  misc_feature: MA Experiment 20000169 PARAMETER Experiment Name: At_100uM_ABA_P Parameter: Timepoint (hr) Value: 6
  misc_feature: MA Experiment 20000169 PARAMETER Experiment Name: At_100uM_ABA_P Parameter: Tissue Value: Aerial
  misc_feature: MA Experiment 20000169 PARAMETER Experiment Name: At_100uM_ABA_P Parameter: Treatment Value: 100uM ABA vs. No Treatment
  misc_feature: MA Experiment ID: 20000180 Result: Up-regulated in Transcription
  misc_feature: MA Experiment 20000180 PARAMETER Experiment Name: At_Germinating_Seeds_P Parameter: Age (hr) Value: 24 vs. 0
  misc_feature: MA Experiment 20000180 PARAMETER Experiment Name: At_Germinating_Seeds_P Parameter: Tissue Value: Germinating Seeds
  misc_feature: MA Experiment ID: 20000182 Result: Down-regulated in Transcription
  misc_feature: MA Experiment 20000182 PARAMETER Experiment Name: At_2mM_SA_P Parameter: Age (day) Value: 14
  misc_feature: MA Experiment 20000182 PARAMETER Experiment Name: At_2mM_SA_P Parameter: Organism Value: A. thaliana
  misc_feature: MA Experiment 20000182 PARAMETER Experiment Name: At_2mM_SA_P Parameter: Plant Line Value: WS
  misc_feature: MA Experiment 20000182 PARAMETER Experiment Name: At_2mM_SA_P Parameter: Timepoint (hr) Value: 6
  misc_feature: MA Experiment 20000182 PARAMETER Experiment Name: At_2mM_SA_P Parameter: Tissue Value: Aerial
  misc_feature: MA Experiment 20000182 PARAMETER Experiment Name: At_2mM_SA_P Parameter: Treatment Value: 2mM SA vs. No Treatment
  misc_feature: MA Experiment ID: 20000185 Result: Down-regulated in Transcription
  misc_feature: MA Experiment 20000185 PARAMETER Experiment Name: At_Roots__P Parameter: Age (day) Value: 7 vs. 21
  misc_feature: MA Experiment 20000185 PARAMETER Experiment Name: At_Roots__P Parameter: Organism Value: A. thaliana
  misc_feature: MA Experiment 20000185 PARAMETER Experiment Name: At_Roots__P Parameter: Tissue Value: Roots vs. Whole Plant
  misc_feature: MA Experiment ID: 20000214 Result: Up-regulated in Transcription
  misc_feature: MA Experiment 20000214 PARAMETER Experiment Name: At_4deg_Cold_P Parameter: Timepoint (hr) Value: 6
  misc_feature: MA Experiment ID: 20000437 Result: Down-regulated in Transcription
  misc_feature: MA Experiment 20000437 PARAMETER Experiment Name: At_Drought_P Parameter: Age (day) Value: 8
  misc_feature: MA Experiment 20000437 PARAMETER Experiment Name: At_Drought_P Parameter: Organism Value: A. thaliana
  misc_feature: MA Experiment 20000437 PARAMETER Experiment Name: At_Drought_P Parameter: Plant Line Value: WS
  misc_feature: MA Experiment 20000437 PARAMETER Experiment Name: At_Drought_P Parameter: Timepoint (hr) Value: 24
  misc_feature: MA Experiment 20000437 PARAMETER Experiment Name: At_Drought_P Parameter: Tissue Value: Whole Plant
  misc_feature: MA Experiment 20000437 PARAMETER Experiment Name: At_Drought_P Parameter: Treatment Value: Drought vs. No Drought
  misc_feature: MA Experiment ID: 20000439 Result: Down-regulated in Transcription
  misc_feature: MA Experiment 20000439 PARAMETER Experiment Name: At_Roots__P Parameter: Age (day) Value: 14 vs. 21
  misc_feature: MA Experiment 20000439 PARAMETER Experiment Name: At_Roots__P Parameter: Organism Value: A. thaliana
  misc_feature: MA Experiment 20000439 PARAMETER Experiment Name: At_Roots__P Parameter: Tissue Value: Roots vs. Whole Plant
  misc_feature: MA Experiment ID: 20000441 Result: Down-regulated in Transcription
  misc_feature: MA Experiment 20000441 PARAMETER Experiment Name: At_1uM_BR-BRZ__P Parameter: Tissue Value: Shoot Apices
  misc_feature: MA Experiment 20000441 PARAMETER Experiment Name: At_1uM_BR-BRZ__P Parameter: Treatment Value: 1uM BR vs. No Treatment
  misc_feature: MA Experiment ID: 20000453 Result: Down-regulated in Transcription
  misc_feature: MA Experiment 20000453 PARAMETER Experiment Name: At_100uM_ABA_P Parameter: Age (day) Value: 15
  misc_feature: MA Experiment 20000453 PARAMETER Experiment Name: At_100uM_ABA_P Parameter: Organism Value: A. thaliana
  misc_feature: MA Experiment 20000453 PARAMETER Experiment Name: At_100uM_ABA_P Parameter: Plant Line Value: WS
  misc_feature: MA Experiment 20000453 PARAMETER Experiment Name: At_100uM_ABA_P Parameter: Timepoint (hr) Value: 24
  misc_feature: MA Experiment 20000453 PARAMETER Experiment Name: At_100uM_ABA_P Parameter: Tissue Value: Aerial
  misc_feature: MA Experiment 20000453 PARAMETER Experiment Name: At_100uM_ABA_P Parameter: Treatment Value: 100uM ABA vs. No Treatment
  misc_feature: MA Experiment ID: 20000527 Result: Up-regulated in Transcription
  misc_feature: MA Experiment 20000527 PARAMETER Experiment Name: At_10percent_PEG_P Parameter: Age (day) Value: 20
  misc_feature: MA Experiment 20000527 PARAMETER Experiment Name: At_10percent_PEG_P Parameter: Organism Value: A. thaliana
  misc_feature: MA Experiment 20000527 PARAMETER Experiment Name: At_10percent_PEG_P Parameter: Plant Line Value: WS
  misc_feature: MA Experiment 20000527 PARAMETER Experiment Name: At_10percent_PEG_P Parameter: Timepoint (day) Value: 20
  misc_feature: MA Experiment 20000527 PARAMETER Experiment Name: At_10percent_PEG_P Parameter: Tissue Value: Whole Plant
  misc_feature: MA Experiment 20000527 PARAMETER Experiment Name: At_10percent_PEG_P Parameter: Treatment Value: 10percent PEG vs. No Treatment
  misc_feature: MA Experiment ID: 20000573 Result: Up-regulated in Transcription
  misc_feature: MA Experiment 20000573 PARAMETER Experiment Name: At_100uM_ABA_Mutants__P Parameter: Organism Value: A. thaliana
  misc_feature: MA Experiment 20000573 PARAMETER Experiment Name: At_100uM_ABA_Mutants__P Parameter: Plant Line Value: CS22 vs. Ler wt
  misc_feature: MA Experiment 20000573 PARAMETER Experiment Name: At_100uM_ABA_Mutants__P Parameter: Timepoint (hr) Value: N/A
  misc_feature: MA Experiment 20000573 PARAMETER Experiment Name: At_100uM_ABA_Mutants__P Parameter: Tissue Value: Whole Plant
  misc_feature: MA Experiment 20000573 PARAMETER Experiment Name: At_100uM_ABA_Mutants__P Parameter: Treatment Value: None
  misc_feature: MA Experiment ID: 20000574 Result: Up-regulated in Transcription
  misc_feature: MA Experiment 20000574 PARAMETER Experiment Name: At_100uM_ABA_Mutants__P Parameter: Organism Value: A. thaliana
  misc_feature: MA Experiment 20000574 PARAMETER Experiment Name: At_100uM_ABA_Mutants__P Parameter: Plant Line Value: CS23 vs. Ler wt
  misc_feature: MA Experiment 20000574 PARAMETER Experiment Name: At_100uM_ABA_Mutants__P Parameter: Timepoint (hr) Value: N/A
  misc_feature: MA Experiment 20000574 PARAMETER Experiment Name: At_100uM_ABA_Mutants__P Parameter: Tissue Value: Whole Plant
  misc_feature: MA Experiment 20000574 PARAMETER Experiment Name: At_100uM_ABA_Mutants__P Parameter: Treatment Value: None
  misc_feature: MA Experiment ID: 20000794 Result: Down-regulated in Transcription
  misc_feature: MA Experiment 20000794 PARAMETER Experiment Name: At_Petals_P Parameter: Age (day) Value: 23-25 days
  misc_feature: MA Experiment 20000794 PARAMETER Experiment Name: At_Petals_P Parameter: Plant Line Value: WS
  misc_feature: MA Experiment 20000794 PARAMETER Experiment Name: At_Petals_P Parameter: Tissue Value: Petals vs. Whole plant
  misc_feature: MA Experiment ID: 20001247 Result: Down-regulated in Transcription
  misc_feature: MA Experiment 20001247 PARAMETER Experiment Name: At_Far-red-induction_P Parameter: Age (day) Value: 7
  misc_feature: MA Experiment 20001247 PARAMETER Experiment Name: At_Far-red-induction_P Parameter: Light Value: Far-red vs. White
  misc_feature: MA Experiment 20001247 PARAMETER Experiment Name: At_Far-red-induction_P Parameter: Organism Value: A. thaliana
  misc_feature: MA Experiment 20001247 PARAMETER Experiment Name: At_Far-red-induction_P Parameter: Plant Line Value: Columbia
  misc_feature: MA Experiment 20001247 PARAMETER Experiment Name: At_Far-red-induction_P Parameter: Timepoint (hr) Value: 1
  misc_feature: MA Experiment 20001247 PARAMETER Experiment Name: At_Far-red-induction_P Parameter: Tissue Value: Whole Plant
  misc_feature: MA Experiment ID: 20001451 Result: Down-regulated in Transcription
  misc_feature: MA Experiment 20001451 PARAMETER Experiment Name: At_Far-red-induction_P Parameter: Age (day) Value: 7
  misc_feature: MA Experiment 20001451 PARAMETER Experiment Name: At_Far-red-induction_P Parameter: Light Value: Far-red vs. White
  misc_feature: MA Experiment 20001451 PARAMETER Experiment Name: At_Far-red-induction_P Parameter: Organism Value: A. thaliana
  misc_feature: MA Experiment 20001451 PARAMETER Experiment Name: At_Far-red-induction_P Parameter: Plant Line Value: Columbia
  misc_feature: MA Experiment 20001451 PARAMETER Experiment Name: At_Far-red-induction_P Parameter: Timepoint (hr) Value: 24
  misc_feature: MA Experiment 20001451 PARAMETER Experiment Name: At_Far-red-induction_P Parameter: Tissue Value: Whole Plant
  misc_feature: MA Experiment ID: 20001555 Result: Down-regulated in Transcription
  misc_feature: MA Experiment 20001555 PARAMETER Experiment Name: At_Drought_Soil_Dry_P Parameter: Age (day) Value: 24
  misc_feature: MA Experiment 20001555 PARAMETER Experiment Name: At_Drought_Soil_Dry_P Parameter: Organism Value: A. thaliana
  misc_feature: MA Experiment 20001555 PARAMETER Experiment Name: At_Drought_Soil_Dry_P Parameter: Plant Line Value: WS
  misc_feature: MA Experiment 20001555 PARAMETER Experiment Name: At_Drought_Soil_Dry_P Parameter: Post Timepoint (hr) Value: None
  misc_feature: MA Experiment 20001555 PARAMETER Experiment Name: At_Drought_Soil_Dry_P Parameter: Post-Treatment Value: None
  misc_feature: MA Experiment 20001555 PARAMETER Experiment Name: At_Drought_Soil_Dry_P Parameter: Timepoint (day) Value: 10
  misc_feature: MA Experiment 20001555 PARAMETER Experiment Name: At_Drought_Soil_Dry_P Parameter: Treatment Value: Drought vs. No Drought
  misc_feature: MA Experiment ID: 20001556 Result: Down-regulated in Transcription
  misc_feature: MA Experiment 20001556 PARAMETER Experiment Name: At_Drought_Soil_Dry_P Parameter: Age (day) Value: 26
  misc_feature: MA Experiment 20001556 PARAMETER Experiment Name: At_Drought_Soil_Dry_P Parameter: Organism Value: A. thaliana
  misc_feature: MA Experiment 20001556 PARAMETER Experiment Name: At_Drought_Soil_Dry_P Parameter: Plant Line Value: WS
  misc_feature: MA Experiment 20001556 PARAMETER Experiment Name: At_Drought_Soil_Dry_P Parameter: Post Timepoint (hr) Value: None
  misc_feature: MA Experiment 20001556 PARAMETER Experiment Name: At_Drought_Soil_Dry_P Parameter: Post-Treatment Value: None
  misc_feature: MA Experiment 20001556 PARAMETER Experiment Name: At_Drought_Soil_Dry_P Parameter: Timepoint (day) Value: 12
  misc_feature: MA Experiment 20001556 PARAMETER Experiment Name: At_Drought_Soil_Dry_P Parameter: Treatment Value: Drought vs. No Drought
  misc_feature: MA Experiment ID: 20001559 Result: Down-regulated in Transcription
  misc_feature: MA Experiment 20001559 PARAMETER Experiment Name: At_Drought_Soil_Dry_P Parameter: Age (day) Value: 28
  misc_feature: MA Experiment 20001559 PARAMETER Experiment Name: At_Drought_Soil_Dry_P Parameter: Organism Value: A. thaliana
  misc_feature: MA Experiment 20001559 PARAMETER Experiment Name: At_Drought_Soil_Dry_P Parameter: Plant Line Value: WS
  misc_feature: MA Experiment 20001559 PARAMETER Experiment Name: At_Drought_Soil_Dry_P Parameter: Post Timepoint (hr) Value: 29
  misc_feature: MA Experiment 20001559 PARAMETER Experiment Name: At_Drought_Soil_Dry_P Parameter: Post-Treatment Value: Re-Water vs. No Drought
  misc_feature: MA Experiment 20001559 PARAMETER Experiment Name: At_Drought_Soil_Dry_P Parameter: Timepoint (day) Value: 14
  misc_feature: MA Experiment 20001559 PARAMETER Experiment Name: At_Drought_Soil_Dry_P Parameter: Treatment Value: Drought vs. No Drought
  misc_feature: MA Experiment ID: 20001761 Result: Up-regulated in Transcription
  misc_feature: MA Experiment 20001761 PARAMETER Experiment Name: At_50mM_NH4NO3_L-to-H_P Parameter: Timepoint (hr) Value: 4
  misc_feature: MA Experiment 20001761 PARAMETER Experiment Name: At_50mM_NH4NO3_L-to-H_P Parameter: Tissue Value: Siliques
  misc_feature: MA Experiment 20001761 PARAMETER Experiment Name: At_50mM_NH4NO3_L-to-H_P Parameter: Treatment Value: 50mM NH4NO3 vs 100mM Mannitol
  misc_feature: MA Experiment ID: 20001906 Result: Down-regulated in Transcription
  misc_feature: MA Experiment 20001906 PARAMETER Experiment Name: At_Drought_Reproduction_P Parameter: Age (day) Value: 35
  misc_feature: MA Experiment 20001906 PARAMETER Experiment Name: At_Drought_Reproduction_P Parameter: Organism Value: A. thaliana
  misc_feature: MA Experiment 20001906 PARAMETER Experiment Name: At_Drought_Reproduction_P Parameter: Plant Line Value: WS
  misc_feature: MA Experiment 20001906 PARAMETER Experiment Name: At_Drought_Reproduction_P Parameter: Timepoint (day) Value: 5
  misc_feature: MA Experiment 20001906 PARAMETER Experiment Name: At_Drought_Reproduction_P Parameter: Tissue Value: Siliques
  misc_feature: MA Experiment 20001906 PARAMETER Experiment Name: At_Drought_Reproduction_P Parameter: Treatment Value: Drought vs. No Drought
  misc_feature: MA Experiment ID: 20001908 Result: Down-regulated in Transcription
  misc_feature: MA Experiment 20001908 PARAMETER Experiment Name: At_Drought_Reproduction_P Parameter: Age (day) Value: 40
  misc_feature: MA Experiment 20001908 PARAMETER Experiment Name: At_Drought_Reproduction_P Parameter: Organism Value: A. thaliana
  misc_feature: MA Experiment 20001908 PARAMETER Experiment Name: At_Drought_Reproduction_P Parameter: Plant Line Value: WS
  misc_feature: MA Experiment 20001908 PARAMETER Experiment Name: At_Drought_Reproduction_P Parameter: Timepoint (day) Value: 10
  misc_feature: MA Experiment 20001908 PARAMETER Experiment Name: At_Drought_Reproduction_P Parameter: Tissue Value: Siliques
  misc_feature: MA Experiment 20001908 PARAMETER Experiment Name: At_Drought_Reproduction_P Parameter: Treatment Value: Drought vs. No Drought
  misc_feature: MA Experiment ID: 20001911 Result: Down-regulated in Transcription
  misc_feature: MA Experiment 20001911 PARAMETER Experiment Name: At_Drought_Reproduction_P Parameter: Age (day) Value: 40
  misc_feature: MA Experiment 20001911 PARAMETER Experiment Name: At_Drought_Reproduction_P Parameter: Organism Value: A. thaliana
  misc_feature: MA Experiment 20001911 PARAMETER Experiment Name: At_Drought_Reproduction_P Parameter: Plant Line Value: WS
  misc_feature: MA Experiment 20001911 PARAMETER Experiment Name: At_Drought_Reproduction_P Parameter: Timepoint (day) Value: 10
  misc_feature: MA Experiment 20001911 PARAMETER Experiment Name: At_Drought_Reproduction_P Parameter: Tissue Value: Flowers
  misc_feature: MA Experiment 20001911 PARAMETER Experiment Name: At_Drought_Reproduction_P Parameter: Treatment Value: Drought vs. No Drought
aataacttcaacaagagctcttatctataaaacattctaaagaaaaatgaagatgataatccaaattttcttcatcatctccctcatttcaaccatctcttttgcctctgttcaagacttttgtgtagctgatccaaagggtcctcaaagcccatcaggatactcttgcaagaaccctgaccaagtcaccgaaaatgactttgcatttaccggcctcggcaaagctggaaacacttccaacatcattaaagccgcagtgactccagcctttgctcctgcttacgcaggcatcaatggccttggcgtatctctggctcgtcttgacttagccggtggtggtgtcatccctctccacactcatcctggtgcttctgaggtccttgtagttattcaaggcaccatttgcgccgggtttatctcctctgctaacaaagtttacttaaagacacttaacagaggtgattctatggtgtttcctcaaggacttcttcattttcagctaaactctgggaaaggccctgccttagcctttgtcgcattcggaagctcctccccagggctccagattctaccatttgctctgtttgcaaacgatttgccttcagaacttgttgaagccacaacgttccttagcgatgcagaagttaagaagcttaagggtgtgcttggaggaactaattaagcttcacttagtttcattgttcattttttttcaaaaatgtggttgtgcgttttgttatttcgagttcctctagcattttgagtttgtttttctttatgagttgttattgttctcgaagttttcacttttatagtctctttggcttgaattgtaataactaataagcattacattgcagatttctaagtagcttctcaacc

SEQ ID NO: 24661 - protein, 211 aa, Arabidopsis thaliana
  peptide (1)..(211): Ceres Seq. ID no. 12335782
  misc_feature (55)..(201): Pfam Name: Cupin Pfam Description: Cupin
  misc_feature (3)..(210): Homolog of NCBI NO: 30841320 NR Description: auxin binding protein [Gossypium hirsutum]
  misc_feature (3)..(211): Homolog of NCBI NO: 31711507 NR Description: 24K germin like protein [Nicotiana tabacum]
  misc_feature (3)..(211): Homolog of NCBI NO: 18201941 NR Description: Auxin-binding protein ABP19b precursor
  misc_feature (3)..(211): Homolog of NCBI NO: 18201940 NR Description: Auxin-binding protein ABP20 precursor
  misc_feature (3)..(211): Homolog of NCBI NO: 18203684 NR Description: Auxin-binding protein ABP19a precursor
  misc_feature (1)..(210): Homolog of NCBI NO: 13277342 NR Description: Germin-like protein [Pisum sativum]
  misc_feature (24)..(211): Homolog of NCBI NO: 1755188 NR Description: germin-like protein [Arabidopsis thaliana]
  misc_feature (1)..(211): Homolog of NCBI NO: 1169944 NR Description: Germin-like protein 1 precursor
  misc_feature (1)..(211): Homolog of NCBI NO: 15242028 NR Description: germin-like protein
  misc_feature (1)..(211): Homolog of NCBI NO: 1755154 NR Description: germin-like protein [Arabidopsis thaliana]
MKMIIQIFFIISLISTISFASVQDFCVADPKGPQSPSGYSCKNPDQVTENDFAFTGLGKAGNTSNIIKAAVTPAFAPAYAGINGLGVSLARLDLAGGGVIPLHTHPGASEVLVVIQGTICAGFISSANKVYLKTLNRGDSMVFPQGLLHFQLNSGKGPALAFVAFGSSSPGLQILPFALFANDLPSELVEATTFLSDAEVKKLKGVLGGTN

SEQ ID NO: 24662 - protein, 209 aa, Arabidopsis thaliana
  peptide (1)..(209): Ceres Seq. ID no. 12335783
  misc_feature (53)..(199): Pfam Name: Cupin Pfam Description: Cupin
  misc_feature (1)..(208): Homolog of NCBI NO: 30841320 NR Description: auxin binding protein [Gossypium hirsutum]
  misc_feature (1)..(209): Homolog of NCBI NO: 31711507 NR Description: 24K germin like protein [Nicotiana tabacum]
  misc_feature (1)..(209): Homolog of NCBI NO: 18201941 NR Description: Auxin-binding protein ABP19b precursor
  misc_feature (1)..(209): Homolog of NCBI NO: 18201940 NR Description: Auxin-binding protein ABP20 precursor
  misc_feature (1)..(209): Homolog of NCBI NO: 18203684 NR Description: Auxin-binding protein ABP19a precursor
  misc_feature (1)..(208): Homolog of NCBI NO: 13277342 NR Description: Germin-like protein [Pisum sativum]
  misc_feature (22)..(209): Homolog of NCBI NO: 1755188 NR Description: germin-like protein [Arabidopsis thaliana]
  misc_feature (1)..(209): Homolog of NCBI NO: 1169944 NR Description: Germin-like protein 1 precursor
  misc_feature (1)..(209): Homolog of NCBI NO: 15242028 NR Description: germin-like protein
  misc_feature (1)..(209): Homolog of NCBI NO: 1755154 NR Description: germin-like protein [Arabidopsis thaliana]
MIIQIFFIISLISTISFASVQDFCVADPKGPQSPSGYSCKNPDQVTENDFAFTGLGKAGNTSNIIKAAVTPAFAPAYAGINGLGVSLARLDLAGGGVIPLHTHPGASEVLVVIQGTICAGFISSANKVYLKTLNRGDSMVFPQGLLHFQLNSGKGPALAFVAFGSSSPGLQILPFALFANDLPSELVEATTFLSDAEVKKLKGVLGGTN

SEQ ID NO: 24663 - DNA, 1453 bp, Arabidopsis thaliana
  misc_feature (1)..(1453): Ceres Seq. ID no. 13490734
  misc_feature: MA Experiment ID: 20000171 Result: Down-regulated in Transcription
  misc_feature: MA Experiment 20000171 PARAMETER Experiment Name: At_42deg_Heat_P Parameter: Age (day) Value: 14
  misc_feature: MA Experiment 20000171 PARAMETER Experiment Name: At_42deg_Heat_P Parameter: Organism Value: A. thaliana
  misc_feature: MA Experiment 20000171 PARAMETER Experiment Name: At_42deg_Heat_P Parameter: Plant Line Value: WS
  misc_feature: MA Experiment 20000171 PARAMETER Experiment Name: At_42deg_Heat_P Parameter: Temperature (deg C) Value: 42 vs. 22
  misc_feature: MA Experiment 20000171 PARAMETER Experiment Name: At_42deg_Heat_P Parameter: Timepoint (hr) Value: 1
  misc_feature: MA Experiment 20000171 PARAMETER Experiment Name: At_42deg_Heat_P Parameter: Tissue Value: Aerial
  misc_feature: MA Experiment ID: 20000173 Result: Down-regulated in Transcription
  misc_feature: MA Experiment 20000173 PARAMETER Experiment Name: At_42deg_Heat_P Parameter: Age (day) Value: 14
  misc_feature: MA Experiment 20000173 PARAMETER Experiment Name: At_42deg_Heat_P Parameter: Organism Value: A. thaliana
  misc_feature: MA Experiment 20000173 PARAMETER Experiment Name: At_42deg_Heat_P Parameter: Plant Line Value: WS
  misc_feature: MA Experiment 20000173 PARAMETER Experiment Name: At_42deg_Heat_P Parameter: Temperature (deg C) Value: 42 vs. 22
  misc_feature: MA Experiment 20000173 PARAMETER Experiment Name: At_42deg_Heat_P Parameter: Timepoint (hr) Value: 6
  misc_feature: MA Experiment 20000173 PARAMETER Experiment Name: At_42deg_Heat_P Parameter: Tissue Value: Aerial
  misc_feature: MA Experiment ID: 20000185 Result: Down-regulated in Transcription
  misc_feature: MA Experiment 20000185 PARAMETER Experiment Name: At_Roots__P Parameter: Age (day) Value: 7 vs. 21
  misc_feature: MA Experiment 20000185 PARAMETER Experiment Name: At_Roots__P Parameter: Organism Value: A. thaliana
  misc_feature: MA Experiment 20000185 PARAMETER Experiment Name: At_Roots__P Parameter: Tissue Value: Roots vs. Whole Plant
  misc_feature: MA Experiment ID: 20000437 Result: Down-regulated in Transcription
  misc_feature: MA Experiment 20000437 PARAMETER Experiment Name: At_Drought_P Parameter: Age (day) Value: 8
  misc_feature: MA Experiment 20000437 PARAMETER Experiment Name: At_Drought_P Parameter: Organism Value: A. thaliana
  misc_feature: MA Experiment 20000437 PARAMETER Experiment Name: At_Drought_P Parameter: Plant Line Value: WS
  misc_feature: MA Experiment 20000437 PARAMETER Experiment Name: At_Drought_P Parameter: Timepoint (hr) Value: 24
  misc_feature: MA Experiment 20000437 PARAMETER Experiment Name: At_Drought_P Parameter: Tissue Value: Whole Plant
  misc_feature: MA Experiment 20000437 PARAMETER Experiment Name: At_Drought_P Parameter: Treatment Value: Drought vs. No Drought
  misc_feature: MA Experiment ID: 20001558 Result: Up-regulated in Transcription
  misc_feature: MA Experiment 20001558 PARAMETER Experiment Name: At_Drought_Soil_Dry_P Parameter: Age (day) Value: 27
  misc_feature: MA Experiment 20001558 PARAMETER Experiment Name: At_Drought_Soil_Dry_P Parameter: Organism Value: A. thaliana
  misc_feature: MA Experiment 20001558 PARAMETER Experiment Name: At_Drought_Soil_Dry_P Parameter: Plant Line Value: WS
  misc_feature: MA Experiment 20001558 PARAMETER Experiment Name: At_Drought_Soil_Dry_P Parameter: Post Timepoint (hr) Value: 6
  misc_feature: MA Experiment 20001558 PARAMETER Experiment Name: At_Drought_Soil_Dry_P Parameter: Post-Treatment Value: Re-Water vs. No Drought
  misc_feature: MA Experiment 20001558 PARAMETER Experiment Name: At_Drought_Soil_Dry_P Parameter: Timepoint (day) Value: 13
  misc_feature: MA Experiment 20001558 PARAMETER Experiment Name: At_Drought_Soil_Dry_P Parameter: Treatment Value: Drought vs. No Drought
  misc_feature: MA Experiment ID: 20001560 Result: Up-regulated in Transcription
  misc_feature: MA Experiment 20001560 PARAMETER Experiment Name: At_Drought_Soil_Dry_P Parameter: Age (day) Value: 28
  misc_feature: MA Experiment 20001560 PARAMETER Experiment Name: At_Drought_Soil_Dry_P Parameter: Organism Value: A. thaliana
  misc_feature: MA Experiment 20001560 PARAMETER Experiment Name: At_Drought_Soil_Dry_P Parameter: Plant Line Value: WS
  misc_feature: MA Experiment 20001560 PARAMETER Experiment Name: At_Drought_Soil_Dry_P Parameter: Post Timepoint (hr) Value: None
  misc_feature: MA Experiment 20001560 PARAMETER Experiment Name: At_Drought_Soil_Dry_P Parameter: Post-Treatment Value: None
  misc_feature: MA Experiment 20001560 PARAMETER Experiment Name: At_Drought_Soil_Dry_P Parameter: Timepoint (day) Value: 14
  misc_feature: MA Experiment 20001560 PARAMETER Experiment Name: At_Drought_Soil_Dry_P Parameter: Treatment Value: Drought vs. No Drought
  misc_feature: MA Experiment ID: 20001757 Result: Up-regulated in Transcription
  misc_feature: MA Experiment 20001757 PARAMETER Experiment Name: At_50mM_NH4NO3_L-to-H_P Parameter: Timepoint (hr) Value: 6
  misc_feature: MA Experiment 20001757 PARAMETER Experiment Name: At_50mM_NH4NO3_L-to-H_P Parameter: Tissue Value: Leaf
  misc_feature: MA Experiment 20001757 PARAMETER Experiment Name: At_50mM_NH4NO3_L-to-H_P Parameter: Treatment Value: 50mM NH4NO3 vs 100mM Mannitol
  misc_feature: MA Experiment ID: 20001911 Result: Down-regulated in Transcription
  misc_feature: MA Experiment 20001911 PARAMETER Experiment Name: At_Drought_Reproduction_P Parameter: Age (day) Value: 40
  misc_feature: MA Experiment 20001911 PARAMETER Experiment Name: At_Drought_Reproduction_P Parameter: Organism Value: A. thaliana
  misc_feature: MA Experiment 20001911 PARAMETER Experiment Name: At_Drought_Reproduction_P Parameter: Plant Line Value: WS
  misc_feature: MA Experiment 20001911 PARAMETER Experiment Name: At_Drought_Reproduction_P Parameter: Timepoint (day) Value: 10
  misc_feature: MA Experiment 20001911 PARAMETER Experiment Name: At_Drought_Reproduction_P Parameter: Tissue Value: Flowers
  misc_feature: MA Experiment 20001911 PARAMETER Experiment Name: At_Drought_Reproduction_P Parameter: Treatment Value: Drought vs. No Drought
atctgttttccagtttcgatttcgaatcaaatatgaagctgaaagagtttttctgaatctttgtctttgtatccgttatctgaattttattcgccatggaagctgtgcttctctgctcgaagcttgttcctagagcggcgtcgttggaagggaaccaaaagttttcgttcaggcatttgaacaaacaccttaagtgcaattcccttcgtgctgattccagagacactccgttgctccgaggttttgaagcgataaagagtccgtctatctggagttgtgcgccgttcccagtgagaaaaggttcatgggttccacccagatgctcgatttctagctcgactgtttccgattccgataaccctttccttagccaatttcgaaccttctcttttgggtcaatggtgaagaaagttcgtgagttgaaagtgaagcccatggatgttgtgaagttaactcttttgctatcgattttgactgtggctgcaaaaaagactttgactttggtcttggacccattcttctggatgtattttagctggacatggttgttctggccttggtttatcgctgtgggtcttgcgggttatggaatttactgtttccgtaagcattggcttggcgaagccaatgcctttgagcagcttggtattgtaacttcagtcttcacatggctaacacttgtgcctcctgcttatttcaatggttatcttgaaggctggccttatgtgttcttcttggcgtatcattacttctttttcttcaatgttagcgtgagaaaacgcctctatggagatttctatgctcgcactcatgatcccaaatgggatgtgaacacgcctctgtggtctcggattttgtttggtgttggcatcatggttggacattggcttgcagcttttgaagggcctgagcttcaccgattaccagggggttgggccaatgtagggatatggattttgattgtgattacaatgcttatgcattatgattcaacgctatatcttgctagatattctgaaaaggttgttgttccaacggctgttgtgcaatttggtccttatagatgggtcaggcatccgatatatgcttctacgatgcttcttttcgctgcatactgcactgctctgcgtgcgcctttgagtctgttgtttcttttagcggtttgtttggtttactacaacaagaaggcaaagatggaagaagaattgatggtggagagtttcggacaaagctattcggattatgctgataaggttaggcacaagttcattccttttgtttactagtagtggtatagaggaacctgtgttgtgtctaattttctggtatctatcagccaaagatgtatgaatgaagatgagttctcatttttattggaatgttaggcttgtgaaaaggatatgcttttatgctattcatggttctcttaaattctatttcaagttatttttcc

SEQ ID NO: 24664 - protein, 396 aa, Arabidopsis thaliana
  peptide (1)..(396): Ceres Seq. ID no. 13490735
  misc_feature (211)..(396): Homolog of NCBI NO: 15896653 NR Description: Predicted protein-S-isoprenylcysteine
  misc_feature (198)..(396): Homolog of NCBI NO: 15921450 NR Description: 199aa long conserved hypothetical protein
  misc_feature (133)..(396): Homolog of NCBI NO: 19347912 NR Description: unknown protein [Arabidopsis thaliana]
  misc_feature (1)..(396): Homolog of NCBI NO: 21593420 NR Description: unknown [Arabidopsis thaliana]
  misc_feature (1)..(396): Homolog of NCBI NO: 15238431 NR Description: expressed protein [Arabidopsis thaliana]
MEAVLLCSKLVPRAASLEGNQKFSFRHLNKHLKCNSLRADSRDTPLLRGFEAIKSPSIWSCAPFPVRKGSWVPPRCSISSSTVSDSDNPFLSQFRTFSFGSMVKKVRELKVKPMDVVKLTLLLSILTVAAKKTLTLVLDPFFWMYFSWTWLFWPWFIAVGLAGYGIYCFRKHWLGEANAFEQLGIVTSVFTWLTLVPPAYFNGYLEGWPYVFFLAYHYFFFFNVSVRKRLYGDFYARTHDPKWDVNTPLWSRILFGVGIMVGHWLAAFEGPELHRLPGGWANVGIWILIVITMLMHYDSTLYLARYSEKVVVPTAVVQFGPYRWVRHPIYASTMLLFAAYCTALRAPLSLLFLLAVCLVYYNKKAKMEEELMVESFGQSYSDYADKVRHKFIPFVY

SEQ ID NO: 24665 - protein, 295 aa, Arabidopsis thaliana
  peptide (1)..(295): Ceres Seq. ID no. 13490736
  misc_feature (110)..(295): Homolog of NCBI NO: 15896653 NR Description: Predicted protein-S-isoprenylcysteine
  misc_feature (97)..(295): Homolog of NCBI NO: 15921450 NR Description: 199aa long conserved hypothetical protein
  misc_feature (32)..(295): Homolog of NCBI NO: 19347912 NR Description: unknown protein [Arabidopsis thaliana]
  misc_feature (1)..(295): Homolog of NCBI NO: 21593420 NR Description: unknown [Arabidopsis thaliana]
  misc_feature (1)..(295): Homolog of NCBI NO: 15238431 NR Description: expressed protein [Arabidopsis thaliana]
MVKKVRELKVKPMDVVKLTLLLSILTVAAKKTLTLVLDPFFWMYFSWTWLFWPWFIAVGLAGYGIYCFRKHWLGEANAFEQLGIVTSVFTWLTLVPPAYFNGYLEGWPYVFFLAYHYFFFFNVSVRKRLYGDFYARTHDPKWDVNTPLWSRILFGVGIMVGHWLAAFEGPELHRLPGGWANVGIWILIVITMLMHYDSTLYLARYSEKVVVPTAVVQFGPYRWVRHPIYASTMLLFAAYCTALRAPLSLLFLLAVCLVYYNKKAKMEEELMVESFGQSYSDYADKVRHKFIPFVY

SEQ ID NO: 24666 - protein, 283 aa, Arabidopsis thaliana
  peptide (1)..(283): Ceres Seq. ID no. 13490737
  misc_feature (98)..(283): Homolog of NCBI NO: 15896653 NR Description: Predicted protein-S-isoprenylcysteine
  misc_feature (85)..(283): Homolog of NCBI NO: 15921450 NR Description: 199aa long conserved hypothetical protein
  misc_feature (20)..(283): Homolog of NCBI NO: 19347912 NR Description: unknown protein [Arabidopsis thaliana]
  misc_feature (1)..(283): Homolog of NCBI NO: 21593420 NR Description: unknown [Arabidopsis thaliana]
  misc_feature (1)..(283): Homolog of NCBI NO: 15238431 NR Description: expressed protein [Arabidopsis thaliana]
MDVVKLTLLLSILTVAAKKTLTLVLDPFFWMYFSWTWLFWPWFIAVGLAGYGIYCFRKHWLGEANAFEQLGIVTSVFTWLTLVPPAYFNGYLEGWPYVFFLAYHYFFFFNVSVRKRLYGDFYARTHDPKWDVNTPLWSRILFGVGIMVGHWLAAFEGPELHRLPGGWANVGIWILIVITMLMHYDSTLYLARYSEKVVVPTAVVQFGPYRWVRHPIYASTMLLFAAYCTALRAPLSLLFLLAVCLVYYNKKAKMEEELMVESFGQSYSDYADKVRHKFIPFVY

SEQ ID NO: 24667 - DNA, 1019 bp, Arabidopsis thaliana
  misc_feature (1)..(1019): Ceres Seq. ID no. 12422372
  misc_feature: MA Experiment ID: 20000086 Result: Down-regulated in Transcription
  misc_feature: MA Experiment 20000086 PARAMETER Experiment Name: At_100uM_ABA_Mutants_cDNA_P Parameter: Plant Line Value: CS22
  misc_feature: MA Experiment 20000086 PARAMETER Experiment Name: At_100uM_ABA_Mutants_cDNA_P Parameter: Timepoint (hr) Value: 6
  misc_feature: MA Experiment 20000086 PARAMETER Experiment Name: At_100uM_ABA_Mutants_cDNA_P Parameter: Tissue Value: Aerial
  misc_feature: MA Experiment 20000086 PARAMETER Experiment Name: At_100uM_ABA_Mutants_cDNA_P Parameter: Treatment Value: 100uM ABA vs. No Treatment
  misc_feature: MA Experiment ID: 20000180 Result: Down-regulated in Transcription
  misc_feature: MA Experiment 20000180 PARAMETER Experiment Name: At_Germinating_Seeds_P Parameter: Age (hr) Value: 24 vs. 0
  misc_feature: MA Experiment 20000180 PARAMETER Experiment Name: At_Germinating_Seeds_P Parameter: Tissue Value: Germinating Seeds
  misc_feature: MA Experiment ID: 20000495 Result: Down-regulated in Transcription
  misc_feature: MA Experiment 20000495 PARAMETER Experiment Name: At_Guard_Cells_P Parameter: Harvest Date Value: 8/2/2002
  misc_feature: MA Experiment 20000495 PARAMETER Experiment Name: At_Guard_Cells_P Parameter: Organism Value: A. thaliana
  misc_feature: MA Experiment 20000495 PARAMETER Experiment Name: At_Guard_Cells_P Parameter: Tissue Value: Guard Cells vs. Leaves
  misc_feature: MA Experiment ID: 20000496 Result: Down-regulated in Transcription
  misc_feature: MA Experiment 20000496 PARAMETER Experiment Name: At_Guard_Cells_P Parameter: Harvest Date Value: 7/19/2002
  misc_feature: MA Experiment 20000496 PARAMETER Experiment Name: At_Guard_Cells_P Parameter: Organism Value: Canola
  misc_feature: MA Experiment 20000496 PARAMETER Experiment Name: At_Guard_Cells_P Parameter: Tissue Value: Guard Cells vs. Leaves
  misc_feature: MA Experiment ID: 20001451 Result: Down-regulated in Transcription
  misc_feature: MA Experiment 20001451 PARAMETER Experiment Name: At_Far-red-induction_P Parameter: Age (day) Value: 7
  misc_feature: MA Experiment 20001451 PARAMETER Experiment Name: At_Far-red-induction_P Parameter: Light Value: Far-red vs. White
  misc_feature: MA Experiment 20001451 PARAMETER Experiment Name: At_Far-red-induction_P Parameter: Organism Value: A. thaliana
  misc_feature: MA Experiment 20001451 PARAMETER Experiment Name: At_Far-red-induction_P Parameter: Plant Line Value: Columbia
  misc_feature: MA Experiment 20001451 PARAMETER Experiment Name: At_Far-red-induction_P Parameter: Timepoint (hr) Value: 24
  misc_feature: MA Experiment 20001451 PARAMETER Experiment Name: At_Far-red-induction_P Parameter: Tissue Value: Whole Plant
atcggtcgggatatttggcgagccgacccgtcgcgtcgtgggtttaggtttaacgtattggcgcgccagtgaagaaaatagacgacgatggcgatgatgcatcctccgcagccgccgcaaggctcttatcaccatcctcagacgctcgaagaagttcgaactctttggattggtgatttgcagtactgggtcgacgaaaattacctcacttcctgcttctcccaaaccggcgagctcgtttctgtcaaggtaatacgtaacaagatcacgggacagccagaggggtatggttttatagagtttatatctcatgcagcagcagagagaactctgcagacgtacaatgggacacagatgcctggaactgagttaacttttcggttaaattgggcttcttttggttcaggacagaaagttgatgctggacctgatcattctatctttgttggagatttagcacctgatgttacagattatcttcttcaagagacattccgtgttcattattcttctgttagaggtgccaaggttgttactgatccaagtactggacgatcaaagggttatggatttgttaaatttgcagaggaaagtgaaaggaatcgggctatggctgaaatgaatggtttgtattgctcaacaaggcctatgcgtattagcgcagcaacacctaaaaaaaacgtcggtgtgcagcaacaatatgtcaccaaagttacagtcccatctgcagttgctgcaccagtccaagcatacgttgctccacctgaaagtgatgtcacctgtacaacgatttcagttgccaatttggaccaaaatgttacagaggaagagctgaagaaagcattctcccaattaggagaggttatttatgtcaaaatacctgcaacaaagggatatggttatgttcaattcaaaaccaggccttctgcagaagaagctgttcaaagaatgcagggacaagtgattggtcaacaagcagttcgcatctcttggagtaaaaatccaggacaggatggttg

SEQ ID NO: 24668 - protein, 310 aa, Arabidopsis thaliana
  peptide (1)..(310): Ceres Seq. ID no. 12422373
  misc_feature (26)..(97): Pfam Name: RNA recognition motif. (a.k.a. RRM, RBD, or RNP domain) Pfam Description: RNA recognition motif. (a.k.a. RRM, RBD, or RNP
  misc_feature (5)..(309): Homolog of NCBI NO: 9294614 NR Description: DNA/RNA binding protein-like [Arabidopsis
  misc_feature (6)..(305): Homolog of NCBI NO: 39545835 NR Description: OSJNBb0060E08.6 [Oryza sativa (japonica
  misc_feature (21)..(306): Homolog of NCBI NO: 40804404 NR Description: DNA-binding protein [Lycopersicon esculentum]
  misc_feature (1)..(306): Homolog of NCBI NO: 9663767 NR Description: RNA Binding Protein 45 [Nicotiana plumbaginifolia]
  misc_feature (21)..(304): Homolog of NCBI NO: 7489112 NR Description: DNA binding protein ACBF - common tobacco
  misc_feature (9)..(306): Homolog of NCBI NO: 40253807 NR Description: putative RNA Binding Protein 45
  misc_feature (21)..(306): Homolog of NCBI NO: 9663769 NR Description: RNA Binding Protein 47 [Nicotiana plumbaginifolia]
  misc_feature (2)..(307): Homolog of NCBI NO: 34896988 NR Description: putative RNA binding protein [Oryza sativa]
  misc_feature (21)..(306): Homolog of NCBI NO: 7489196 NR Description: RNA binding protein homolog - common tobacco
  misc_feature (1)..(309): Homolog of NCBI NO: 15239715 NR Description: RNA binding protein 45 (RBP45), putative
MAMMHPPQPPQGSYHHPQTLEEVRTLWIGDLQYWVDENYLTSCFSQTGELVSVKVIRNKITGQPEGYGFIEFISHAAAERTLQTYNGTQMPGTELTFRLNWASFGSGQKVDAGPDHSIFVGDLAPDVTDYLLQETFRVHYSSVRGAKVVTDPSTGRSKGYGFVKFAEESERNRAMAEMNGLYCSTRPMRISAATPKKNVGVQQQYVTKVTVPSAVAAPVQAYVAPPESDVTCTTISVANLDQNVTEEELKKAFSQLGEVIYVKIPATKGYGYVQFKTRPSAEEAVQRMQGQVIGQQAVRISWSKNPGQDG

SEQ ID NO: 24669 - protein, 308 aa, Arabidopsis thaliana
  peptide (1)..(308): Ceres Seq. ID no. 12422374
  misc_feature (24)..(95): Pfam Name: RNA recognition motif. (a.k.a. RRM, RBD, or RNP domain) Pfam Description: RNA recognition motif. (a.k.a. RRM, RBD, or RNP
  misc_feature (3)..(307): Homolog of NCBI NO: 9294614 NR Description: DNA/RNA binding protein-like [Arabidopsis
  misc_feature (4)..(303): Homolog of NCBI NO: 39545835 NR Description: OSJNBb0060E08.6 [Oryza sativa (japonica
  misc_feature (19)..(304): Homolog of NCBI NO: 40804404 NR Description: DNA-binding protein [Lycopersicon esculentum]
  misc_feature (1)..(304): Homolog of NCBI NO: 9663767 NR Description: RNA Binding Protein 45 [Nicotiana plumbaginifolia]
  misc_feature (19)..(302): Homolog of NCBI NO: 7489112 NR Description: DNA binding protein ACBF - common tobacco
  misc_feature (7)..(304): Homolog of NCBI NO: 40253807 NR Description: putative RNA Binding Protein 45
  misc_feature (19)..(304): Homolog of NCBI NO: 9663769 NR Description: RNA Binding Protein 47 [Nicotiana plumbaginifolia]
  misc_feature (1)..(305): Homolog of NCBI NO: 34896988 NR Description: putative RNA binding protein [Oryza sativa]
  misc_feature (19)..(304): Homolog of NCBI NO: 7489196 NR Description: RNA binding protein homolog - common tobacco
  misc_feature (1)..(307): Homolog of NCBI NO: 15239715 NR Description: RNA binding protein 45 (RBP45), putative
MMHPPQPPQGSYHHPQTLEEVRTLWIGDLQYWVDENYLTSCFSQTGELVSVKVIRNKITGQPEGYGFIEFISHAAAERTLQTYNGTQMPGTELTFRLNWASFGSGQKVDAGPDHSIFVGDLAPDVTDYLLQETFRVHYSSVRGAKVVTDPSTGRSKGYGFVKFAEESERNRAMAEMNGLYCSTRPMRISAATPKKNVGVQQQYVTKVTVPSAVAAPVQAYVAPPESDVTCTTISVANLDQNVTEEELKKAFSQLGEVIYVKIPATKGYGYVQFKTRPSAEEAVQRMQGQVIGQQAVRISWSKNPGQDG

SEQ ID NO: 24670 - protein, 307 aa, Arabidopsis thaliana
  peptide (1)..(307): Ceres Seq. ID no. 12422375
  misc_feature (23)..(94): Pfam Name: RNA recognition motif. (a.k.a. RRM, RBD, or RNP domain) Pfam Description: RNA recognition motif. (a.k.a. RRM, RBD, or RNP
  misc_feature (2)..(306): Homolog of NCBI NO: 9294614 NR Description: DNA/RNA binding protein-like [Arabidopsis
  misc_feature (3)..(302): Homolog of NCBI NO: 39545835 NR Description: OSJNBb0060E08.6 [Oryza sativa (japonica
  misc_feature (18)..(303): Homolog of NCBI NO: 40804404 NR Description: DNA-binding protein [Lycopersicon esculentum]
  misc_feature (1)..(303): Homolog of NCBI NO: 9663767 NR Description: RNA Binding Protein 45 [Nicotiana plumbaginifolia]
  misc_feature (18)..(301): Homolog of NCBI NO: 7489112 NR Description: DNA binding protein ACBF - common tobacco
  misc_feature (6)..(303): Homolog of NCBI NO: 40253807 NR Description: putative RNA Binding Protein 45
  misc_feature (18)..(303): Homolog of NCBI NO: 9663769 NR Description: RNA Binding Protein 47 [Nicotiana plumbaginifolia]
  misc_feature (1)..(304): Homolog of NCBI NO: 34896988 NR Description: putative RNA binding protein [Oryza sativa]
  misc_feature (18)..(303): Homolog of NCBI NO: 7489196 NR Description: RNA binding protein homolog - common tobacco
  misc_feature (1)..(306): Homolog of NCBI NO: 15239715 NR Description: RNA binding protein 45 (RBP45), putative
MHPPQPPQGSYHHPQTLEEVRTLWIGDLQYWVDENYLTSCFSQTGELVSVKVIRNKITGQPEGYGFIEFISHAAAERTLQTYNGTQMPGTELTFRLNWASFGSGQKVDAGPDHSIFVGDLAPDVTDYLLQETFRVHYSSVRGAKVVTDPSTGRSKGYGFVKFAEESERNRAMAEMNGLYCSTRPMRISAATPKKNVGVQQQYVTKVTVPSAVAAPVQAYVAPPESDVTCTTISVANLDQNVTEEELKKAFSQLGEVIYVKIPATKGYGYVQFKTRPSAEEAVQRMQGQVIGQQAVRISWSKNPGQDG

SEQ ID NO: 24671 - DNA, 1319 bp, Arabidopsis thaliana
  misc_feature (1)..(1319): Ceres Seq. ID no. 12322279
  misc_feature: MA Experiment ID: 108434 Result: Up-regulated in Transcription
  misc_feature: MA Experiment 108434 PARAMETER Experiment Name: At_Root_Tips_cDNA_P Parameter: Tissue Value: Root Tips
  misc_feature: MA Experiment ID: 108461 Result: Down-regulated in Transcription
  misc_feature: MA Experiment 108461 PARAMETER Experiment Name: At_Germinating_Seeds_cDNA_P Parameter: Age (day) Value: 1 vs. 0
  misc_feature: MA Experiment 108461 PARAMETER Experiment Name: At_Germinating_Seeds_cDNA_P Parameter: Tissue Value: Germinating Seeds
  misc_feature: MA Experiment ID: 108462 Result: Down-regulated in Transcription
  misc_feature: MA Experiment 108462 PARAMETER Experiment Name: At_Germinating_Seeds_cDNA_P Parameter: Age (day) Value: 2 vs. 0
  misc_feature: MA Experiment 108462 PARAMETER Experiment Name: At_Germinating_Seeds_cDNA_P Parameter: Tissue Value: Germinating Seeds
  misc_feature: MA Experiment ID: 108463 Result: Down-regulated in Transcription
  misc_feature: MA Experiment 108463 PARAMETER Experiment Name: At_Germinating_Seeds_cDNA_P Parameter: Age (day) Value: 3 vs. 0
  misc_feature: MA Experiment 108463 PARAMETER Experiment Name: At_Germinating_Seeds_cDNA_P Parameter: Tissue Value: Germinating Seeds
  misc_feature: MA Experiment ID: 108569 Result: Down-regulated in Transcription
  misc_feature: MA Experiment 108569 PARAMETER Experiment Name: At_0.001%_MeJA__cDNA_P Parameter: Timepoint (hr) Value: 6
  misc_feature: MA Experiment 108569 PARAMETER Experiment Name: At_0.001%_MeJA__cDNA_P Parameter: Tissue Value: Aerial
  misc_feature: MA Experiment 108569 PARAMETER Experiment Name: At_0.001%_MeJA__cDNA_P Parameter: Treatment Value: 0.001% MeJA vs. No Treatment
  misc_feature: MA Experiment ID: 20000184 Result: Down-regulated in Transcription
  misc_feature: MA Experiment 20000184 PARAMETER Experiment Name: At_Shoots__P Parameter: Age (day) Value: 7
  misc_feature: MA Experiment 20000184 PARAMETER Experiment Name: At_Shoots__P Parameter: Tissue Value: Shoots vs. Whole Plant
  misc_feature: MA Experiment ID: 20000224 Result: Up-regulated in Transcription
aactccgcaaaaacctctctttctctctctctccgacgatggcttccggtgaccagagcaagaagagaaaacagcattatcgccctcaaaacagaccagtgaagaagaagggatcttaccctttgaagccaggtgttcaaggttttttcatctcttgcgatggcggacgcgaattccaagctgctcaggaagctattaacgtcattgattcctttttcgaggagctaatacaagggactgactcgaaagtgaatcctggtttgtttggtaatccaataaacaaaaaagttacattttcgtatagcgaggatgaggatgaggaggaagatgagagtaataatggcgaggaagaggaaaacaaaggagatggggataaggcagtagtgagtgaaggcggtaatgatctagtgaatgagaaagaaatagctagtgaaggagttaatgatcaagtgaatgagaaagaaatagcaagtgaagggtcatgtgaagtcaaacaattggcagaaaatgagactgtaaaagaggaagaagataaagggaatcagaagaatggtggagatgaacctcctagaaagaagacgtgtacggaagaagcaaatcctttagcaaaagtaaacgaaaatgcagagaagtctattgataagttgattgaagctgaactaaaagaacttggagacaagagtaagagacggttcatgaagttagatccgggttgcaacggtctggtcttcatccaaatgaaaaagagagatggtgacccaagtcccaaagaaattgtacagcatgctatgacttctgctgctgcaacaaaaaagcatatgtcaaggttcatcctaagacttctaccaattgaagtgtcgtgttacccttcagaggaagaaatttcaagagccatcaagccgcttgtagaacagtacttccccattgagaccgaaaatccccggaaatttgctgtgttgtatggagcgcgtgctaacacagggcttgataggatgaaaataataaacacgatcgccaaatctattcctgcccctcacaaagttgatttgagcaatccggagatgacgatcgtggtggaaattattaagacagtgtgcttaattggagtggtagagaagtacaaggagctagcaaagtacaacctcaggcagctcacgtcgaccaattgacacatcttcttttatctttaactatgtttcgtttcttaagactgaagatgcttttgtgtttagtgttacagagtttctggcttaacttattaaaatggctgaagttgccctttatactctctttggtctgatcaataaagttttttcttt

SEQ ID NO: 24672 - protein, 388 aa, Arabidopsis thaliana
  peptide (1)..(388): Ceres Seq. ID no. 12322280
  misc_feature (279)..(371): Pfam Name: THUMP domain Pfam Description: THUMP domain
  misc_feature (168)..(387): Homolog of NCBI NO: 34859071 NR Description: similar to RIKEN cDNA 6330575P11 [Rattus
  misc_feature (168)..(387): Homolog of NCBI NO: 21704176 NR Description: RIKEN cDNA 6330575P11; similar to hypothetical
  misc_feature (151)..(388): Homolog of NCBI NO: 38174056 NR Description: Unknown (protein for MGC:75804) [Silurana
  misc_feature (229)..(387): Homolog of NCBI NO: 2988398 NR Description: Unknown gene product [Homo sapiens]
  misc_feature (168)..(387): Homolog of NCBI NO: 12653357 NR Description: hypothetical protein FLJ20274 [Homo sapiens]
  misc_feature (168)..(387): Homolog of NCBI NO: 8923247 NR Description: hypothetical protein FLJ20274 [Homo sapiens]
  misc_feature (168)..(386): Homolog of NCBI NO: 24657540 NR Description: CG15014-PA [Drosophila melanogaster]
  misc_feature (168)..(387): Homolog of NCBI NO: 34365206 NR Description: hypothetical protein [Homo sapiens]
  misc_feature (188)..(386): Homolog of NCBI NO: 31198447 NR Description: ENSANGP00000021551 [Anopheles gambiae]
  misc_feature (13)..(388): Homolog of NCBI NO: 18416857 NR Description: putative protein; protein id: At5g12410.1
LRKNLSFSLSPTMASGDQSKKRKQHYRPQNRPVKKKGSYPLKPGVQGFFISCDGGREFQAAQEAINVIDSFFEELIQGTDSKVNPGLFGNPINKKVTFSYSEDEDEEEDESNNGEEEENKGDGDKAVVSEGGNDLVNEKEIASEGVNDQVNEKEIASEGSCEVKQLAENETVKEEEDKGNQKNGGDEPPRKKTCTEEANPLAKVNENAEKSIDKLIEAELKELGDKSKRRFMKLDPGCNGLVFIQMKKRDGDPSPKEIVQHAMTSAAATKKHMSRFILRLLPIEVSCYPSEEEISRAIKPLVEQYFPIETENPRKFAVLYGARANTGLDRMKIINTIAKSIPAPHKVDLSNPEMTIVVEIIKTVCLIGVVEKYKELAKYNLRQLTSTN

SEQ ID NO: 24673 - protein, 376 aa, Arabidopsis thaliana
  peptide (1)..(376): Ceres Seq. ID no. 12322281
  misc_feature (267)..(359): Pfam Name: THUMP domain Pfam Description: THUMP domain
  misc_feature (156)..(375): Homolog of NCBI NO: 34365206 NR Description: hypothetical protein [Homo sapiens]
  misc_feature (217)..(375): Homolog of NCBI NO: 2988398 NR Description: Unknown gene product [Homo sapiens]
  misc_feature (156)..(374): Homolog of NCBI NO: 24657540 NR Description: CG15014-PA [Drosophila melanogaster]
  misc_feature (156)..(375): Homolog of NCBI NO: 12653357 NR Description: hypothetical protein FLJ20274 [Homo sapiens]
  misc_feature (156)..(375): Homolog of NCBI NO: 8923247 NR Description: hypothetical protein FLJ20274 [Homo sapiens]
  misc_feature (156)..(375): Homolog of NCBI NO: 34859071 NR Description: similar to RIKEN cDNA 6330575P11 [Rattus
  misc_feature (156)..(375): Homolog of NCBI NO: 21704176 NR Description: RIKEN cDNA 6330575P11; similar to hypothetical
  misc_feature (139)..(376): Homolog of NCBI NO: 38174056 NR Description: Unknown (protein for MGC:75804) [Silurana
  misc_feature (176)..(374): Homolog of NCBI NO: 31198447 NR Description: ENSANGP00000021551 [Anopheles gambiae]
  misc_feature (1)..(376): Homolog of NCBI NO: 18416857 NR Description: putative protein; protein id: At5g12410.1
MASGDQSKKRKQHYRPQNRPVKKKGSYPLKPGVQGFFISCDGGREFQAAQEAINVIDSFFEELIQGTDSKVNPGLFGNPINKKVTFSYSEDEDEEEDESNNGEEEENKGDGDKAVVSEGGNDLVNEKEIASEGVNDQVNEKEIASEGSCEVKQLAENETVKEEEDKGNQKNGGDEPPRKKTCTEEANPLAKVNENAEKSIDKLIEAELKELGDKSKRRFMKLDPGCNGLVFIQMKKRDGDPSPKEIVQHAMTSAAATKKHMSRFILRLLPIEVSCYPSEEEISRAIKPLVEQYFPIETENPRKFAVLYGARANTGLDRMKIINTIAKSIPAPHKVDLSNPEMTIVVEIIKTVCLIGVVEKYKELAKYNLRQLTSTN

SEQ ID NO: 24674 - DNA, 1181 bp, Arabidopsis thaliana
  misc_feature (1)..(1181): Ceres Seq. ID no. 13497345
  misc_feature: MA Experiment ID: 108434 Result: Down-regulated in Transcription
  misc_feature: MA Experiment 108434 PARAMETER Experiment Name: At_Root_Tips_cDNA_P Parameter: Tissue Value: Root Tips
  misc_feature: MA Experiment ID: 108595 Result: Down-regulated in Transcription
  misc_feature: MA Experiment 108595 PARAMETER Experiment Name: At_Ler-pi_Ovule_cDNA_P Parameter: Plant Line Value: null
  misc_feature: MA Experiment ID: 20000111 Result: Down-regulated in Transcription
  misc_feature: MA Experiment 20000111 PARAMETER Experiment Name: At_42deg_Heat_cDNA_P Parameter: Temperature (deg C) Value: 42 vs. 22
  misc_feature: MA Experiment 20000111 PARAMETER Experiment Name: At_42deg_Heat_cDNA_P Parameter: Timepoint (hr) Value: 6
  misc_feature: MA Experiment 20000111 PARAMETER Experiment Name: At_42deg_Heat_cDNA_P Parameter: Tissue Value: Aerial
  misc_feature: MA Experiment ID: 20000113 Result: Down-regulated in Transcription
  misc_feature: MA Experiment 20000113 PARAMETER Experiment Name: At_42deg_Heat_cDNA_P Parameter: Temperature (deg C) Value: 42 vs. 22
  misc_feature: MA Experiment 20000113 PARAMETER Experiment Name: At_42deg_Heat_cDNA_P Parameter: Timepoint (hr) Value: 8
  misc_feature: MA Experiment 20000113 PARAMETER Experiment Name: At_42deg_Heat_cDNA_P Parameter: Tissue Value: Aerial
aaaccagaattattaaatttgatttcagtggatataaatttctctcaagaaaacgacattaacgaaggagagccaaagcttcgtcgttgatcattcctccgtagttgcggaattgaacccaacttaggaatcaaatgcccaagatctgctgctctcgttccgctacacaagttgtggtagcacaaaaatcaaactcgggtaaaggaagaaacggtgaaggaggaatcaagtatggatttagtttgataaaagggaaatctaaccattcaatggaggattatcatgttgctaagtttaccaatttcaatggcaatgaattggggctttttgcaatctttgatggtcataaaggtgatcatgttgctgcttatctgcagaaacatctcttctctaatatccttaaagatggagagttcttggttgatcctcgaagagcaattgcgaaagcttatgagaatacagatcaaaagattttagcagataatagaacggatttagagagtggtggttcgactgctgtgactgcgattttgatcaatgggaaagctttgtggatagctaatgttggtgattcacgagctattgtttctagtcgaggtaaagcaaaacagatgagtgttgatcatgatcctgatgatgatactgagaggagtatgattgagagtaaaggtggatttgtgaccaacagaccgtgatgttcctcgagtgaacggtttgttagcggtctctcgtgtctttggagataaaaaccttaaagcatatttgaactcagagcctgagattaaggacgtaaccattgatagtcacacagattttcttattctggctagtgacggtatttcgaaggtgatgtcaaaccaagaagcagttgatgtagctaagaagttgaaagatccaaaggaagcggcgaggcaagtagttgctgaagcattgaaaagaaacagcaaggatgacatatcttgcattgttgtccggtttagatgataaccaagaagactcagcttatattggatttggagcttcctttgcttaccatgattcttttggggtccggtttagtttgattctgggtcttggttacttgtgcatttttaagaacatgagtttgaataggactattatatattactagtttgacaaaccagatattttatcatataaattacatgaaaagaatagcc

SEQ ID NO: 24675 - protein, 186 aa, Arabidopsis thaliana
  peptide (1)..(186): Ceres Seq. ID no. 13497346
  misc_feature (33)..(186): Pfam Name: Protein phosphatase 2C Pfam Description: Protein phosphatase 2C
  misc_feature (21)..(186): Homolog of NCBI NO: 23307574 NR Description: putative protein phosphatase 2C homolog
  misc_feature (46)..(186): Homolog of NCBI NO: 38567903 NR Description: OSJNBa0060N03.23 [Oryza sativa (japonica
  misc_feature (19)..(186): Homolog of NCBI NO: 18399423 NR Description: protein phosphatase 2C (PP2C), putative
  misc_feature (22)..(186): Homolog of NCBI NO: 18417190 NR Description: protein phosphatase 2C (PP2C), putative
  misc_feature (1)..(186): Homolog of NCBI NO: 15218759 NR Description: protein phosphatase 2C (PP2C), putative
  misc_feature (1)..(186): Homolog of NCBI NO: 21537096 NR Description: protein phosphatase type 2C, putative
  misc_feature (1)..(186): Homolog of NCBI NO: 18395099 NR Description: protein phosphatase 2C (PP2C), putative
  misc_feature (46)..(186): Homolog of NCBI NO: 25406547 NR Description: hypothetical protein T11I11.14 [imported] -
  misc_feature (1)..(186): Homolog of NCBI NO: 15081703 NR Description: At1g78200/T11I11_14 [Arabidopsis thaliana]
  misc_feature (1)..(186): Homolog of NCBI NO: 18411863 NR Description: protein phosphatase 2C (PP2C), putative
MPKICCSRSATQVVVAQKSNSGKGRNGEGGIKYGFSLIKGKSNHSMEDYHVAKFTNFNGNELGLFAIFDGHKGDHVAAYLQKHLFSNILKDGEFLVDPRRAIAKAYENTDQKILADNRTDLESGGSTAVTAILINGKALWIANVGDSRAIVSSRGKAKQMSVDHDPDDDTERSMIESKGGFVTNRP

SEQ ID NO: 24676 - protein, 141 aa, Arabidopsis thaliana
  peptide (1)..(141): Ceres Seq. ID no. 13497347
  misc_feature (1)..(141): Pfam Name: Protein phosphatase 2C Pfam Description: Protein phosphatase 2C
  misc_feature (1)..(141): Homolog of NCBI NO: 23307574 NR Description: putative protein phosphatase 2C homolog
  misc_feature (1)..(141): Homolog of NCBI NO: 38567903 NR Description: OSJNBa0060N03.23 [Oryza sativa (japonica
  misc_feature (1)..(141): Homolog of NCBI NO: 18399423 NR Description: protein phosphatase 2C (PP2C), putative
  misc_feature (1)..(141): Homolog of NCBI NO: 18417190 NR Description: protein phosphatase 2C (PP2C), putative
  misc_feature (1)..(141): Homolog of NCBI NO: 15218759 NR Description: protein phosphatase 2C (PP2C), putative
  misc_feature (1)..(141): Homolog of NCBI NO: 21537096 NR Description: protein phosphatase type 2C, putative
  misc_feature (1)..(141): Homolog of NCBI NO: 18395099 NR Description: protein phosphatase 2C (PP2C), putative
  misc_feature (1)..(141): Homolog of NCBI NO: 25406547 NR Description: hypothetical protein T11I11.14 [imported] -
  misc_feature (1)..(141): Homolog of NCBI NO: 15081703 NR Description: At1g78200/T11I11_14 [Arabidopsis thaliana]
  misc_feature (1)..(141): Homolog of NCBI NO: 18411863 NR Description: protein phosphatase 2C (PP2C), putative
MEDYHVAKFTNFNGNELGLFAIFDGHKGDHVAAYLQKHLFSNILKDGEFLVDPRRAIAKAYENTDQKILADNRTDLESGGSTAVTAILINGKALWIANVGDSRAIVSSRGKAKQMSVDHDPDDDTERSMIESKGGFVTNRP

SEQ ID NO: 24677 - DNA, 1076 bp, Arabidopsis thaliana
  misc_feature (1)..(1076): Ceres Seq. ID no. 12481800
  misc_feature: MA Experiment ID: 20000179 Result: Up-regulated in Transcription
  misc_feature: MA Experiment 20000179 PARAMETER Experiment Name: At_Germinating_Seeds_P Parameter: Age (hr) Value: 6 vs. 0
  misc_feature: MA Experiment 20000179 PARAMETER Experiment Name: At_Germinating_Seeds_P Parameter: Tissue Value: Germinating Seeds
  misc_feature: MA Experiment ID: 20000180 Result: Up-regulated in Transcription
  misc_feature: MA Experiment 20000180 PARAMETER Experiment Name: At_Germinating_Seeds_P Parameter: Age (hr) Value: 24 vs. 0
  misc_feature: MA Experiment 20000180 PARAMETER Experiment Name: At_Germinating_Seeds_P Parameter: Tissue Value: Germinating Seeds
  misc_feature: MA Experiment ID: 20000224 Result: Down-regulated in Transcription
atttctaatttcatgcttattagatcgttaattgaatctgcatcccgcagtgatcattctttgatttacgaatttgtttttttgttgtgattgaaaatcttgttgtcgatttttgtcaattttatggtttaatttacaaagtgtatattgtgattgaatcgactgggagggtattgagagttgtttgtttgaatctaacaaattcaagtgcaaatctattttatagccacttatcttctgctagtagatctacttgagttttaagagatgtgacttctttaataccattgtgaatttcatggctaactgataaaaaggtctcagctctgatcttttgattcaacggctcccggagacgacggaagcaatgcagttcttcggtggatctgagattagtccgtcgccgccagttccgacggcgagtggaaacaacgcgcacatgatgtacgttttcaatcgtaacggtgtatgtcttctctacaaagaatggaatcggcctcttcatacacttaatcctcagcaagatcacaagctcatgtttggtcttctcttctctctcaaatctctcaccgctaagatggatccagtcaatgcggataaaggaaatcttggggttccacagttgccaggacaaggttgctctttccatagtttccgtacgaatacttacaagctaagtttcatggagactccctctggtattaagattatcttagtaactcatccaaagaccggagatttacgcgaatccttgaagtacatctacagtttatacgttgaatatgtcgtaaaaaatcctatatacagcccaggatctccaatcaagtcggagttgttcaacactgcacttgaccagtacgtaaggagcatctcttagtgtgtgcattacagatttgtccattggaacttctctccttcaacagaactatcgtctgaacaatctctgaaaagaagagagaattgtagtagagagatttatcttgagttcgactgttttctctgcaaatctatgtttcgtttaccctttttattaactccactgtattggcttgctatcaatgatgttcatggtttac

SEQ ID NO: 24678 - protein, 169 aa, Arabidopsis thaliana
  peptide (1)..(169): Ceres Seq. ID no. 12481801
  misc_feature (23)..(168): Pfam Name: Sybindin-like family Pfam Description: Sybindin-like family
  misc_feature (24)..(167): Homolog of NCBI NO: 19113462 NR Description: hypothetical protein [Schizosaccharomyces pombe]
  misc_feature (93)..(169): Homolog of NCBI NO: 19115000 NR Description: conserved hypothetical protein
  misc_feature (53)..(168): Homolog of NCBI NO: 40740926 NR Description: hypothetical protein AN8828.2 [Aspergillus
  misc_feature (24)..(169): Homolog of NCBI NO: 19114985 NR Description: hypothetical protein [Schizosaccharomyces pombe]
  misc_feature (49)..(168): Homolog of NCBI NO: 28828451 NR Description: similar to Homo sapiens (Human). MUM2 protein
  misc_feature (26)..(166): Homolog of NCBI NO: 24651330 NR Description: CG1359-PA [Drosophila melanogaster]
  misc_feature (24)..(168): Homolog of NCBI NO: 10864021 NR Description: MUM2 protein [Homo sapiens]
  misc_feature (24)..(168): Homolog of NCBI NO: 20881775 NR Description: similar to MUM2 protein [Homo sapiens] [Mus
  misc_feature (8)..(168): Homolog of NCBI NO: 34914656 NR Description: P0504D03.19 [Oryza sativa (japonica
  misc_feature (1)..(169): Homolog of NCBI NO: 15223752 NR Description: unknown protein; protein id: At1g51160.1
MQFFGGSEISPSPPVPTASGNNAHMMYVFNRNGVCLLYKEWNRPLHTLNPQQDHKLMFGLLFSLKSLTAKMDPVNADKGNLGVPQLPGQGCSFHSFRTNTYKLSFMETPSGIKIILVTHPKTGDLRESLKYIYSLYVEYVVKNPIYSPGSPIKSELFNTALDQYVRSIS

SEQ ID NO: 24679 - protein, 145 aa, Arabidopsis thaliana
  peptide (1)..(145): Ceres Seq. ID no. 12481802
  misc_feature (1)..(144): Pfam Name: Sybindin-like family Pfam Description: Sybindin-like family
  misc_feature (1)..(143): Homolog of NCBI NO: 19113462 NR Description: hypothetical protein [Schizosaccharomyces pombe]
  misc_feature (69)..(145): Homolog of NCBI NO: 19115000 NR Description: conserved hypothetical protein
  misc_feature (29)..(144): Homolog of NCBI NO: 40740926 NR Description: hypothetical protein AN8828.2 [Aspergillus
  misc_feature (1)..(145): Homolog of NCBI NO: 19114985 NR Description: hypothetical protein [Schizosaccharomyces pombe]
  misc_feature (25)..(144): Homolog of NCBI NO: 28828451 NR Description: similar to Homo sapiens (Human). MUM2 protein
  misc_feature (2)..(142): Homolog of NCBI NO: 24651330 NR Description: CG1359-PA [Drosophila melanogaster]
  misc_feature (1)..(144): Homolog of NCBI NO: 10864021 NR Description: MUM2 protein [Homo sapiens]
  misc_feature (1)..(144): Homolog of NCBI NO: 20881775 NR Description: similar to MUM2 protein [Homo sapiens] [Mus
  misc_feature (1)..(144): Homolog of NCBI NO: 34914656 NR Description: P0504D03.19 [Oryza sativa (japonica
  misc_feature (1)..(145): Homolog of NCBI NO: 15223752 NR Description: unknown protein; protein id: At1g51160.1
MMYVFNRNGVCLLYKEWNRPLHTLNPQQDHKLMFGLLFSLKSLTAKMDPVNADKGNLGVPQLPGQGCSFHSFRTNTYKLSFMETPSGIKIILVTHPKTGDLRESLKYIYSLYVEYVVKNPIYSPGSPIKSELFNTALDQYVRSIS

SEQ ID NO: 24680 - protein, 144 aa, Arabidopsis thaliana
  peptide (1)..(144): Ceres Seq. ID no. 12481803
  misc_feature (1)..(143): Pfam Name: Sybindin-like family Pfam Description: Sybindin-like family
  misc_feature (1)..(142): Homolog of NCBI NO: 19113462 NR Description: hypothetical protein [Schizosaccharomyces pombe]
  misc_feature (68)..(144): Homolog of NCBI NO: 19115000 NR Description: conserved hypothetical protein
  misc_feature (28)..(143): Homolog of NCBI NO: 40740926 NR Description: hypothetical protein AN8828.2 [Aspergillus
  misc_feature (1)..(144): Homolog of NCBI NO: 19114985 NR Description: hypothetical protein [Schizosaccharomyces pombe]
  misc_feature (24)..(143): Homolog of NCBI NO: 28828451 NR Description: similar to Homo sapiens (Human). MUM2 protein
  misc_feature (1)..(141): Homolog of NCBI NO: 24651330 NR Description: CG1359-PA [Drosophila melanogaster]
  misc_feature (1)..(143): Homolog of NCBI NO: 10864021 NR Description: MUM2 protein [Homo sapiens]
  misc_feature (1)..(143): Homolog of NCBI NO: 20881775 NR Description: similar to MUM2 protein [Homo sapiens] [Mus
  misc_feature (1)..(143): Homolog of NCBI NO: 34914656 NR Description: P0504D03.19 [Oryza sativa (japonica
  misc_feature (1)..(144): Homolog of NCBI NO: 15223752 NR Description: unknown protein; protein id: At1g51160.1
MYVFNRNGVCLLYKEWNRPLHTLNPQQDHKLMFGLLFSLKSLTAKMDPVNADKGNLGVPQLPGQGCSFHSFRTNTYKLSFMETPSGIKIILVTHPKTGDLRESLKYIYSLYVEYVVKNPIYSPGSPIKSELFNTALDQYVRSIS

SEQ ID NO: 24681 - DNA, 1272 bp, Arabidopsis thaliana
  misc_feature (1)..(1272): Ceres Seq. ID no. 12393055
  misc_feature: MA Experiment ID: 20000166 Result: Up-regulated in Transcription
  misc_feature: MA Experiment 20000166 PARAMETER Experiment Name: At_100uM_ABA_P Parameter: Age (day) Value: 14
  misc_feature: MA Experiment 20000166 PARAMETER Experiment Name: At_100uM_ABA_P Parameter: Organism Value: A. thaliana
  misc_feature: MA Experiment 20000166 PARAMETER Experiment Name: At_100uM_ABA_P Parameter: Plant Line Value: WS
  misc_feature: MA Experiment 20000166 PARAMETER Experiment Name: At_100uM_ABA_P Parameter: Timepoint (hr) Value: 1
  misc_feature: MA Experiment 20000166 PARAMETER Experiment Name: At_100uM_ABA_P Parameter: Tissue Value: Aerial
  misc_feature: MA Experiment 20000166 PARAMETER Experiment Name: At_100uM_ABA_P Parameter: Treatment Value: 100uM ABA vs. No Treatment
  misc_feature: MA Experiment ID: 20000169 Result: Up-regulated in Transcription
  misc_feature: MA Experiment 20000169 PARAMETER Experiment Name: At_100uM_ABA_P Parameter: Age (day) Value: 14
  misc_feature: MA Experiment 20000169 PARAMETER Experiment Name: At_100uM_ABA_P Parameter: Organism Value: A. thaliana
  misc_feature: MA Experiment 20000169 PARAMETER Experiment Name: At_100uM_ABA_P Parameter: Plant Line Value: WS
  misc_feature: MA Experiment 20000169 PARAMETER Experiment Name: At_100uM_ABA_P Parameter: Timepoint (hr) Value: 6
  misc_feature: MA Experiment 20000169 PARAMETER Experiment Name: At_100uM_ABA_P Parameter: Tissue Value: Aerial
  misc_feature: MA Experiment 20000169 PARAMETER Experiment Name: At_100uM_ABA_P Parameter: Treatment Value: 100uM ABA vs. No Treatment
  misc_feature: MA Experiment ID: 20000184 Result: Up-regulated in Transcription
  misc_feature: MA Experiment 20000184 PARAMETER Experiment Name: At_Shoots__P Parameter: Age (day) Value: 7
  misc_feature: MA Experiment 20000184 PARAMETER Experiment Name: At_Shoots__P Parameter: Tissue Value: Shoots vs. Whole Plant
  misc_feature: MA Experiment ID: 20000185 Result: Down-regulated in Transcription
  misc_feature: MA Experiment 20000185 PARAMETER Experiment Name: At_Roots__P Parameter: Age (day) Value: 7 vs. 21
  misc_feature: MA Experiment 20000185 PARAMETER Experiment Name: At_Roots__P Parameter: Organism Value: A. thaliana
  misc_feature: MA Experiment 20000185 PARAMETER Experiment Name: At_Roots__P Parameter: Tissue Value: Roots vs. Whole Plant
  misc_feature: MA Experiment ID: 20000264 Result: Up-regulated in Transcription
  misc_feature: MA Experiment 20000264 PARAMETER Experiment Name: At_Open_Flower_P Parameter: Age (day) Value: 21
  misc_feature: MA Experiment 20000264 PARAMETER Experiment Name: At_Open_Flower_P Parameter: Plant Line Value: WS
  misc_feature: MA Experiment 20000264 PARAMETER Experiment Name: At_Open_Flower_P Parameter: Tissue Value: Open Flower vs. Whole Plant
  misc_feature: MA Experiment ID: 20000267 Result: Up-regulated in Transcription
  misc_feature: MA Experiment 20000267 PARAMETER Experiment Name: At_Drought_P Parameter: Age (day) Value: 7
  misc_feature: MA Experiment 20000267 PARAMETER Experiment Name: At_Drought_P Parameter: Organism Value: A. thaliana
  misc_feature: MA Experiment 20000267 PARAMETER Experiment Name: At_Drought_P Parameter: Plant Line Value: WS
  misc_feature: MA Experiment 20000267 PARAMETER Experiment Name: At_Drought_P Parameter: Timepoint (hr) Value: 6
  misc_feature: MA Experiment 20000267 PARAMETER Experiment Name: At_Drought_P Parameter: Tissue Value: Whole Plant
  misc_feature: MA Experiment 20000267 PARAMETER Experiment Name: At_Drought_P Parameter: Treatment Value: Drought vs. No Drought
  misc_feature: MA Experiment ID: 20000268 Result: Up-regulated in Transcription
  misc_feature: MA Experiment 20000268 PARAMETER Experiment Name: At_100mM_NaCl__P Parameter: Age (day) Value: 14
  misc_feature: MA Experiment 20000268 PARAMETER Experiment Name: At_100mM_NaCl__P Parameter: Organism Value: A. thaliana
  misc_feature: MA Experiment 20000268 PARAMETER Experiment Name: At_100mM_NaCl__P Parameter: Plant Line Value: WS
  misc_feature: MA Experiment 20000268 PARAMETER Experiment Name: At_100mM_NaCl__P Parameter: Timepoint (hr) Value: 6
  misc_feature: MA Experiment 20000268 PARAMETER Experiment Name: At_100mM_NaCl__P Parameter: Tissue Value: Whole Plant
  misc_feature: MA Experiment 20000268 PARAMETER Experiment Name: At_100mM_NaCl__P Parameter: Treatment Value: 100mM NaCl vs. No Treatment
  misc_feature: MA Experiment ID: 20000436 Result: Up-regulated in Transcription
  misc_feature: MA Experiment 20000436 PARAMETER Experiment Name: At_Drought_P Parameter: Age (day) Value: 7
  misc_feature: MA Experiment 20000436 PARAMETER Experiment Name: At_Drought_P Parameter: Organism Value: A. thaliana
  misc_feature: MA Experiment 20000436 PARAMETER Experiment Name: At_Drought_P Parameter: Plant Line Value: WS
  misc_feature: MA Experiment 20000436 PARAMETER Experiment Name: At_Drought_P Parameter: Timepoint (hr) Value: 12
  misc_feature: MA Experiment 20000436 PARAMETER Experiment Name: At_Drought_P Parameter: Tissue Value: Whole Plant
  misc_feature: MA Experiment 20000436 PARAMETER Experiment Name: At_Drought_P Parameter: Treatment Value: Drought vs. No Drought
  misc_feature: MA Experiment ID: 20000439 Result: Down-regulated in Transcription
  misc_feature: MA Experiment 20000439 PARAMETER Experiment Name: At_Roots__P Parameter: Age (day) Value: 14 vs. 21
  misc_feature: MA Experiment 20000439 PARAMETER Experiment Name: At_Roots__P Parameter: Organism Value: A. thaliana
  misc_feature: MA Experiment 20000439 PARAMETER Experiment Name: At_Roots__P Parameter: Tissue Value: Roots vs. Whole Plant
  misc_feature: MA Experiment ID: 20000453 Result: Up-regulated in Transcription
  misc_feature: MA Experiment 20000453 PARAMETER Experiment Name: At_100uM_ABA_P Parameter: Age (day) Value: 15
  misc_feature: MA Experiment 20000453 PARAMETER Experiment Name: At_100uM_ABA_P Parameter: Organism Value: A. thaliana
  misc_feature: MA Experiment 20000453 PARAMETER Experiment Name: At_100uM_ABA_P Parameter: Plant Line Value: WS
  misc_feature: MA Experiment 20000453 PARAMETER Experiment Name: At_100uM_ABA_P Parameter: Timepoint (hr) Value: 24
  misc_feature: MA Experiment 20000453 PARAMETER Experiment Name: At_100uM_ABA_P Parameter: Tissue Value: Aerial
  misc_feature: MA Experiment 20000453 PARAMETER Experiment Name: At_100uM_ABA_P Parameter: Treatment Value: 100uM ABA vs. No Treatment
  misc_feature: MA Experiment ID: 20000455 Result: Up-regulated in Transcription
  misc_feature: MA Experiment 20000455 PARAMETER Experiment Name: At_100uM_ABA_P Parameter: Age (day) Value: 16
  misc_feature: MA Experiment 20000455 PARAMETER Experiment Name: At_100uM_ABA_P Parameter: Organism Value: A. thaliana
  misc_feature: MA Experiment 20000455 PARAMETER Experiment Name: At_100uM_ABA_P Parameter: Plant Line Value: WS
  misc_feature: MA Experiment 20000455 PARAMETER Experiment Name: At_100uM_ABA_P Parameter: Timepoint (hr) Value: 48
  misc_feature: MA Experiment 20000455 PARAMETER Experiment Name: At_100uM_ABA_P Parameter: Tissue Value: Aerial
  misc_feature: MA Experiment 20000455 PARAMETER Experiment Name: At_100uM_ABA_P Parameter: Treatment Value: 100uM ABA vs. No Treatment
  misc_feature: MA Experiment ID: 20000460 Result: Up-regulated in Transcription
  misc_feature: MA Experiment 20000460 PARAMETER Experiment Name: At_10percent_PEG_P Parameter: Age (day) Value: 12
  misc_feature: MA Experiment 20000460 PARAMETER Experiment Name: At_10percent_PEG_P Parameter: Organism Value: A. thaliana
  misc_feature: MA Experiment 20000460 PARAMETER Experiment Name: At_10percent_PEG_P Parameter: Plant Line Value: WS
  misc_feature: MA Experiment 20000460 PARAMETER Experiment Name: At_10percent_PEG_P Parameter: Timepoint (day) Value: 12
  misc_feature: MA Experiment 20000460 PARAMETER Experiment Name: At_10percent_PEG_P Parameter: Tissue Value: Whole Plant
  misc_feature: MA Experiment 20000460 PARAMETER Experiment Name: At_10percent_PEG_P Parameter: Treatment Value: 10percent PEG vs. No Treatment
  misc_feature: MA Experiment ID: 20000794 Result: Up-regulated in Transcription
  misc_feature: MA Experiment 20000794 PARAMETER Experiment Name: At_Petals_P Parameter: Age (day) Value: 23-25 days
  misc_feature: MA Experiment 20000794 PARAMETER Experiment Name: At_Petals_P Parameter: Plant Line Value: WS
  misc_feature: MA Experiment 20000794 PARAMETER Experiment Name: At_Petals_P Parameter: Tissue Value: Petals vs. Whole plant
  misc_feature: MA Experiment ID: 20001247 Result: Up-regulated in Transcription
  misc_feature: MA Experiment 20001247 PARAMETER Experiment Name: At_Far-red-induction_P Parameter: Age (day) Value: 7
  misc_feature: MA Experiment 20001247 PARAMETER Experiment Name: At_Far-red-induction_P Parameter: Light Value: Far-red vs. White
  misc_feature: MA Experiment 20001247 PARAMETER Experiment Name: At_Far-red-induction_P Parameter: Organism Value: A. thaliana
  misc_feature: MA Experiment 20001247 PARAMETER Experiment Name: At_Far-red-induction_P Parameter: Plant Line Value: Columbia
  misc_feature: MA Experiment 20001247 PARAMETER Experiment Name: At_Far-red-induction_P Parameter: Timepoint (hr) Value: 1
  misc_feature: MA Experiment 20001247 PARAMETER Experiment Name: At_Far-red-induction_P Parameter: Tissue Value: Whole Plant
  misc_feature: MA Experiment ID: 20001248 Result: Down-regulated in Transcription
  misc_feature: MA Experiment 20001248 PARAMETER Experiment Name: At_Far-red-induction_P Parameter: Age (day) Value: 7
  misc_feature: MA Experiment 20001248 PARAMETER Experiment Name: At_Far-red-induction_P Parameter: Light Value: Far-red vs. White
  misc_feature: MA Experiment 20001248 PARAMETER Experiment Name: At_Far-red-induction_P Parameter: Organism Value: A. thaliana
  misc_feature: MA Experiment 20001248 PARAMETER Experiment Name: At_Far-red-induction_P Parameter: Plant Line Value: Columbia
  misc_feature: MA Experiment 20001248 PARAMETER Experiment Name: At_Far-red-induction_P Parameter: Timepoint (hr) Value: 4
  misc_feature: MA Experiment 20001248 PARAMETER Experiment Name: At_Far-red-induction_P Parameter: Tissue Value: Whole Plant
  misc_feature: MA Experiment ID: 20001451 Result: Up-regulated in Transcription
  misc_feature: MA Experiment 20001451 PARAMETER Experiment Name: At_Far-red-induction_P Parameter: Age (day) Value: 7
  misc_feature: MA Experiment 20001451 PARAMETER Experiment Name: At_Far-red-induction_P Parameter: Light Value: Far-red vs. White
  misc_feature: MA Experiment 20001451 PARAMETER Experiment Name: At_Far-red-induction_P Parameter: Organism Value: A. thaliana
  misc_feature: MA Experiment 20001451 PARAMETER Experiment Name: At_Far-red-induction_P Parameter: Plant Line Value: Columbia
  misc_feature: MA Experiment 20001451 PARAMETER Experiment Name: At_Far-red-induction_P Parameter: Timepoint (hr) Value: 24
  misc_feature: MA Experiment 20001451 PARAMETER Experiment Name: At_Far-red-induction_P Parameter: Tissue Value: Whole Plant
  misc_feature: MA Experiment ID: 20001554 Result: Up-regulated in Transcription
  misc_feature: MA Experiment 20001554 PARAMETER Experiment Name: At_Drought_Soil_Dry_P Parameter: Age (day) Value: 21
  misc_feature: MA Experiment 20001554 PARAMETER Experiment Name: At_Drought_Soil_Dry_P Parameter: Organism Value: A. thaliana
  misc_feature: MA Experiment 20001554 PARAMETER Experiment Name: At_Drought_Soil_Dry_P Parameter: Plant Line Value: WS
  misc_feature: MA Experiment 20001554 PARAMETER Experiment Name: At_Drought_Soil_Dry_P Parameter: Post Timepoint (hr) Value: None
  misc_feature: MA Experiment 20001554 PARAMETER Experiment Name: At_Drought_Soil_Dry_P Parameter: Post-Treatment Value: None
  misc_feature: MA Experiment 20001554 PARAMETER Experiment Name: At_Drought_Soil_Dry_P Parameter: Timepoint (day) Value: 7
  misc_feature: MA Experiment 20001554 PARAMETER Experiment Name: At_Drought_Soil_Dry_P Parameter: Treatment Value: Drought vs. No Drought
  misc_feature: MA Experiment ID: 20001555 Result: Up-regulated in Transcription
  misc_feature: MA Experiment 20001555 PARAMETER Experiment Name: At_Drought_Soil_Dry_P Parameter: Age (day) Value: 24
  misc_feature: MA Experiment 20001555 PARAMETER Experiment Name: At_Drought_Soil_Dry_P Parameter: Organism Value: A. thaliana
  misc_feature: MA Experiment 20001555 PARAMETER Experiment Name: At_Drought_Soil_Dry_P Parameter: Plant Line Value: WS
  misc_feature: MA Experiment 20001555 PARAMETER Experiment Name: At_Drought_Soil_Dry_P Parameter: Post Timepoint (hr) Value: None
  misc_feature: MA Experiment 20001555 PARAMETER Experiment Name: At_Drought_Soil_Dry_P Parameter: Post-Treatment Value: None
  misc_feature: MA Experiment 20001555 PARAMETER Experiment Name: At_Drought_Soil_Dry_P Parameter: Timepoint (day) Value: 10
  misc_feature: MA Experiment 20001555 PARAMETER Experiment Name: At_Drought_Soil_Dry_P Parameter: Treatment Value: Drought vs. No Drought
  misc_feature: MA Experiment ID: 20001556 Result: Up-regulated in Transcription
  misc_feature: MA Experiment 20001556 PARAMETER Experiment Name: At_Drought_Soil_Dry_P Parameter: Age (day) Value: 26
  misc_feature: MA Experiment 20001556 PARAMETER Experiment Name: At_Drought_Soil_Dry_P Parameter: Organism Value: A. thaliana
  misc_feature: MA Experiment 20001556 PARAMETER Experiment Name: At_Drought_Soil_Dry_P Parameter: Plant Line Value: WS
  misc_feature: MA Experiment 20001556 PARAMETER Experiment Name: At_Drought_Soil_Dry_P Parameter: Post Timepoint (hr) Value: None
  misc_feature: MA Experiment 20001556 PARAMETER Experiment Name: At_Drought_Soil_Dry_P Parameter: Post-Treatment Value: None
  misc_feature: MA Experiment 20001556 PARAMETER Experiment Name: At_Drought_Soil_Dry_P Parameter: Timepoint (day) Value: 12
  misc_feature: MA Experiment 20001556 PARAMETER Experiment Name: At_Drought_Soil_Dry_P Parameter: Treatment Value: Drought vs. No Drought
  misc_feature: MA Experiment ID: 20001559 Result: Up-regulated in Transcription
  misc_feature: MA Experiment 20001559 PARAMETER Experiment Name: At_Drought_Soil_Dry_P Parameter: Age (day) Value: 28
  misc_feature: MA Experiment 20001559 PARAMETER Experiment Name: At_Drought_Soil_Dry_P Parameter: Organism Value: A. thaliana
  misc_feature: MA Experiment 20001559 PARAMETER Experiment Name: At_Drought_Soil_Dry_P Parameter: Plant Line Value: WS
  misc_feature: MA Experiment 20001559 PARAMETER Experiment Name: At_Drought_Soil_Dry_P Parameter: Post Timepoint (hr) Value: 29
  misc_feature: MA Experiment 20001559 PARAMETER Experiment Name: At_Drought_Soil_Dry_P Parameter: Post-Treatment Value: Re-Water vs. No Drought
  misc_feature: MA Experiment 20001559 PARAMETER Experiment Name: At_Drought_Soil_Dry_P Parameter: Timepoint (day) Value: 14
  misc_feature: MA Experiment 20001559 PARAMETER Experiment Name: At_Drought_Soil_Dry_P Parameter: Treatment Value: Drought vs. No Drought
  misc_feature: MA Experiment ID: 20001560 Result: Up-regulated in Transcription
  misc_feature: MA Experiment 20001560 PARAMETER Experiment Name: At_Drought_Soil_Dry_P Parameter: Age (day) Value: 28
  misc_feature: MA Experiment 20001560 PARAMETER Experiment Name: At_Drought_Soil_Dry_P Parameter: Organism Value: A. thaliana
  misc_feature: MA Experiment 20001560 PARAMETER Experiment Name: At_Drought_Soil_Dry_P Parameter: Plant Line Value: WS
  misc_feature: MA Experiment 20001560 PARAMETER Experiment Name: At_Drought_Soil_Dry_P Parameter: Post Timepoint (hr) Value: None
  misc_feature: MA Experiment 20001560 PARAMETER Experiment Name: At_Drought_Soil_Dry_P Parameter: Post-Treatment Value: None
  misc_feature: MA Experiment 20001560 PARAMETER Experiment Name: At_Drought_Soil_Dry_P Parameter: Timepoint (day) Value: 14
  misc_feature: MA Experiment 20001560 PARAMETER Experiment Name: At_Drought_Soil_Dry_P Parameter: Treatment Value: Drought vs. No Drought
  misc_feature: MA Experiment ID: 20001904 Result: Up-regulated in Transcription
  misc_feature: MA Experiment 20001904 PARAMETER Experiment Name: At_Drought_Reproduction_P Parameter: Age (day) Value: 37
  misc_feature: MA Experiment 20001904 PARAMETER Experiment Name: At_Drought_Reproduction_P Parameter: Organism Value: A. thaliana
  misc_feature: MA Experiment 20001904 PARAMETER Experiment Name: At_Drought_Reproduction_P Parameter: Plant Line Value: WS
  misc_feature: MA Experiment 20001904 PARAMETER Experiment Name: At_Drought_Reproduction_P Parameter: Timepoint (day) Value: 7
  misc_feature: MA Experiment 20001904 PARAMETER Experiment Name: At_Drought_Reproduction_P Parameter: Tissue Value: Rosettes
  misc_feature: MA Experiment 20001904 PARAMETER Experiment Name: At_Drought_Reproduction_P Parameter: Treatment Value: Drought vs. No Drought
  misc_feature: MA Experiment ID: 20001905 Result: Up-regulated in Transcription
  misc_feature: MA Experiment 20001905 PARAMETER Experiment Name: At_Drought_Reproduction_P Parameter: Age (day) Value: 40
  misc_feature: MA Experiment 20001905 PARAMETER Experiment Name: At_Drought_Reproduction_P Parameter: Organism Value: A. thaliana
  misc_feature: MA Experiment 20001905 PARAMETER Experiment Name: At_Drought_Reproduction_P Parameter: Plant Line Value: WS
  misc_feature: MA Experiment 20001905 PARAMETER Experiment Name: At_Drought_Reproduction_P Parameter: Timepoint (day) Value: 10
  misc_feature: MA Experiment 20001905 PARAMETER Experiment Name: At_Drought_Reproduction_P Parameter: Tissue Value: Rosettes
  misc_feature: MA Experiment 20001905 PARAMETER Experiment Name: At_Drought_Reproduction_P Parameter: Treatment Value: Drought vs. No Drought
  misc_feature: MA Experiment ID: 20001906 Result: Up-regulated in Transcription
  misc_feature: MA Experiment 20001906 PARAMETER Experiment Name: At_Drought_Reproduction_P Parameter: Age (day) Value: 35
  misc_feature: MA Experiment 20001906 PARAMETER Experiment Name: At_Drought_Reproduction_P Parameter: Organism Value: A. thaliana
  misc_feature: MA Experiment 20001906 PARAMETER Experiment Name: At_Drought_Reproduction_P Parameter: Plant Line Value: WS
  misc_feature: MA Experiment 20001906 PARAMETER Experiment Name: At_Drought_Reproduction_P Parameter: Timepoint (day) Value: 5
  misc_feature: MA Experiment 20001906 PARAMETER Experiment Name: At_Drought_Reproduction_P Parameter: Tissue Value: Siliques
  misc_feature: MA Experiment 20001906 PARAMETER Experiment Name: At_Drought_Reproduction_P Parameter: Treatment Value: Drought vs. No Drought
  misc_feature: MA Experiment ID: 20001908 Result: Up-regulated in Transcription
  misc_feature: MA Experiment 20001908 PARAMETER Experiment Name: At_Drought_Reproduction_P Parameter: Age (day) Value: 40
  misc_feature: MA Experiment 20001908 PARAMETER Experiment Name: At_Drought_Reproduction_P Parameter: Organism Value: A. thaliana
  misc_feature: MA Experiment 20001908 PARAMETER Experiment Name: At_Drought_Reproduction_P Parameter: Plant Line Value: WS
  misc_feature: MA Experiment 20001908 PARAMETER Experiment Name: At_Drought_Reproduction_P Parameter: Timepoint (day) Value: 10
  misc_feature: MA Experiment 20001908 PARAMETER Experiment Name: At_Drought_Reproduction_P Parameter: Tissue Value: Siliques
  misc_feature: MA Experiment 20001908 PARAMETER Experiment Name: At_Drought_Reproduction_P Parameter: Treatment Value: Drought vs. No Drought
  misc_feature: MA Experiment ID: 20001910 Result: Up-regulated in Transcription
  misc_feature: MA Experiment 20001910 PARAMETER Experiment Name: At_Drought_Reproduction_P Parameter: Age (day) Value: 37
  misc_feature: MA Experiment 20001910 PARAMETER Experiment Name: At_Drought_Reproduction_P Parameter: Organism Value: A. thaliana
  misc_feature: MA Experiment 20001910 PARAMETER Experiment Name: At_Drought_Reproduction_P Parameter: Plant Line Value: WS
  misc_feature: MA Experiment 20001910 PARAMETER Experiment Name: At_Drought_Reproduction_P Parameter: Timepoint (day) Value: 7
  misc_feature: MA Experiment 20001910 PARAMETER Experiment Name: At_Drought_Reproduction_P Parameter: Tissue Value: Flowers
  misc_feature: MA Experiment 20001910 PARAMETER Experiment Name: At_Drought_Reproduction_P Parameter: Treatment Value: Drought vs. No Drought
  misc_feature: MA Experiment ID: 20001911 Result: Up-regulated in Transcription
  misc_feature: MA Experiment 20001911 PARAMETER Experiment Name: At_Drought_Reproduction_P Parameter: Age (day) Value: 40
  misc_feature: MA Experiment 20001911 PARAMETER Experiment Name: At_Drought_Reproduction_P Parameter: Organism Value: A. thaliana
  misc_feature: MA Experiment 20001911 PARAMETER Experiment Name: At_Drought_Reproduction_P Parameter: Plant Line Value: WS
  misc_feature: MA Experiment 20001911 PARAMETER Experiment Name: At_Drought_Reproduction_P Parameter: Timepoint (day) Value: 10
  misc_feature: MA Experiment 20001911 PARAMETER Experiment Name: At_Drought_Reproduction_P Parameter: Tissue Value: Flowers
  misc_feature: MA Experiment 20001911 PARAMETER Experiment Name: At_Drought_Reproduction_P Parameter: Treatment Value: Drought vs. No Drought
  misc_feature: Phenotype: ROSETTE LEAVES Disorganized Rosette-Disorganized Rosette
  misc_feature: Phenotype: ROSETTE LEAVES Shape-Lanceolate
  misc_feature: Phenotype: ROSETTE LEAVES Shape-Serrate
  misc_feature: Phenotype: WHOLE PLANT Size-Small
  misc_feature: Phenotype: FERTILITY Fertility-Reduced
  misc_feature: Phenotype: ROSETTE LEAVES Disorganized Rosette-Disorganized Rosette
  misc_feature: Phenotype: WHOLE PLANT Size-Small
atgaaataaaaagaagcatcttctagagagagacatatagagaaagagagagaaagctttagggtttcaaaaaaaaaaaaaaaagagaccctttagaaatctcctaacaggaaagttttctcaattgctatagaaaatgggagtcatgatcaatcaccatttcctcgcttttatcttcggcatcttaggaaacgtgatatccttccttgtattcctcgctccagtgccaactttttatagaatatacaagagaaaatcgacggaaagtttccagtcgctaccgtaccaagtgtcgctatttagctgcatgctatggctctactacgcattgattaagaaagacgcttttctcctaattaccatcaactcctttggctgcgtcgtggagactctctacatagccatgttcttcgcttacgccaccagggagaaaaggatatcggctatgaagttgttcatagcaatgaacgttgccttcttctcgttgattctaatggtaacacatttcgtggttaaaactcctcccctccaagtctctgtactcggctggatttgtgttgccatttctgtttctgttttcgctgcccctctaatgatcgtggctcgtgtgataaagacaaagagtgtggagtacatgcccttcacgctttctttcttcctcactataagcgccgttatgtggttcgcttatggtttattcctcaatgacatatgcatagcgattccaaacgtggtgggattcgtactagggctgttgcaaatggttttgtacttggtttacaggaactcaaatgagaaaccagagaagattaattcgtcagaacaacaacttaagagtattgtcgtgatgagtccgttaggtgtgtcggaagtgcacccagttgtgacggaatcggtggacccactctctgaagccgttcatcatgaggatctgtccaaagttactaaagtggaggagccgtcaattgaaaacggcaagtgctacgtggaggctactcgtcctgaaaccgtttgaagtgtcaatatgtgaagctcaaaatattgctctctctctctctctctttcactctctttctctcggctcgtcagggccggccaaaggaagaaattgtattatcggcggggtggtttgttaaatttccatttttgtttcgtatcttattgatgatgtactacttgcataaagttttgtgtttatttgaatatattatctttgtgtaagttgtaactagtgctctttggaaaatttgatataataaacctcaatagctt

SEQ ID NO: 24682 - protein, 292 aa, Arabidopsis thaliana
  peptide (1)..(292): Ceres Seq. ID no. 12393056
  misc_feature (12)..(99): Pfam Name: MtN3/saliva family Pfam Description: MtN3/saliva family
  misc_feature (10)..(234): Homolog of NCBI NO: 11345413 NR Description: NEC1 [Petunia x hybrida]
  misc_feature (5)..(281): Homolog of NCBI NO: 21593109 NR Description: MtN3-like protein [Arabidopsis thaliana]
  misc_feature (5)..(281): Homolog of NCBI NO: 15241278 NR Description: MtN3-like protein
  misc_feature (5)..(221): Homolog of NCBI NO: 15241265 NR Description: MtN3-like protein
  misc_feature (11)..(224): Homolog of NCBI NO: 14715258 NR Description: N3 like protein [Medicago truncatula]
  misc_feature (11)..(281): Homolog of NCBI NO: 15229019 NR Description: MTN3-like protein
  misc_feature (1)..(281): Homolog of NCBI NO: 15237803 NR Description: MtN3-like protein
  misc_feature (5)..(241): Homolog of NCBI NO: 1619602 NR Description: MtN3 [Medicago truncatula]
  misc_feature (1)..(292): Homolog of NCBI NO: 21593422 NR Description: senescence-associated protein (SAG29)
  misc_feature (1)..(292): Homolog of NCBI NO: 15240040 NR Description: senescence-associated protein (SAG29)
MGVMINHHFLAFIFGILGNVISFLVFLAPVPTFYRIYKRKSTESFQSLPYQVSLFSCMLWLYYALIKKDAFLLITINSFGCVVETLYIAMFFAYATREKRISAMKLFIAMNVAFFSLILMVTHFVVKTPPLQVSVLGWICVAISVSVFAAPLMIVARVIKTKSVEYMPFTLSFFLTISAVMWFAYGLFLNDICIAIPNVVGFVLGLLQMVLYLVYRNSNEKPEKINSSEQQLKSIVVMSPLGVSEVHPVVTESVDPLSEAVHHEDLSKVTKVEEPSIENGKCYVEATRPETV

SEQ ID NO: 24683 - protein, 289 aa, Arabidopsis thaliana
  peptide (1)..(289): Ceres Seq. ID no. 12393057
  misc_feature (9)..(96): Pfam Name: MtN3/saliva family Pfam Description: MtN3/saliva family
  misc_feature (1)..(278): Homolog of NCBI NO: 15237803 NR Description: MtN3-like protein
  misc_feature (2)..(238): Homolog of NCBI NO: 1619602 NR Description: MtN3 [Medicago truncatula]
  misc_feature (7)..(231): Homolog of NCBI NO: 11345413 NR Description: NEC1 [Petunia x hybrida]
  misc_feature (2)..(278): Homolog of NCBI NO: 15241278 NR Description: MtN3-like protein
  misc_feature (8)..(221): Homolog of NCBI NO: 14715258 NR Description: N3 like protein [Medicago truncatula]
  misc_feature (8)..(278): Homolog of NCBI NO: 15229019 NR Description: MTN3-like protein
  misc_feature (2)..(218): Homolog of NCBI NO: 15241265 NR Description: MtN3-like protein
  misc_feature (2)..(278): Homolog of NCBI NO: 21593109 NR Description: MtN3-like protein [Arabidopsis thaliana]
  misc_feature (1)..(289): Homolog of NCBI NO: 21593422 NR Description: senescence-associated protein (SAG29)
  misc_feature (1)..(289): Homolog of NCBI NO: 15240040 NR Description: senescence-associated protein (SAG29)
MINHHFLAFIFGILGNVISFLVFLAPVPTFYRIYKRKSTESFQSLPYQVSLFSCMLWLYYALIKKDAFLLITINSFGCVVETLYIAMFFAYATREKRISAMKLFIAMNVAFFSLILMVTHFVVKTPPLQVSVLGWICVAISVSVFAAPLMIVARVIKTKSVEYMPFTLSFFLTISAVMWFAYGLFLNDICIAIPNVVGFVLGLLQMVLYLVYRNSNEKPEKINSSEQQLKSIVVMSPLGVSEVHPVVTESVDPLSEAVHHEDLSKVTKVEEPSIENGKCYVEATRPETV

SEQ ID NO: 24684 - protein, 235 aa, Arabidopsis thaliana
  peptide (1)..(235): Ceres Seq. ID no. 12393058
  misc_feature (1)..(177): Homolog of NCBI NO: 11345413 NR Description: NEC1 [Petunia x hybrida]
  misc_feature (1)..(224): Homolog of NCBI NO: 21593109 NR Description: MtN3-like protein [Arabidopsis thaliana]
  misc_feature (1)..(224): Homolog of NCBI NO: 15241278 NR Description: MtN3-like protein
  misc_feature (1)..(164): Homolog of NCBI NO: 15241265 NR Description: MtN3-like protein
  misc_feature (1)..(167): Homolog of NCBI NO: 14715258 NR Description: N3 like protein [Medicago truncatula]
  misc_feature (1)..(224): Homolog of NCBI NO: 15229019 NR Description: MTN3-like protein
  misc_feature (1)..(224): Homolog of NCBI NO: 15237803 NR Description: MtN3-like protein
  misc_feature (1)..(184): Homolog of NCBI NO: 1619602 NR Description: MtN3 [Medicago truncatula]
  misc_feature (1)..(235): Homolog of NCBI NO: 21593422 NR Description: senescence-associated protein (SAG29)
  misc_feature (1)..(235): Homolog of NCBI NO: 15240040 NR Description: senescence-associated protein (SAG29)
MLWLYYALIKKDAFLLITINSFGCVVETLYIAMFFAYATREKRISAMKLFIAMNVAFFSLILMVTHFVVKTPPLQVSVLGWICVAISVSVFAAPLMIVARVIKTKSVEYMPFTLSFFLTISAVMWFAYGLFLNDICIAIPNVVGFVLGLLQMVLYLVYRNSNEKPEKINSSEQQLKSIVVMSPLGVSEVHPVVTESVDPLSEAVHHEDLSKVTKVEEPSIENGKCYVEATRPETV

SEQ ID NO: 24685 - DNA, 1447 bp, Arabidopsis thaliana
  misc_feature (1)..(1447): Ceres Seq. ID no. 12396376
  misc_feature: MA Experiment ID: 108462 Result: Up-regulated in Transcription
  misc_feature: MA Experiment 108462 PARAMETER Experiment Name: At_Germinating_Seeds_cDNA_P Parameter: Age (day) Value: 2 vs. 0
  misc_feature: MA Experiment 108462 PARAMETER Experiment Name: At_Germinating_Seeds_cDNA_P Parameter: Tissue Value: Germinating Seeds
  misc_feature: MA Experiment ID: 108463 Result: Up-regulated in Transcription
  misc_feature: MA Experiment 108463 PARAMETER Experiment Name: At_Germinating_Seeds_cDNA_P Parameter: Age (day) Value: 3 vs. 0
  misc_feature: MA Experiment 108463 PARAMETER Experiment Name: At_Germinating_Seeds_cDNA_P Parameter: Tissue Value: Germinating Seeds
  misc_feature: MA Experiment ID: 108464 Result: Up-regulated in Transcription
  misc_feature: MA Experiment 108464 PARAMETER Experiment Name: At_Germinating_Seeds_cDNA_P Parameter: Age (day) Value: 4 vs. 0
  misc_feature: MA Experiment 108464 PARAMETER Experiment Name: At_Germinating_Seeds_cDNA_P Parameter: Tissue Value: Germinating Seeds
  misc_feature: MA Experiment ID: 108474 Result: Up-regulated in Transcription
  misc_feature: MA Experiment 108474 PARAMETER Experiment Name: At_Drought_Flowers_cDNA_P Parameter: Timepoint (hr) Value: null
  misc_feature: MA Experiment 108474 PARAMETER Experiment Name: At_Drought_Flowers_cDNA_P Parameter: Treatment Value: Drought vs. No Drought
  misc_feature: MA Experiment ID: 108501 Result: Down-regulated in Transcription
  misc_feature: MA Experiment 108501 PARAMETER Experiment Name: At_ap2_floral_buds_cDNA_P Parameter: Plant Line Value: ap2 (Ler.)
  misc_feature: MA Experiment 108501 PARAMETER Experiment Name: At_ap2_floral_buds_cDNA_P Parameter: Tissue Value: Closed Flower
  misc_feature: MA Experiment ID: 108573 Result: Up-regulated in Transcription
  misc_feature: MA Experiment 108573 PARAMETER Experiment Name: At_Drought_cDNA_P Parameter: Timepoint (hr) Value: 6
  misc_feature: MA Experiment 108573 PARAMETER Experiment Name: At_Drought_cDNA_P Parameter: Tissue Value: Aerial
  misc_feature: MA Experiment 108573 PARAMETER Experiment Name: At_Drought_cDNA_P Parameter: Treatment Value: Drought vs. No Drought
  misc_feature: MA Experiment ID: 108595 Result: Down-regulated in Transcription
  misc_feature: MA Experiment 108595 PARAMETER Experiment Name: At_Ler-pi_Ovule_cDNA_P Parameter: Plant Line Value: null
  misc_feature: MA Experiment ID: 20000086 Result: Down-regulated in Transcription
  misc_feature: MA Experiment 20000086 PARAMETER Experiment Name: At_100uM_ABA_Mutants_cDNA_P Parameter: Plant Line Value: CS22
  misc_feature: MA Experiment 20000086 PARAMETER Experiment Name: At_100uM_ABA_Mutants_cDNA_P Parameter: Timepoint (hr) Value: 6
  misc_feature: MA Experiment 20000086 PARAMETER Experiment Name: At_100uM_ABA_Mutants_cDNA_P Parameter: Tissue Value: Aerial
  misc_feature: MA Experiment 20000086 PARAMETER Experiment Name: At_100uM_ABA_Mutants_cDNA_P Parameter: Treatment Value: 100uM ABA vs. No Treatment
  misc_feature: MA Experiment ID: 20000087 Result: Down-regulated in Transcription
  misc_feature: MA Experiment 20000087 PARAMETER Experiment Name: At_100uM_ABA_Mutants_cDNA_P Parameter: Plant Line Value: WS
  misc_feature: MA Experiment 20000087 PARAMETER Experiment Name: At_100uM_ABA_Mutants_cDNA_P Parameter: Timepoint (hr) Value: 6
  misc_feature: MA Experiment 20000087 PARAMETER Experiment Name: At_100uM_ABA_Mutants_cDNA_P Parameter: Tissue Value: Aerial
  misc_feature: MA Experiment 20000087 PARAMETER Experiment Name: At_100uM_ABA_Mutants_cDNA_P Parameter: Treatment Value: 100uM ABA vs. No Treatment
  misc_feature: MA Experiment ID: 20000113 Result: Down-regulated in Transcription
  misc_feature: MA Experiment 20000113 PARAMETER Experiment Name: At_42deg_Heat_cDNA_P Parameter: Temperature (deg C) Value: 42 vs. 22
  misc_feature: MA Experiment 20000113 PARAMETER Experiment Name: At_42deg_Heat_cDNA_P Parameter: Timepoint (hr) Value: 8
  misc_feature: MA Experiment 20000113 PARAMETER Experiment Name: At_42deg_Heat_cDNA_P Parameter: Tissue Value: Aerial
  misc_feature: MA Experiment ID: 20000169 Result: Up-regulated in Transcription
  misc_feature: MA Experiment 20000169 PARAMETER Experiment Name: At_100uM_ABA_P Parameter: Age (day) Value: 14
  misc_feature: MA Experiment 20000169 PARAMETER Experiment Name: At_100uM_ABA_P Parameter: Organism Value: A. thaliana
  misc_feature: MA Experiment 20000169 PARAMETER Experiment Name: At_100uM_ABA_P Parameter: Plant Line Value: WS
  misc_feature: MA Experiment 20000169 PARAMETER Experiment Name: At_100uM_ABA_P Parameter: Timepoint (hr) Value: 6
  misc_feature: MA Experiment 20000169 PARAMETER Experiment Name: At_100uM_ABA_P Parameter: Tissue Value: Aerial
  misc_feature: MA Experiment 20000169 PARAMETER Experiment Name: At_100uM_ABA_P Parameter: Treatment Value: 100uM ABA vs. No Treatment
  misc_feature: MA Experiment ID: 20000171 Result: Down-regulated in Transcription
  misc_feature: MA Experiment 20000171 PARAMETER Experiment Name: At_42deg_Heat_P Parameter: Age (day) Value: 14
  misc_feature: MA Experiment 20000171 PARAMETER Experiment Name: At_42deg_Heat_P Parameter: Organism Value: A. thaliana
  misc_feature: MA Experiment 20000171 PARAMETER Experiment Name: At_42deg_Heat_P Parameter: Plant Line Value: WS
  misc_feature: MA Experiment 20000171 PARAMETER Experiment Name: At_42deg_Heat_P Parameter: Temperature (deg C) Value: 42 vs. 22
  misc_feature: MA Experiment 20000171 PARAMETER Experiment Name: At_42deg_Heat_P Parameter: Timepoint (hr) Value: 1
  misc_feature: MA Experiment 20000171 PARAMETER Experiment Name: At_42deg_Heat_P Parameter: Tissue Value: Aerial
  misc_feature: MA Experiment ID: 20000184 Result: Up-regulated in Transcription
  misc_feature: MA Experiment 20000184 PARAMETER Experiment Name: At_Shoots__P Parameter: Age (day) Value: 7
  misc_feature: MA Experiment 20000184 PARAMETER Experiment Name: At_Shoots__P Parameter: Tissue Value: Shoots vs. Whole Plant
  misc_feature: MA Experiment ID: 20000185 Result: Down-regulated in Transcription
  misc_feature: MA Experiment 20000185 PARAMETER Experiment Name: At_Roots__P Parameter: Age (day) Value: 7 vs. 21
  misc_feature: MA Experiment 20000185 PARAMETER Experiment Name: At_Roots__P Parameter: Organism Value: A. thaliana
  misc_feature: MA Experiment 20000185 PARAMETER Experiment Name: At_Roots__P Parameter: Tissue Value: Roots vs. Whole Plant
  misc_feature: MA Experiment ID: 20000234 Result: Down-regulated in Transcription
  misc_feature: MA Experiment 20000234 PARAMETER Experiment Name: At_Siliques_P Parameter: Age (day) Value: 21
  misc_feature: MA Experiment 20000234 PARAMETER Experiment Name: At_Siliques_P Parameter: Organism Value: A. thaliana
  misc_feature: MA Experiment 20000234 PARAMETER Experiment Name: At_Siliques_P Parameter: Plant Line Value: WS
  misc_feature: MA Experiment 20000234 PARAMETER Experiment Name: At_Siliques_P Parameter: Tissue Value: Less Than 5mm Siliques vs. Whole Plant
  misc_feature: MA Experiment ID: 20000235 Result: Down-regulated in Transcription
  misc_feature: MA Experiment 20000235 PARAMETER Experiment Name: At_Siliques_P Parameter: Age (day) Value: 21
  misc_feature: MA Experiment 20000235 PARAMETER Experiment Name: At_Siliques_P Parameter: Organism Value: A. thaliana
  misc_feature: MA Experiment 20000235 PARAMETER Experiment Name: At_Siliques_P Parameter: Plant Line Value: WS
  misc_feature: MA Experiment 20000235 PARAMETER Experiment Name: At_Siliques_P Parameter: Tissue Value: 5-10mm Siliques vs. Whole Plant
  misc_feature: MA Experiment ID: 20000264 Result: Down-regulated in Transcription
  misc_feature: MA Experiment 20000264 PARAMETER Experiment Name: At_Open_Flower_P Parameter: Age (day) Value: 21
  misc_feature: MA Experiment 20000264 PARAMETER Experiment Name: At_Open_Flower_P Parameter: Plant Line Value: WS
  misc_feature: MA Experiment 20000264 PARAMETER Experiment Name: At_Open_Flower_P Parameter: Tissue Value: Open Flower vs. Whole Plant
  misc_feature: MA Experiment ID: 20000265 Result: Up-regulated in Transcription
  misc_feature: MA Experiment 20000265 PARAMETER Experiment Name: At_Open_Flower_P Parameter: Age (day) Value: 21
  misc_feature: MA Experiment 20000265 PARAMETER Experiment Name: At_Open_Flower_P Parameter: Plant Line Value: WS
  misc_feature: MA Experiment 20000265 PARAMETER Experiment Name: At_Open_Flower_P Parameter: Tissue Value: Closed Flower vs. Whole Plant
  misc_feature: MA Experiment ID: 20000286 Result: Up-regulated in Transcription
  misc_feature: MA Experiment 20000286 PARAMETER Experiment Name: At_Open_Flower_P Parameter: Age (day) Value: 21
  misc_feature: MA Experiment 20000286 PARAMETER Experiment Name: At_Open_Flower_P Parameter: Plant Line Value: WS
  misc_feature: MA Experiment 20000286 PARAMETER Experiment Name: At_Open_Flower_P Parameter: Tissue Value: Half Open vs. Whole Plant
  misc_feature: MA Experiment ID: 20000438 Result: Up-regulated in Transcription
  misc_feature: MA Experiment 20000438 PARAMETER Experiment Name: At_Shoots__P Parameter: Age (day) Value: 14
  misc_feature: MA Experiment 20000438 PARAMETER Experiment Name: At_Shoots__P Parameter: Tissue Value: Shoots vs. Whole Plant
  misc_feature: MA Experiment ID: 20000439 Result: Down-regulated in Transcription
  misc_feature: MA Experiment 20000439 PARAMETER Experiment Name: At_Roots__P Parameter: Age (day) Value: 14 vs. 21
  misc_feature: MA Experiment 20000439 PARAMETER Experiment Name: At_Roots__P Parameter: Organism Value: A. thaliana
  misc_feature: MA Experiment 20000439 PARAMETER Experiment Name: At_Roots__P Parameter: Tissue Value: Roots vs. Whole Plant
  misc_feature: MA Experiment ID: 20000455 Result: Up-regulated in Transcription
  misc_feature: MA Experiment 20000455 PARAMETER Experiment Name: At_100uM_ABA_P Parameter: Age (day) Value: 16
  misc_feature: MA Experiment 20000455 PARAMETER Experiment Name: At_100uM_ABA_P Parameter: Organism Value: A. thaliana
  misc_feature: MA Experiment 20000455 PARAMETER Experiment Name: At_100uM_ABA_P Parameter: Plant Line Value: WS
  misc_feature: MA Experiment 20000455 PARAMETER Experiment Name: At_100uM_ABA_P Parameter: Timepoint (hr) Value: 48
  misc_feature: MA Experiment 20000455 PARAMETER Experiment Name: At_100uM_ABA_P Parameter: Tissue Value: Aerial
  misc_feature: MA Experiment 20000455 PARAMETER Experiment Name: At_100uM_ABA_P Parameter: Treatment Value: 100uM ABA vs. No Treatment
  misc_feature: MA Experiment ID: 20000495 Result: Down-regulated in Transcription
  misc_feature: MA Experiment 20000495 PARAMETER Experiment Name: At_Guard_Cells_P Parameter: Harvest Date Value: 8/2/2002
  misc_feature: MA Experiment 20000495 PARAMETER Experiment Name: At_Guard_Cells_P Parameter: Organism Value: A. thaliana
  misc_feature: MA Experiment 20000495 PARAMETER Experiment Name: At_Guard_Cells_P Parameter: Tissue Value: Guard Cells vs. Leaves
  misc_feature: MA Experiment ID: 20000573 Result: Down-regulated in Transcription
  misc_feature: MA Experiment 20000573 PARAMETER Experiment Name: At_100uM_ABA_Mutants__P Parameter: Organism Value: A. thaliana
  misc_feature: MA Experiment 20000573 PARAMETER Experiment Name: At_100uM_ABA_Mutants__P Parameter: Plant Line Value: CS22 vs. Ler wt
  misc_feature: MA Experiment 20000573 PARAMETER Experiment Name: At_100uM_ABA_Mutants__P Parameter: Timepoint (hr) Value: N/A
  misc_feature: MA Experiment 20000573 PARAMETER Experiment Name: At_100uM_ABA_Mutants__P Parameter: Tissue Value: Whole Plant
  misc_feature: MA Experiment 20000573 PARAMETER Experiment Name: At_100uM_ABA_Mutants__P Parameter: Treatment Value: None
  misc_feature: MA Experiment ID: 20000574 Result: Down-regulated in Transcription
  misc_feature: MA Experiment 20000574 PARAMETER Experiment Name: At_100uM_ABA_Mutants__P Parameter: Organism Value: A. thaliana
  misc_feature: MA Experiment 20000574 PARAMETER Experiment Name: At_100uM_ABA_Mutants__P Parameter: Plant Line Value: CS23 vs. Ler wt
  misc_feature: MA Experiment 20000574 PARAMETER Experiment Name: At_100uM_ABA_Mutants__P Parameter: Timepoint (hr) Value: N/A
  misc_feature: MA Experiment 20000574 PARAMETER Experiment Name: At_100uM_ABA_Mutants__P Parameter: Tissue Value: Whole Plant
  misc_feature: MA Experiment 20000574 PARAMETER Experiment Name: At_100uM_ABA_Mutants__P Parameter: Treatment Value: None
  misc_feature: MA Experiment ID: 20000794 Result: Down-regulated in Transcription
  misc_feature: MA Experiment 20000794 PARAMETER Experiment Name: At_Petals_P Parameter: Age (day) Value: 23-25 days
  misc_feature: MA Experiment 20000794 PARAMETER Experiment Name: At_Petals_P Parameter: Plant Line Value: WS
  misc_feature: MA Experiment 20000794 PARAMETER Experiment Name: At_Petals_P Parameter: Tissue Value: Petals vs. Whole plant
  misc_feature: MA Experiment ID: 20001248 Result: Down-regulated in Transcription
  misc_feature: MA Experiment 20001248 PARAMETER Experiment Name: At_Far-red-induction_P Parameter: Age (day) Value: 7
  misc_feature: MA Experiment 20001248 PARAMETER Experiment Name: At_Far-red-induction_P Parameter: Light Value: Far-red vs. White
  misc_feature: MA Experiment 20001248 PARAMETER Experiment Name: At_Far-red-induction_P Parameter: Organism Value: A. thaliana
  misc_feature: MA Experiment 20001248 PARAMETER Experiment Name: At_Far-red-induction_P Parameter: Plant Line Value: Columbia
  misc_feature: MA Experiment 20001248 PARAMETER Experiment Name: At_Far-red-induction_P Parameter: Timepoint (hr) Value: 4
  misc_feature: MA Experiment 20001248 PARAMETER Experiment Name: At_Far-red-induction_P Parameter: Tissue Value: Whole Plant
  misc_feature: MA Experiment ID: 20001554 Result: Up-regulated in Transcription
  misc_feature: MA Experiment 20001554 PARAMETER Experiment Name: At_Drought_Soil_Dry_P Parameter: Age (day) Value: 21
  misc_feature: MA Experiment 20001554 PARAMETER Experiment Name: At_Drought_Soil_Dry_P Parameter: Organism Value: A. thaliana
  misc_feature: MA Experiment 20001554 PARAMETER Experiment Name: At_Drought_Soil_Dry_P Parameter: Plant Line Value: WS
  misc_feature: MA Experiment 20001554 PARAMETER Experiment Name: At_Drought_Soil_Dry_P Parameter: Post Timepoint (hr) Value: None
  misc_feature: MA Experiment 20001554 PARAMETER Experiment Name: At_Drought_Soil_Dry_P Parameter: Post-Treatment Value: None
  misc_feature: MA Experiment 20001554 PARAMETER Experiment Name: At_Drought_Soil_Dry_P Parameter: Timepoint (day) Value: 7
  misc_feature: MA Experiment 20001554 PARAMETER Experiment Name: At_Drought_Soil_Dry_P Parameter: Treatment Value: Drought vs. No Drought
  misc_feature: MA Experiment ID: 20001757 Result: Down-regulated in Transcription
  misc_feature: MA Experiment 20001757 PARAMETER Experiment Name: At_50mM_NH4NO3_L-to-H_P Parameter: Timepoint (hr) Value: 6
  misc_feature: MA Experiment 20001757 PARAMETER Experiment Name: At_50mM_NH4NO3_L-to-H_P Parameter: Tissue Value: Leaf
  misc_feature: MA Experiment 20001757 PARAMETER Experiment Name: At_50mM_NH4NO3_L-to-H_P Parameter: Treatment Value: 50mM NH4NO3 vs 100mM Mannitol
  misc_feature: MA Experiment ID: 20001910 Result: Down-regulated in Transcription
  misc_feature: MA Experiment 20001910 PARAMETER Experiment Name: At_Drought_Reproduction_P Parameter: Age (day) Value: 37
  misc_feature: MA Experiment 20001910 PARAMETER Experiment Name: At_Drought_Reproduction_P Parameter: Organism Value: A. thaliana
  misc_feature: MA Experiment 20001910 PARAMETER Experiment Name: At_Drought_Reproduction_P Parameter: Plant Line Value: WS
  misc_feature: MA Experiment 20001910 PARAMETER Experiment Name: At_Drought_Reproduction_P Parameter: Timepoint (day) Value: 7
  misc_feature: MA Experiment 20001910 PARAMETER Experiment Name: At_Drought_Reproduction_P Parameter: Tissue Value: Flowers
  misc_feature: MA Experiment 20001910 PARAMETER Experiment Name: At_Drought_Reproduction_P Parameter: Treatment Value: Drought vs. No Drought
actcagaatcatctttgtcaatatttctctaccatcttttgtctcatagccatgggtctagttcaagaagagggaagcggtcctgttcatggctttcggttatcaaccgtgagtgcgtccctgccgtcagagacaggtacgacccacgagcccaccggtttagacctcgccatgaagcttcactacctaaagacggtttacatttactcggccgagacagcacgtgacttgactgtgatggacgtgaaggggccgttgttttccgtgttcgaccagaacccatgcatcattggcaggttcaggcgacatgaatcgggacgtcccgtacctaaagtgcaacgactgtggcacacgtttcgtggaacgtcattgtgatctcactgtggaggagtggctccgtgtaccggaccggtccgttgatgagtctttggtttaccatcaaccagttggaccagatttggcattctctcctttgctctatattcagatgacccggtttagctgcggtggattagctttgggcttaagctgggctcatatcatgggagatccattctctctttctcatttcttcaacttatgggctcaagcctttgctggtgagaatatatactcccccaaaacctctgatttacaaagagtctttcaaaacccgacctcaacggtcaaacaaccggattcaatcaaacgggttgacccggttggagatctctgggtcgctccgaataacagcaaaatgacaacattctccttcaatttaacggttaacgatttaaaatcaaatttcccggtgaacggagacggcgaattcgaaattctcactggaatcatatggaaatgtgttgcgacggtgaggggagaatcagctccggtgacgattacggttatcagatcggatccgaagaagttgaagcctagagcggtgagaaatggtcagatgataagttccattcacgtcgatttctcggtggcggaggcgagtttggaggagattgtgaaatcgatcggtgaagcgaaagatgagagggttgtgatcgatgagattgttgatgatgtttcggattttattgtttacggagcgaatttaacgtttgtggatatgagtgaagttgatttttatgaggcgaaagttatggggaaatcgccggaatcggtttattgtaatgttcaggggattggggacgacggagcagtggtggttttaccgggggttgtggaggaggagagggttgtgacggtgacattaccggtggatgagattgagaaggtgaaatgggaaatgaagaaatgtggtttgatcacgccgttagtttaacggtgaatgaagaaatcattttatgcggttatcgttaatcgtgttttttattgtttgtttgggtttttattttatttggtgtgttttatataaaatcaaataaatgtcatttttataatttatgtttgtagc

SEQ ID NO: 24686 - protein, 335 aa, Arabidopsis thaliana
  peptide (1)..(335): Ceres Seq. ID no. 12396377
  misc_feature (6)..(328): Pfam Name: Transferase family Pfam Description: Transferase family
  misc_feature (6)..(61): Homolog of NCBI NO: 38568009 NR Description: OSJNBa0070C17.1 [Oryza sativa (japonica
  misc_feature (1)..(201): Homolog of NCBI NO: 18417362 NR Description: expressed protein
  misc_feature (8)..(305): Homolog of NCBI NO: 30017587 NR Description: unknown protein [Oryza sativa (japonica
  misc_feature (69)..(322): Homolog of NCBI NO: 38568010 NR Description: OSJNBa0070C17.2 [Oryza sativa (japonica
  misc_feature (6)..(322): Homolog of NCBI NO: 38345799 NR Description: OSJNBa0085I10.16 [Oryza sativa (japonica
  misc_feature (1)..(322): Homolog of NCBI NO: 2130139 NR Description: hypothetical protein - maize
  misc_feature (5)..(325): Homolog of NCBI NO: 15233851 NR Description: CER2; protein id: At4g24510.1, supported by cDNA:
  misc_feature (6)..(333): Homolog of NCBI NO: 15236357 NR Description: fatty acid elongase - like protein (cer2-like)
  misc_feature (6)..(335): Homolog of NCBI NO: 18403923 NR Description: expressed protein
  misc_feature (6)..(335): Homolog of NCBI NO: 21593424 NR Description: fatty acid elongase-like protein (cer2-like)
MNRDVPYLKCNDCGTRFVERHCDLTVEEWLRVPDRSVDESLVYHQPVGPDLAFSPLLYIQMTRFSCGGLALGLSWAHIMGDPFSLSHFFNLWAQAFAGENIYSPKTSDLQRVFQNPTSTVKQPDSIKRVDPVGDLWVAPNNSKMTTFSFNLTVNDLKSNFPVNGDGEFEILTGIIWKCVATVRGESAPVTITVIRSDPKKLKPRAVRNGQMISSIHVDFSVAEASLEEIVKSIGEAKDERVVIDEIVDDVSDFIVYGANLTFVDMSEVDFYEAKVMGKSPESVYCNVQGIGDDGAVVVLPGVVEEERVVTVTLPVDEIEKVKWEMKKCGLITPLV

SEQ ID NO: 24687 - protein, 275 aa, Arabidopsis thaliana
  peptide (1)..(275): Ceres Seq. ID no. 12396378
  misc_feature (1)..(268): Pfam Name: Transferase family Pfam Description: Transferase family
  misc_feature (1)..(210): Homolog of NCBI NO: 15233802 NR Description: acyltransferase family
  misc_feature (1)..(141): Homolog of NCBI NO: 18417362 NR Description: expressed protein
  misc_feature (1)..(245): Homolog of NCBI NO: 30017587 NR Description: unknown protein [Oryza sativa (japonica
  misc_feature (9)..(262): Homolog of NCBI NO: 38568010 NR Description: OSJNBa0070C17.2 [Oryza sativa (japonica
  misc_feature (1)..(262): Homolog of NCBI NO: 38345799 NR Description: OSJNBa0085I10.16 [Oryza sativa (japonica
  misc_feature (1)..(262): Homolog of NCBI NO: 2130139 NR Description: hypothetical protein - maize
  misc_feature (1)..(265): Homolog of NCBI NO: 15233851 NR Description: CER2; protein id: At4g24510.1, supported by cDNA:
  misc_feature (1)..(273): Homolog of NCBI NO: 15236357 NR Description: fatty acid elongase - like protein (cer2-like)
  misc_feature (1)..(275): Homolog of NCBI NO: 18403923 NR Description: expressed protein
  misc_feature (1)..(275): Homolog of NCBI NO: 21593424 NR Description: fatty acid elongase-like protein (cer2-like)
MTRFSCGGLALGLSWAHIMGDPFSLSHFFNLWAQAFAGENIYSPKTSDLQRVFQNPTSTVKQPDSIKRVDPVGDLWVAPNNSKMTTFSFNLTVNDLKSNFPVNGDGEFEILTGIIWKCVATVRGESAPVTITVIRSDPKKLKPRAVRNGQMISSIHVDFSVAEASLEEIVKSIGEAKDERVVIDEIVDDVSDFIVYGANLTFVDMSEVDFYEAKVMGKSPESVYCNVQGIGDDGAVVVLPGVVEEERVVTVTLPVDEIEKVKWEMKKCGLITPLV

SEQ ID NO: 24688 - protein, 257 aa, Arabidopsis thaliana
  peptide (1)..(257): Ceres Seq. ID no. 12396379
  misc_feature (1)..(250): Pfam Name: Transferase family Pfam Description: Transferase family
  misc_feature (1)..(192): Homolog of NCBI NO: 15233802 NR Description: acyltransferase family
  misc_feature (1)..(123): Homolog of NCBI NO: 18417362 NR Description: expressed protein
  misc_feature (1)..(227): Homolog of NCBI NO: 30017587 NR Description: unknown protein [Oryza sativa (japonica
  misc_feature (1)..(244): Homolog of NCBI NO: 38568010 NR Description: OSJNBa0070C17.2 [Oryza sativa (japonica
  misc_feature (1)..(244): Homolog of NCBI NO: 38345799 NR Description: OSJNBa0085I10.16 [Oryza sativa (japonica
  misc_feature (1)..(244): Homolog of NCBI NO: 2130139 NR Description: hypothetical protein - maize
  misc_feature (1)..(247): Homolog of NCBI NO: 15233851 NR Description: CER2; protein id: At4g24510.1, supported by cDNA:
  misc_feature (1)..(255): Homolog of NCBI NO: 15236357 NR Description: fatty acid elongase - like protein (cer2-like)
  misc_feature (1)..(257): Homolog of NCBI NO: 18403923 NR Description: expressed protein
  misc_feature (1)..(257): Homolog of NCBI NO: 21593424 NR Description: fatty acid elongase-like protein (cer2-like)
MGDPFSLSHFFNLWAQAFAGENIYSPKTSDLQRVFQNPTSTVKQPDSIKRVDPVGDLWVAPNNSKMTTFSFNLTVNDLKSNFPVNGDGEFEILTGIIWKCVATVRGESAPVTITVIRSDPKKLKPRAVRNGQMISSIHVDFSVAEASLEEIVKSIGEAKDERVVIDEIVDDVSDFIVYGANLTFVDMSEVDFYEAKVMGKSPESVYCNVQGIGDDGAVVVLPGVVEEERVVTVTLPVDEIEKVKWEMKKCGLITPLV

SEQ ID NO: 24689 - DNA, 1328 bp, Arabidopsis thaliana
  misc_feature (1)..(1328): Ceres Seq. ID no. 13490747
  misc_feature: MA Experiment ID: 20000265 Result: Up-regulated in Transcription
  misc_feature: MA Experiment 20000265 PARAMETER Experiment Name: At_Open_Flower_P Parameter: Age (day) Value: 21
  misc_feature: MA Experiment 20000265 PARAMETER Experiment Name: At_Open_Flower_P Parameter: Plant Line Value: WS
  misc_feature: MA Experiment 20000265 PARAMETER Experiment Name: At_Open_Flower_P Parameter: Tissue Value: Closed Flower vs. Whole Plant
  misc_feature: MA Experiment ID: 20000286 Result: Up-regulated in Transcription
  misc_feature: MA Experiment 20000286 PARAMETER Experiment Name: At_Open_Flower_P Parameter: Age (day) Value: 21
  misc_feature: MA Experiment 20000286 PARAMETER Experiment Name: At_Open_Flower_P Parameter: Plant Line Value: WS
  misc_feature: MA Experiment 20000286 PARAMETER Experiment Name: At_Open_Flower_P Parameter: Tissue Value: Half Open vs. Whole Plant
  misc_feature: MA Experiment ID: 20001910 Result: Down-regulated in Transcription
  misc_feature: MA Experiment 20001910 PARAMETER Experiment Name: At_Drought_Reproduction_P Parameter: Age (day) Value: 37
  misc_feature: MA Experiment 20001910 PARAMETER Experiment Name: At_Drought_Reproduction_P Parameter: Organism Value: A. thaliana
  misc_feature: MA Experiment 20001910 PARAMETER Experiment Name: At_Drought_Reproduction_P Parameter: Plant Line Value: WS
  misc_feature: MA Experiment 20001910 PARAMETER Experiment Name: At_Drought_Reproduction_P Parameter: Timepoint (day) Value: 7
  misc_feature: MA Experiment 20001910 PARAMETER Experiment Name: At_Drought_Reproduction_P Parameter: Tissue Value: Flowers
  misc_feature: MA Experiment 20001910 PARAMETER Experiment Name: At_Drought_Reproduction_P Parameter: Treatment Value: Drought vs. No Drought
cttctcgcatcttatatgaaacacattcactctccaaaataatctatacttttcctacatattctcttgacgatcatgagactgatttcgtgaaaatatcgtcattatatcaaattagaagttgatggaaaacatgggggattcgagcatagggccgggccatccgcatctccctcccgggtttcggtttcacccgactgatgaggaactagtagttcattacctcaagaagaaagcagattctgttccacttccagtctcaatcatcgcagagattgatctttacaaatttgatccttgggagcttccaagcaaggcgagttttggagagcacgagtggtacttctttagtcctcgggatcggaagtatccaaatggggttaggccaaaccgggcagcaacttccggttattggaaagcaacgggaaccgataaaccgatatttacgtgcaatagtcacaaggttggtgtcaagaaagcgcttgttttttacggtggaaagcctcctaaagggataaaaacagattggatcatgcatgaatatcgcctcactgatggtaaccttagcactgcggctaagccgcctgacttaaccacgacaaggaaaaactcactacggctagacgattgggttctatgtaggatctataagaagaatagttcacaaagaccaacaatggagagagtattacttagagaggatctaatggaaggcatgctctcaaaatcatctgctaattcttcttctacatcagtactagacaacaacgacaacaataataacaataacgaagaacactttttcgacggtatggtcgtttcttcagacaaacgttccttgtgtggtcaataccgaatgggccacgaggcctcaggatcatcttcattcggatctttcttatcgagcaagaggtttcatcatacaggtgatctcaacaatgataactacaatgtctcttttgtttcgatgcttagtgagattcctcagagttcggggtttcatgcaaatggtgttatggatacgacgtcgtctctagctgatcatggggttttaagacaggcgtttcagcttcctaacatgaactggcactcataatctatatagatatatatgtgtgtatcatatatgtatctatgcaggcctaatatagtttacacataaatcatctgggaatatatatatacaagtacgcggtcttacaaatgtatacgtatctgtttaattacgtcaagaaaaagtgtatacgtttctttttactcaatggctgcaaagatgtgtactaataacagaagctgattaataaaaaatataaaagtatattttttcc

SEQ ID NO: 24690 - protein, 323 aa, Arabidopsis thaliana
  peptide (1)..(323): Ceres Seq. ID no. 13490748
  misc_feature (16)..(143): Pfam Name: No apical meristem (NAM) protein Pfam Description: No apical meristem (NAM) protein
  misc_feature (16)..(196): Homolog of NCBI NO: 18409291 NR Description: No apical meristem (NAM) protein family
  misc_feature (16)..(183): Homolog of NCBI NO: 34902154 NR Description: Putative NAM (no apical meristem) protein
  misc_feature (11)..(206): Homolog of NCBI NO: 34899790 NR Description: OJ1773_H01.21 [Oryza sativa (japonica
  misc_feature (1)..(180): Homolog of NCBI NO: 21554226 NR Description: NAM-like protein [Arabidopsis thaliana]
  misc_feature (1)..(229): Homolog of NCBI NO: 15232606 NR Description: No apical meristem (NAM) protein family
  misc_feature (1)..(180): Homolog of NCBI NO: 20466640 NR Description: NAM-like protein [Arabidopsis thaliana]
  misc_feature (1)..(180): Homolog of NCBI NO: 15219110 NR Description: No apical meristem (NAM) protein family
  misc_feature (4)..(267): Homolog of NCBI NO: 25352286 NR Description: hypothetical protein F11P17.16 [imported] -
  misc_feature (1)..(323): Homolog of NCBI NO: 21593425 NR Description: NAM protein, putative [Arabidopsis thaliana]
  misc_feature (1)..(323): Homolog of NCBI NO: 18407026 NR Description: No apical meristem (NAM) protein family
MENMGDSSIGPGHPHLPPGFRFHPTDEELVVHYLKKKADSVPLPVSIIAEIDLYKFDPWELPSKASFGEHEWYFFSPRDRKYPNGVRPNRAATSGYWKATGTDKPIFTCNSHKVGVKKALVFYGGKPPKGIKTDWIMHEYRLTDGNLSTAAKPPDLTTTRKNSLRLDDWVLCRIYKKNSSQRPTMERVLLREDLMEGMLSKSSANSSSTSVLDNNDNNNNNNEEHFFDGMVVSSDKRSLCGQYRMGHEASGSSSFGSFLSSKRFHHTGDLNNDNYNVSFVSMLSEIPQSSGFHANGVMDTTSSLADHGVLRQAFQLPNMNWHS

SEQ ID NO: 24691 - protein, 320 aa, Arabidopsis thaliana
  peptide (1)..(320): Ceres Seq. ID no. 13490749
  misc_feature (13)..(140): Pfam Name: No apical meristem (NAM) protein Pfam Description: No apical meristem (NAM) protein
  misc_feature (13)..(193): Homolog of NCBI NO: 18409291 NR Description: No apical meristem (NAM) protein family
  misc_feature (13)..(180): Homolog of NCBI NO: 34902154 NR Description: Putative NAM (no apical meristem) protein
  misc_feature (8)..(203): Homolog of NCBI NO: 34899790 NR Description: OJ1773_H01.21 [Oryza sativa (japonica
  misc_feature (1)..(177): Homolog of NCBI NO: 21554226 NR Description: NAM-like protein [Arabidopsis thaliana]
  misc_feature (1)..(226): Homolog of NCBI NO: 15232606 NR Description: No apical meristem (NAM) protein family
  misc_feature (1)..(177): Homolog of NCBI NO: 20466640 NR Description: NAM-like protein [Arabidopsis thaliana]
  misc_feature (1)..(177): Homolog of NCBI NO: 15219110 NR Description: No apical meristem (NAM) protein family
  misc_feature (1)..(264): Homolog of NCBI NO: 25352286 NR Description: hypothetical protein F11P17.16 [imported] -
  misc_feature (1)..(320): Homolog of NCBI NO: 21593425 NR Description: NAM protein, putative [Arabidopsis thaliana]
  misc_feature (1)..(320): Homolog of NCBI NO: 18407026 NR Description: No apical meristem (NAM) protein family
MGDSSIGPGHPHLPPGFRFHPTDEELVVHYLKKKADSVPLPVSIIAEIDLYKFDPWELPSKASFGEHEWYFFSPRDRKYPNGVRPNRAATSGYWKATGTDKPIFTCNSHKVGVKKALVFYGGKPPKGIKTDWIMHEYRLTDGNLSTAAKPPDLTTTRKNSLRLDDWVLCRIYKKNSSQRPTMERVLLREDLMEGMLSKSSANSSSTSVLDNNDNNNNNNEEHFFDGMVVSSDKRSLCGQYRMGHEASGSSSFGSFLSSKRFHHTGDLNNDNYNVSFVSMLSEIPQSSGFHANGVMDTTSSLADHGVLRQAFQLPNMNWHS

SEQ ID NO: 24692 - protein, 187 aa, Arabidopsis thaliana
  peptide (1)..(187): Ceres Seq. ID no. 13490750
  misc_feature (1)..(60): Homolog of NCBI NO: 18409291 NR Description: No apical meristem (NAM) protein family
  misc_feature (1)..(47): Homolog of NCBI NO: 34902154 NR Description: Putative NAM (no apical meristem) protein
  misc_feature (1)..(70): Homolog of NCBI NO: 34899790 NR Description: OJ1773_H01.21 [Oryza sativa (japonica
  misc_feature (1)..(44): Homolog of NCBI NO: 21554226 NR Description: NAM-like protein [Arabidopsis thaliana]
  misc_feature (1)..(93): Homolog of NCBI NO: 15232606 NR Description: No apical meristem (NAM) protein family
  misc_feature (1)..(44): Homolog of NCBI NO: 20466640 NR Description: NAM-like protein [Arabidopsis thaliana]
  misc_feature (1)..(44): Homolog of NCBI NO: 15219110 NR Description: No apical meristem (NAM) protein family
  misc_feature (1)..(131): Homolog of NCBI NO: 25352286 NR Description: hypothetical protein F11P17.16 [imported] -
  misc_feature (1)..(187): Homolog of NCBI NO: 21593425 NR Description: NAM protein, putative [Arabidopsis thaliana]
  misc_feature (1)..(187): Homolog of NCBI NO: 18407026 NR Description: No apical meristem (NAM) protein family
MHEYRLTDGNLSTAAKPPDLTTTRKNSLRLDDWVLCRIYKKNSSQRPTMERVLLREDLMEGMLSKSSANSSSTSVLDNNDNNNNNNEEHFFDGMVVSSDKRSLCGQYRMGHEASGSSSFGSFLSSKRFHHTGDLNNDNYNVSFVSMLSEIPQSSGFHANGVMDTTSSLADHGVLRQAFQLPNMNWHS

SEQ ID NO: 24693 - DNA, 495 bp, Arabidopsis thaliana
  misc_feature (1)..(495): Ceres Seq. ID no. 12580486
  misc_feature: MA Experiment ID: 108434 Result: Up-regulated in Transcription
  misc_feature: MA Experiment 108434 PARAMETER Experiment Name: At_Root_Tips_cDNA_P Parameter: Tissue Value: Root Tips
  misc_feature: MA Experiment ID: 108462 Result: Down-regulated in Transcription
  misc_feature: MA Experiment 108462 PARAMETER Experiment Name: At_Germinating_Seeds_cDNA_P Parameter: Age (day) Value: 2 vs. 0
  misc_feature: MA Experiment 108462 PARAMETER Experiment Name: At_Germinating_Seeds_cDNA_P Parameter: Tissue Value: Germinating Seeds
  misc_feature: MA Experiment ID: 108463 Result: Down-regulated in Transcription
  misc_feature: MA Experiment 108463 PARAMETER Experiment Name: At_Germinating_Seeds_cDNA_P Parameter: Age (day) Value: 3 vs. 0
  misc_feature: MA Experiment 108463 PARAMETER Experiment Name: At_Germinating_Seeds_cDNA_P Parameter: Tissue Value: Germinating Seeds
  misc_feature: MA Experiment ID: 108464 Result: Down-regulated in Transcription
  misc_feature: MA Experiment 108464 PARAMETER Experiment Name: At_Germinating_Seeds_cDNA_P Parameter: Age (day) Value: 4 vs. 0
  misc_feature: MA Experiment 108464 PARAMETER Experiment Name: At_Germinating_Seeds_cDNA_P Parameter: Tissue Value: Germinating Seeds
  misc_feature: MA Experiment ID: 108585 Result: Up-regulated in Transcription
  misc_feature: MA Experiment 108585 PARAMETER Experiment Name: At_5mM_NaNP_cDNA_P Parameter: Timepoint (hr) Value: 6
  misc_feature: MA Experiment 108585 PARAMETER Experiment Name: At_5mM_NaNP_cDNA_P Parameter: Tissue Value: Aerial
  misc_feature: MA Experiment 108585 PARAMETER Experiment Name: At_5mM_NaNP_cDNA_P Parameter: Treatment Value: null
  misc_feature: MA Experiment ID: 108594 Result: Down-regulated in Transcription
  misc_feature: MA Experiment 108594 PARAMETER Experiment Name: At_Ler-rhl_Root_cDNA_P Parameter: Plant Line Value: null
  misc_feature: MA Experiment ID: 108595 Result: Down-regulated in Transcription
  misc_feature: MA Experiment 108595 PARAMETER Experiment Name: At_Ler-pi_Ovule_cDNA_P Parameter: Plant Line Value: null
atcagatcttaagaagaagaacctaaagctcactacgatatttttcgagaatatgacgactttttctgttccgattgataacggagattctatgaagatcgcagaagaagaatcacaaagaacactgtacccatatgttactggaacttcagttgttgcaatcaagtacaaagatggggttttgatggcttctgatatgggaggttcatatggatcaaccttaagatacaagaacatcgagagagtgaaggctattggtaagcattctcttcttggtgccagcggagaaatcagcgactttcaggagattctccgttatcttgatgagctcaccctgaatgataacatgtgggatgatggtaactctttgggaccaaaagagattcacaactatctgacccgtgtgatgtacaaccgtcgcaacaagtttaaccctctgtggaacactctcgtccttggaggcgtcaaaaatgggaaacatggttcgttgagctc

SEQ ID NO: 24694 - protein, 164 aa, Arabidopsis thaliana
  peptide (1)..(164): Ceres Seq. ID no. 12580487
  misc_feature (45)..(159): Pfam Name: Proteasome A-type and B-type Pfam Description: Proteasome A-type and B-type
  misc_feature (40)..(159): Homolog of NCBI NO: 631345 NR Description: proteasome beta-subunit - human
  misc_feature (46)..(159): Homolog of NCBI NO: 104166 NR Description: C 3.4.25.1 proteasome endopeptidase complex ()
  misc_feature (39)..(157): Homolog of NCBI NO: 13991680 NR Description: proteasome subunit N3 [Oncorhynchus mykiss]
  misc_feature (39)..(159): Homolog of NCBI NO: 33417170 NR Description: Unknown (protein for MGC:69145) [Xenopus laevis]
  misc_feature (39)..(159): Homolog of NCBI NO: 3915809 NR Description: Proteasome subunit beta type 4 precursor beta chain) (Macropain beta chain) (Multicatalytic endopeptidase
  misc_feature (39)..(159): Homolog of NCBI NO: 28828772 NR Description: similar to Arabidopsis thaliana (Mouse-ear
  misc_feature (67)..(159): Homolog of NCBI NO: 14594935 NR Description: putative beta7 proteasome subunit [Nicotiana
  misc_feature (38)..(161): Homolog of NCBI NO: 8671512 NR Description: beta 7 subunit of 20S proteasome
  misc_feature (18)..(159): Homolog of NCBI NO: 15223537 NR Description: 20S proteasome beta subunit G1 (PBG1)
  misc_feature (18)..(159): Homolog of NCBI NO: 25290071 NR Description: C 3.4.25.1 proteasome endopeptidase complex ()
SDLKKKNLKLTTIFFENMTTFSVPIDNGDSMKIAEEESQRTLYPYVTGTSVVAIKYKDGVLMASDMGGSYGSTLRYKNIERVKAIGKHSLLGASGEISDFQEILRYLDELTLNDNMWDDGNSLGPKEIHNYLTRVMYNRRNKFNPLWNTLVLGGVKNGKHGSLS

SEQ ID NO: 24695 - protein, 147 aa, Arabidopsis thaliana
  peptide (1)..(147): Ceres Seq. ID no. 12580488
  misc_feature (28)..(142): Pfam Name: Proteasome A-type and B-type Pfam Description: Proteasome A-type and B-type
  misc_feature (23)..(142): Homolog of NCBI NO: 631345 NR Description: proteasome beta-subunit - human
  misc_feature (29)..(142): Homolog of NCBI NO: 104166 NR Description: C 3.4.25.1 proteasome endopeptidase complex ()
  misc_feature (22)..(140): Homolog of NCBI NO: 13991680 NR Description: proteasome subunit N3 [Oncorhynchus mykiss]
  misc_feature (22)..(142): Homolog of NCBI NO: 33417170 NR Description: Unknown (protein for MGC:69145) [Xenopus laevis]
  misc_feature (22)..(142): Homolog of NCBI NO: 3915809 NR Description: Proteasome subunit beta type 4 precursor beta chain) (Macropain beta chain) (Multicatalytic endopeptidase
  misc_feature (22)..(142): Homolog of NCBI NO: 28828772 NR Description: similar to Arabidopsis thaliana (Mouse-ear
  misc_feature (50)..(142): Homolog of NCBI NO: 14594935 NR Description: putative beta7 proteasome subunit [Nicotiana
  misc_feature (21)..(144): Homolog of NCBI NO: 8671512 NR Description: beta 7 subunit of 20S proteasome
  misc_feature (1)..(142): Homolog of NCBI NO: 15223537 NR Description: 20S proteasome beta subunit G1 (PBG1)
  misc_feature (1)..(142): Homolog of NCBI NO: 25290071 NR Description: C 3.4.25.1 proteasome endopeptidase complex ()
MTTFSVPIDNGDSMKIAEEESQRTLYPYVTGTSVVAIKYKDGVLMASDMGGSYGSTLRYKNIERVKAIGKHSLLGASGEISDFQEILRYLDELTLNDNMWDDGNSLGPKEIHNYLTRVMYNRRNKFNPLWNTLVLGGVKNGKHGSLS

SEQ ID NO: 24696 - protein, 134 aa, Arabidopsis thaliana
  peptide (1)..(134): Ceres Seq. ID no. 12580489
  misc_feature (15)..(129): Pfam Name: Proteasome A-type and B-type Pfam Description: Proteasome A-type and B-type
  misc_feature (10)..(129): Homolog of NCBI NO: 631345 NR Description: proteasome beta-subunit - human
  misc_feature (16)..(129): Homolog of NCBI NO: 104166 NR Description: C 3.4.25.1 proteasome endopeptidase complex ()
  misc_feature (9)..(127): Homolog of NCBI NO: 13991680 NR Description: proteasome subunit N3 [Oncorhynchus mykiss]
  misc_feature (9)..(129): Homolog of NCBI NO: 33417170 NR Description: Unknown (protein for MGC:69145) [Xenopus laevis]
  misc_feature (9)..(129): Homolog of NCBI NO: 3915809 NR Description: Proteasome subunit beta type 4 precursor beta chain) (Macropain beta chain) (Multicatalytic endopeptidase
  misc_feature (9)..(129): Homolog of NCBI NO: 28828772 NR Description: similar to Arabidopsis thaliana (Mouse-ear
  misc_feature (37)..(129): Homolog of NCBI NO: 14594935 NR Description: putative beta7 proteasome subunit [Nicotiana
  misc_feature (8)..(131): Homolog of NCBI NO: 8671512 NR Description: beta 7 subunit of 20S proteasome
  misc_feature (1)..(129): Homolog of NCBI NO: 15223537 NR Description: 20S proteasome beta subunit G1 (PBG1)
  misc_feature (1)..(129): Homolog of NCBI NO: 25290071 NR Description: C 3.4.25.1 proteasome endopeptidase complex ()
MKIAEEESQRTLYPYVTGTSVVAIKYKDGVLMASDMGGSYGSTLRYKNIERVKAIGKHSLLGASGEISDFQEILRYLDELTLNDNMWDDGNSLGPKEIHNYLTRVMYNRRNKFNPLWNTLVLGGVKNGKHGSLS

SEQ ID NO: 24697 - DNA, 1122 bp, Arabidopsis thaliana
  misc_feature (1)..(1122): Ceres Seq. ID no. 12384839
  misc_feature: MA Experiment ID: 108569 Result: Up-regulated in Transcription
  misc_feature: MA Experiment 108569 PARAMETER Experiment Name: At_0.001%_MeJA__cDNA_P Parameter: Timepoint (hr) Value: 6
  misc_feature: MA Experiment 108569 PARAMETER Experiment Name: At_0.001%_MeJA__cDNA_P Parameter: Tissue Value: Aerial
  misc_feature: MA Experiment 108569 PARAMETER Experiment Name: At_0.001%_MeJA__cDNA_P Parameter: Treatment Value: 0.001% MeJA vs. No Treatment
  misc_feature: MA Experiment ID: 108595 Result: Down-regulated in Transcription
  misc_feature: MA Experiment 108595 PARAMETER Experiment Name: At_Ler-pi_Ovule_cDNA_P Parameter: Plant Line Value: null
  misc_feature: MA Experiment ID: 20000496 Result: Down-regulated in Transcription
  misc_feature: MA Experiment 20000496 PARAMETER Experiment Name: At_Guard_Cells_P Parameter: Harvest Date Value: 7/19/2002
  misc_feature: MA Experiment 20000496 PARAMETER Experiment Name: At_Guard_Cells_P Parameter: Organism Value: Canola
  misc_feature: MA Experiment 20000496 PARAMETER Experiment Name: At_Guard_Cells_P Parameter: Tissue Value: Guard Cells vs. Leaves
gtcgatcacatcaataaacgcattttcccttttcgtatccgccggaaaaaaataacgtcttttttttttttccaatctctctgtctctctccccaattcccagattctcatttttgcagagattttaggaggaacatgattgtttgaattgggagagacattggttcttgtaaaatgcgggtgcttggtttgagctcaagcttatgctctggtgaggataaggaagaagaagagattaatggagaaggctctctcacgcctgtttatctcaacgtctatgatctaactcctgtcaacaattatctctattggttcggccttggcatatttcactctggcattgaggctcatggtttcgagtatggatatggagctcatgagtattcgagcagtggggtatttgaggttgaacctaggagctgtccaggtttcatctttaggcgctcagttttgttgggaaccaccagcatgtctcgctctgatttccgctcattcatggagaagctttcgagaaagtatcatggggacacataccatttgattgccaaaaactgtaaccatttcactgaagaagtatgcttgcaggtaacaggaaagcctattcctggatggattaatcggatggctcgagttggttctttctgtaactgtatccttccagaaagcatacagctctcatcggttaatcatccggaagccctcgagttctctgatgataacgatggatcagaagaatcagttgcatcttctgtgtcatacgaaacagatggagaaggatcggatcatcatctcataacagcaccaaacagcgacattgcgtatctacaggacagaccagtgagacttgcccgtgagctcctccaagaaccaactgatgatacatctccgcagtacttgttgaagcggtcctgatcatcacaagcatcaacaacttgtgttgtctgtaaacagtgaggcaatggtccatatattgagtattctttggatctatcaatgtaaaaaaagatttaaatcagaacccatctgagatgttggattgtagtgtaagatttagagacaaatggtgtgacaaaaattgtgccttcttcttcttctcccaatgtgagttaacatttcagtgtc

SEQ ID NO: 24698 - protein, 245 aa, Arabidopsis thaliana
  peptide (1)..(245): Ceres Seq. ID no. 12384840
  misc_feature (28)..(151): Pfam Name: Eukaryotic protein of unknown function (DUF862) Pfam Description: Eukaryotic protein of unknown function (DUF862)
  misc_feature (29)..(170): Homolog of NCBI NO: 17529024 NR Description: unknown protein [Arabidopsis thaliana]
  misc_feature (29)..(170): Homolog of NCBI NO: 15236618 NR Description: putative protein; protein id: At4g31980.1
  misc_feature (22)..(194): Homolog of NCBI NO: 9802596 NR Description: T2E6.19 [Arabidopsis thaliana]
  misc_feature (25)..(177): Homolog of NCBI NO: 18420889 NR Description: putative protein
  misc_feature (22)..(194): Homolog of NCBI NO: 21593644 NR Description: unknown [Arabidopsis thaliana]
  misc_feature (22)..(194): Homolog of NCBI NO: 18401869 NR Description: expressed protein
  misc_feature (22)..(214): Homolog of NCBI NO: 38346173 NR Description: OSJNBa0079A21.20 [Oryza sativa (japonica
  misc_feature (34)..(227): Homolog of NCBI NO: 7488100 NR Description: probable EREBP-4 - Arabidopsis thaliana
  misc_feature (1)..(227): Homolog of NCBI NO: 30684058 NR Description: expressed protein [Arabidopsis thaliana]
  misc_feature (1)..(245): Homolog of NCBI NO: 15238059 NR Description: putative protein; protein id: At5g47310.1
MRVLGLSSSLCSGEDKEEEEINGEGSLTPVYLNVYDLTPVNNYLYWFGLGIFHSGIEAHGFEYGYGAHEYSSSGVFEVEPRSCPGFIFRRSVLLGTTSMSRSDFRSFMEKLSRKYHGDTYHLIAKNCNHFTEEVCLQVTGKPIPGWINRMARVGSFCNCILPESIQLSSVNHPEALEFSDDNDGSEESVASSVSYETDGEGSDHHLITAPNSDIAYLQDRPVRLARELLQEPTDDTSPQYLLKRS

SEQ ID NO: 24699 - protein, 147 aa, Arabidopsis thaliana
  peptide (1)..(147): Ceres Seq. ID no. 12384841
  misc_feature (1)..(53): Pfam Name: Eukaryotic protein of unknown function (DUF862) Pfam Description: Eukaryotic protein of unknown function (DUF862)
  misc_feature (1)..(72): Homolog of NCBI NO: 17529024 NR Description: unknown protein [Arabidopsis thaliana]
  misc_feature (1)..(72): Homolog of NCBI NO: 15236618 NR Description: putative protein; protein id: At4g31980.1
  misc_feature (1)..(96): Homolog of NCBI NO: 9802596 NR Description: T2E6.19 [Arabidopsis thaliana]
  misc_feature (1)..(79): Homolog of NCBI NO: 18420889 NR Description: putative protein
  misc_feature (1)..(96): Homolog of NCBI NO: 21593644 NR Description: unknown [Arabidopsis thaliana]
  misc_feature (1)..(96): Homolog of NCBI NO: 18401869 NR Description: expressed protein
  misc_feature (1)..(116): Homolog of NCBI NO: 38346173 NR Description: OSJNBa0079A21.20 [Oryza sativa (japonica
  misc_feature (1)..(129): Homolog of NCBI NO: 7488100 NR Description: probable EREBP-4 - Arabidopsis thaliana
  misc_feature (1)..(129): Homolog of NCBI NO: 30684058 NR Description: expressed protein [Arabidopsis thaliana]
  misc_feature (1)..(147): Homolog of NCBI NO: 15238059 NR Description: putative protein; protein id: At5g47310.1
MSRSDFRSFMEKLSRKYHGDTYHLIAKNCNHFTEEVCLQVTGKPIPGWINRMARVGSFCNCILPESIQLSSVNHPEALEFSDDNDGSEESVASSVSYETDGEGSDHHLITAPNSDIAYLQDRPVRLARELLQEPTDDTSPQYLLKRS

SEQ ID NO: 24700 - protein, 138 aa, Arabidopsis thaliana
  peptide (1)..(138): Ceres Seq. ID no. 12384842
  misc_feature (1)..(63): Homolog of NCBI NO: 17529024 NR Description: unknown protein [Arabidopsis thaliana]
  misc_feature (1)..(63): Homolog of NCBI NO: 15236618 NR Description: putative protein; protein id: At4g31980.1
  misc_feature (1)..(87): Homolog of NCBI NO: 9802596 NR Description: T2E6.19 [Arabidopsis thaliana]
  misc_feature (1)..(70): Homolog of NCBI NO: 18420889 NR Description: putative protein
  misc_feature (1)..(87): Homolog of NCBI NO: 21593644 NR Description: unknown [Arabidopsis thaliana]
  misc_feature (1)..(87): Homolog of NCBI NO: 18401869 NR Description: expressed protein
  misc_feature (1)..(107): Homolog of NCBI NO: 38346173 NR Description: OSJNBa0079A21.20 [Oryza sativa (japonica
  misc_feature (1)..(120): Homolog of NCBI NO: 7488100 NR Description: probable EREBP-4 - Arabidopsis thaliana
  misc_feature (1)..(120): Homolog of NCBI NO: 30684058 NR Description: expressed protein [Arabidopsis thaliana]
  misc_feature (1)..(138): Homolog of NCBI NO: 15238059 NR Description: putative protein; protein id: At5g47310.1
MEKLSRKYHGDTYHLIAKNCNHFTEEVCLQVTGKPIPGWINRMARVGSFCNCILPESIQLSSVNHPEALEFSDDNDGSEESVASSVSYETDGEGSDHHLITAPNSDIAYLQDRPVRLARELLQEPTDDTSPQYLLKRS

SEQ ID NO: 24701 - DNA, 1471 bp, Arabidopsis thaliana
  misc_feature (1)..(1471): Ceres Seq. ID no. 12335411
  misc_feature: MA Experiment ID: 108434 Result: Up-regulated in Transcription
  misc_feature: MA Experiment 108434 PARAMETER Experiment Name: At_Root_Tips_cDNA_P Parameter: Tissue Value: Root Tips
  misc_feature: MA Experiment ID: 20000111 Result: Up-regulated in Transcription
  misc_feature: MA Experiment 20000111 PARAMETER Experiment Name: At_42deg_Heat_cDNA_P Parameter: Temperature (deg C) Value: 42 vs. 22
  misc_feature: MA Experiment 20000111 PARAMETER Experiment Name: At_42deg_Heat_cDNA_P Parameter: Timepoint (hr) Value: 6
  misc_feature: MA Experiment 20000111 PARAMETER Experiment Name: At_42deg_Heat_cDNA_P Parameter: Tissue Value: Aerial
  misc_feature: MA Experiment ID: 20000117 Result: Down-regulated in Transcription
  misc_feature: MA Experiment 20000117 PARAMETER Experiment Name: At_100uM_ABA_Mutants_cDNA_P Parameter: Plant Line Value: Columbia
  misc_feature: MA Experiment 20000117 PARAMETER Experiment Name: At_100uM_ABA_Mutants_cDNA_P Parameter: Timepoint (hr) Value: 6
  misc_feature: MA Experiment 20000117 PARAMETER Experiment Name: At_100uM_ABA_Mutants_cDNA_P Parameter: Tissue Value: Aerial
  misc_feature: MA Experiment 20000117 PARAMETER Experiment Name: At_100uM_ABA_Mutants_cDNA_P Parameter: Treatment Value: 100uM ABA vs. No Treatment
aatcgatggagttgggatccagacgaatctacacgacgatgccgtcgaagctccgatcttcttcttcacttcttccacgtattctgctcctttctctcttattactccttttctattccttaattctccgccgtccgattacttcaaacattgcctctcctccgccgtgcgatctcttctccggcagatgggttttcaatccagaaactccgaaaccgttgtacgacgagacttgtcctttccacagaaacgcttggaattgcttacggaacaagcgagataatatggatgttatcaattcatggagatgggagcccaatggatgtggattgagtcgaattgacccgacccggtttctagggatgatgaggaacaagaatgttgggtttgttggggattctctgaatgagaatttcttggtttcgttcttgtgtatacttagagtggctgatccaagtgctattaagtggaagaagaaaaaagcttggcgtggagcttacttccctaagttcaatgtcactgttgcttatcacagagctgttcttctcgctaaatatcagtggcaggcgagatcttctgctgaagctaatcaagacggagtgaaaggaacttatcgagttgatgttgatgttcctgcaaatgagtggatcaacgtcactagcttctatgatgttctcatatttaactctggccattggtggggttacgataagtttcctaaagagacacctcttgtcttctaccgaaagggaaagccgataaatcctcctcttgatatattaccaggatttgaactagttcttcaaaatatggtttcttatatccaaagagaagtccctgcgaagacccttaagttctggcgtttgcaatcaccaaggcatttctatggtggtgattggaaccagaatggaagttgtttgctcgataagccactcgaagaaaaccagcttgacttgtggtttgatcccaggaacaatggagtgaacaaagaagcaagaaagattaaccaaatcatcaagaatgagttgcaaacgacaaagatcaagttacttgatctgacccatctaagcgaattcagagcagatgcccacccagcgatctggttagggaagcaggacgcggtggcaatatggggacaagactgtatgcattggtgcctacccggtgttcctgacacatgggtcgatatattagcggaactcattctcactaacttaaaaacagagtgaagacgctatcaggagtcgagaacagagacttgcttgagcatatggaagctcaaatgtcggaaaggttccatcttttggttttaactgtaaatgattcatatctggatgaaattttgttcctttaccaagacatcttctcaaaacacaaacatttaacttgtattgtgtctcttgcttgtaactactgtttccatgaagttaatgtttttgcaattggggatctgcatatagaaagatgctct

SEQ ID NO: 24702 - protein, 408 aa, Arabidopsis thaliana
  peptide (1)..(408): Ceres Seq. ID no. 12335412
  misc_feature (232)..(401): Pfam Name: Arabidopsis proteins of unknown function Pfam Description: Arabidopsis proteins of unknown function
  misc_feature (50)..(402): Homolog of NCBI NO: 15229945 NR Description: hypothetical protein; protein id: At3g12060.1
  misc_feature (56)..(393): Homolog of NCBI NO: 15228743 NR Description: putative protein
  misc_feature (56)..(402): Homolog of NCBI NO: 21592371 NR Description: unknown [Arabidopsis thaliana]
  misc_feature (56)..(402): Homolog of NCBI NO: 15242021 NR Description: putative protein
  misc_feature (35)..(408): Homolog of NCBI NO: 15229797 NR Description: hypothetical protein; protein id: At3g11570.1
  misc_feature (11)..(403): Homolog of NCBI NO: 15225951 NR Description: hypothetical protein
  misc_feature (27)..(402): Homolog of NCBI NO: 29027820 NR Description: OSJNBb0055I24.1 [Oryza sativa (japonica
  misc_feature (2)..(324): Homolog of NCBI NO: 16226907 NR Description: AT5g64470/T12B11_6 [Arabidopsis thaliana]
  misc_feature (2)..(324): Homolog of NCBI NO: 30698028 NR Description: expressed protein [Arabidopsis thaliana]
  misc_feature (2)..(408): Homolog of NCBI NO: 15237710 NR Description: putative protein
SMELGSRRIYTTMPSKLRSSSSLLPRILLLSLLLLLFYSLILRRPITSNIASPPPCDLFSGRWVFNPETPKPLYDETCPFHRNAWNCLRNKRDNMDVINSWRWEPNGCGLSRIDPTRFLGMMRNKNVGFVGDSLNENFLVSFLCILRVADPSAIKWKKKKAWRGAYFPKFNVTVAYHRAVLLAKYQWQARSSAEANQDGVKGTYRVDVDVPANEWINVTSFYDVLIFNSGHWWGYDKFPKETPLVFYRKGKPINPPLDILPGFELVLQNMVSYIQREVPAKTLKFWRLQSPRHFYGGDWNQNGSCLLDKPLEENQLDLWFDPRNNGVNKEARKINQIIKNELQTTKIKLLDLTHLSEFRADAHPAIWLGKQDAVAIWGQDCMHWCLPGVPDTWVDILAELILTNLKTE

SEQ ID NO: 24703 - protein, 407 aa, Arabidopsis thaliana
  peptide (1)..(407): Ceres Seq. ID no. 12335413
  misc_feature (231)..(400): Pfam Name: Arabidopsis proteins of unknown function Pfam Description: Arabidopsis proteins of unknown function
  misc_feature (49)..(401): Homolog of NCBI NO: 15229945 NR Description: hypothetical protein; protein id: At3g12060.1
  misc_feature (55)..(392): Homolog of NCBI NO: 15228743 NR Description: putative protein
  misc_feature (55)..(401): Homolog of NCBI NO: 21592371 NR Description: unknown [Arabidopsis thaliana]
  misc_feature (55)..(401): Homolog of NCBI NO: 15242021 NR Description: putative protein
  misc_feature (34)..(407): Homolog of NCBI NO: 15229797 NR Description: hypothetical protein; protein id: At3g11570.1
  misc_feature (10)..(402): Homolog of NCBI NO: 15225951 NR Description: hypothetical protein
  misc_feature (26)..(401): Homolog of NCBI NO: 29027820 NR Description: OSJNBb0055I24.1 [Oryza sativa (japonica
  misc_feature (1)..(323): Homolog of NCBI NO: 16226907 NR Description: AT5g64470/T12B11_6 [Arabidopsis thaliana]
  misc_feature (1)..(323): Homolog of NCBI NO: 30698028 NR Description: expressed protein [Arabidopsis thaliana]
  misc_feature (1)..(407): Homolog of NCBI NO: 15237710 NR Description: putative protein
MELGSRRIYTTMPSKLRSSSSLLPRILLLSLLLLLFYSLILRRPITSNIASPPPCDLFSGRWVFNPETPKPLYDETCPFHRNAWNCLRNKRDNMDVINSWRWEPNGCGLSRIDPTRFLGMMRNKNVGFVGDSLNENFLVSFLCILRVADPSAIKWKKKKAWRGAYFPKFNVTVAYHRAVLLAKYQWQARSSAEANQDGVKGTYRVDVDVPANEWINVTSFYDVLIFNSGHWWGYDKFPKETPLVFYRKGKPINPPLDILPGFELVLQNMVSYIQREVPAKTLKFWRLQSPRHFYGGDWNQNGSCLLDKPLEENQLDLWFDPRNNGVNKEARKINQIIKNELQTTKIKLLDLTHLSEFRADAHPAIWLGKQDAVAIWGQDCMHWCLPGVPDTWVDILAELILTNLKTE

SEQ ID NO: 24704 - protein, 396 aa, Arabidopsis thaliana
  peptide (1)..(396): Ceres Seq. ID no. 12335414
  misc_feature (220)..(389): Pfam Name: Arabidopsis proteins of unknown function Pfam Description: Arabidopsis proteins of unknown function
  misc_feature (1)..(396): Homolog of NCBI NO: 15237710 NR Description: putative protein
  misc_feature (1)..(312): Homolog of NCBI NO: 16226907 NR Description: AT5g64470/T12B11_6 [Arabidopsis thaliana]
  misc_feature (1)..(312): Homolog of NCBI NO: 30698028 NR Description: expressed protein [Arabidopsis thaliana]
  misc_feature (38)..(390): Homolog of NCBI NO: 15229945 NR Description: hypothetical protein; protein id: At3g12060.1
  misc_feature (44)..(381): Homolog of NCBI NO: 15228743 NR Description: putative protein
  misc_feature (44)..(390): Homolog of NCBI NO: 21592371 NR Description: unknown [Arabidopsis thaliana]
  misc_feature (44)..(390): Homolog of NCBI NO: 15242021 NR Description: putative protein
  misc_feature (23)..(396): Homolog of NCBI NO: 15229797 NR Description: hypothetical protein; protein id: At3g11570.1
  misc_feature (1)..(391): Homolog of NCBI NO: 15225951 NR Description: hypothetical protein
  misc_feature (15)..(390): Homolog of NCBI NO: 29027820 NR Description: OSJNBb0055I24.1 [Oryza sativa (japonica
MPSKLRSSSSLLPRILLLSLLLLLFYSLILRRPITSNIASPPPCDLFSGRWVFNPETPKPLYDETCPFHRNAWNCLRNKRDNMDVINSWRWEPNGCGLSRIDPTRFLGMMRNKNVGFVGDSLNENFLVSFLCILRVADPSAIKWKKKKAWRGAYFPKFNVTVAYHRAVLLAKYQWQARSSAEANQDGVKGTYRVDVDVPANEWINVTSFYDVLIFNSGHWWGYDKFPKETPLVFYRKGKPINPPLDILPGFELVLQNMVSYIQREVPAKTLKFWRLQSPRHFYGGDWNQNGSCLLDKPLEENQLDLWFDPRNNGVNKEARKINQIIKNELQTTKIKLLDLTHLSEFRADAHPAIWLGKQDAVAIWGQDCMHWCLPGVPDTWVDILAELILTNLKTE

SEQ ID NO: 24705 - DNA, 1086 bp, Arabidopsis thaliana
  misc_feature (1)..(1086): Ceres Seq. ID no. 12377337
  misc_feature: MA Experiment ID: 20000307 Result: Up-regulated in Transcription
  misc_feature: MA Experiment 20000307 PARAMETER Experiment Name: At_Germinating_Seeds_Sub_P Parameter: Age (hr) Value: 24 vs. 0
  misc_feature: MA Experiment 20000307 PARAMETER Experiment Name: At_Germinating_Seeds_Sub_P Parameter: Organism Value: A. thaliana
  misc_feature: MA Experiment 20000307 PARAMETER Experiment Name: At_Germinating_Seeds_Sub_P Parameter: Plant Line Value: WS
  misc_feature: MA Experiment 20000307 PARAMETER Experiment Name: At_Germinating_Seeds_Sub_P Parameter: Tissue Value: Germinating Seeds
  misc_feature: MA Experiment ID: 20000315 Result: Down-regulated in Transcription
  misc_feature: MA Experiment 20000315 PARAMETER Experiment Name: At_14day_Shoots-Roots_Sub_P Parameter: Age (day) Value: 14
  misc_feature: MA Experiment 20000315 PARAMETER Experiment Name: At_14day_Shoots-Roots_Sub_P Parameter: Organism Value: A. thaliana
  misc_feature: MA Experiment 20000315 PARAMETER Experiment Name: At_14day_Shoots-Roots_Sub_P Parameter: Plant Line Value: WS
  misc_feature: MA Experiment 20000315 PARAMETER Experiment Name: At_14day_Shoots-Roots_Sub_P Parameter: Tissue Value: Shoots vs. Whole Plant
  misc_feature: MA Experiment ID: 20000440 Result: Up-regulated in Transcription
  misc_feature: MA Experiment 20000440 PARAMETER Experiment Name: At_Closed-Flower__Sub_P Parameter: Tissue Value: Closed Flower vs. Whole Plant
acaacaaaaattaaatcaaagatggactatatgagaatctttagtgtttttgtagtaacgttatggatcataagggttgatgctagggttttcggaggacgaggaatcgaaaaatttgtaactttcggtcagaattatattgttacgtggggacaaagtcatgtttctacactccattctggcgaagaagttgatctttacatggatcaatcttcaggtggtgggttcgaatccaaggacgcctacggatcaggtctctttgaaatgagaatcaaagtgccttcaggaaatactggcggcatcgtcaccgctttttacttgacgtcgaaaggaggtggtcacgacgagattgacttcgagtttctagggaacaacaacggaaaaccggtaacgttacagacaaatctgtttctaaatggagaaggaaacagagaagagaggtttttgctttggttcaatccaaccaaacactaccacacttatgggcttctttggaacccttaccaaattgtgttttacgtggacaacatcccaataagagtatacaaaaacgaaaacggcgtaagttatccatcaaagcctatgcaagtcgaggctagtctctggaacggtgacgattgggcgactgatggtggtcggactaaggttaactggtcatactctcctttcattgcacatttccgagacttcgccttatccggctgcaacatagatggtcggagtaataatgtcggcgcttgtgaatcctccaactactggtggaatgcaggcaactatcaaagattaagcggaaacgaacagaaactttatgaacatgtgaggagcaagtacatgaactatgactattgtactgatcgctctaagtaccaaactcctcctagagaatgttattgaagtaacatatatacgttaattatcatatacgtataggggatttttaaatctactttttctaattaagaaacaaaaaaattactgcttacgagttacaagagaagagagttaagttatagtgaaaatataattgtgtatgctcaaaatgtttttatatgattgcagaagataaataagatatgtttcttaact

SEQ ID NO: 24706 - protein, 297 aa, Arabidopsis thaliana
  peptide (1)..(297): Ceres Seq. ID no. 12377338
  misc_feature (42)..(220): Pfam Name: Glycosyl hydrolases family 16 Pfam Description: Glycosyl hydrolases family 16
  misc_feature (13)..(296): Homolog of NCBI NO: 38605155 NR Description: Probable xyloglucan
  misc_feature (40)..(296): Homolog of NCBI NO: 27228078 NR Description: xyloglucan endotransglycosylase precursor
  misc_feature (40)..(296): Homolog of NCBI NO: 38605156 NR Description: Xyloglucan endotransglucosylase/hydrolase protein
  misc_feature (40)..(296): Homolog of NCBI NO: 15225605 NR Description: xyloglucan endotransglycosylase (ext/EXGT-A1)
  misc_feature (40)..(296): Homolog of NCBI NO: 950299 NR Description: xyloglucan endotransglycosylase precursor
  misc_feature (12)..(296): Homolog of NCBI NO: 15240733 NR Description: xyloglucan endotransglycosylase (EXGT-A4)
  misc_feature (8)..(297): Homolog of NCBI NO: 22328589 NR Description: xyloglucan endotransglycosylase, putative
  misc_feature (6)..(297): Homolog of NCBI NO: 38605518 NR Description: Putative xyloglucan
  misc_feature (14)..(296): Homolog of NCBI NO: 15235587 NR Description: xyloglucan endotransglycosylase, putative
  misc_feature (8)..(297): Homolog of NCBI NO: 15230246 NR Description: xyloglucan endotransglycosylase, putative
TTKIKSKMDYMRIFSVFVVTLWIIRVDARVFGGRGIEKFVTFGQNYIVTWGQSHVSTLHSGEEVDLYMDQSSGGGFESKDAYGSGLFEMRIKVPSGNTGGIVTAFYLTSKGGGHDEIDFEFLGNNNGKPVTLQTNLFLNGEGNREERFLLWFNPTKHYHTYGLLWNPYQIVFYVDNIPIRVYKNENGVSYPSKPMQVEASLWNGDDWATDGGRTKVNWSYSPFIAHFRDFALSGCNIDGRSNNVGACESSNYWWNAGNYQRLSGNEQKLYEHVRSKYMNYDYCTDRSKYQTPPRECY

SEQ ID NO: 24707 - protein, 290 aa, Arabidopsis thaliana
  peptide (1)..(290): Ceres Seq. ID no. 12377339
  misc_feature (35)..(213): Pfam Name: Glycosyl hydrolases family 16 Pfam Description: Glycosyl hydrolases family 16
  misc_feature (6)..(289): Homolog of NCBI NO: 38605155 NR Description: Probable xyloglucan
  misc_feature (33)..(289): Homolog of NCBI NO: 27228078 NR Description: xyloglucan endotransglycosylase precursor
  misc_feature (33)..(289): Homolog of NCBI NO: 38605156 NR Description: Xyloglucan endotransglucosylase/hydrolase protein
  misc_feature (33)..(289): Homolog of NCBI NO: 15225605 NR Description: xyloglucan endotransglycosylase (ext/EXGT-A1)
  misc_feature (33)..(289): Homolog of NCBI NO: 950299 NR Description: xyloglucan endotransglycosylase precursor
  misc_feature (5)..(289): Homolog of NCBI NO: 15240733 NR Description: xyloglucan endotransglycosylase (EXGT-A4)
  misc_feature (1)..(290): Homolog of NCBI NO: 22328589 NR Description: xyloglucan endotransglycosylase, putative
  misc_feature (1)..(290): Homolog of NCBI NO: 38605518 NR Description: Putative xyloglucan
  misc_feature (7)..(289): Homolog of NCBI NO: 15235587 NR Description: xyloglucan endotransglycosylase, putative
  misc_feature (1)..(290): Homolog of NCBI NO: 15230246 NR Description: xyloglucan endotransglycosylase, putative
MDYMRIFSVFVVTLWIIRVDARVFGGRGIEKFVTFGQNYIVTWGQSHVSTLHSGEEVDLYMDQSSGGGFESKDAYGSGLFEMRIKVPSGNTGGIVTAFYLTSKGGGHDEIDFEFLGNNNGKPVTLQTNLFLNGEGNREERFLLWFNPTKHYHTYGLLWNPYQIVFYVDNIPIRVYKNENGVSYPSKPMQVEASLWNGDDWATDGGRTKVNWSYSPFIAHFRDFALSGCNIDGRSNNVGACESSNYWWNAGNYQRLSGNEQKLYEHVRSKYMNYDYCTDRSKYQTPPRECY

SEQ ID NO: 24708 - protein, 287 aa, Arabidopsis thaliana
  peptide (1)..(287): Ceres Seq. ID no. 12377340
  misc_feature (32)..(210): Pfam Name: Glycosyl hydrolases family 16 Pfam Description: Glycosyl hydrolases family 16
  misc_feature (3)..(286): Homolog of NCBI NO: 38605155 NR Description: Probable xyloglucan
  misc_feature (30)..(286): Homolog of NCBI NO: 27228078 NR Description: xyloglucan endotransglycosylase precursor
  misc_feature (30)..(286): Homolog of NCBI NO: 38605156 NR Description: Xyloglucan endotransglucosylase/hydrolase protein
  misc_feature (30)..(286): Homolog of NCBI NO: 15225605 NR Description: xyloglucan endotransglycosylase (ext/EXGT-A1)
  misc_feature (30)..(286): Homolog of NCBI NO: 950299 NR Description: xyloglucan endotransglycosylase precursor
  misc_feature (2)..(286): Homolog of NCBI NO: 15240733 NR Description: xyloglucan endotransglycosylase (EXGT-A4)
  misc_feature (1)..(287): Homolog of NCBI NO: 22328589 NR Description: xyloglucan endotransglycosylase, putative
  misc_feature (1)..(287): Homolog of NCBI NO: 38605518 NR Description: Putative xyloglucan
  misc_feature (4)..(286): Homolog of NCBI NO: 15235587 NR Description: xyloglucan endotransglycosylase, putative
  misc_feature (1)..(287): Homolog of NCBI NO: 15230246 NR Description: xyloglucan endotransglycosylase, putative
MRIFSVFVVTLWIIRVDARVFGGRGIEKFVTFGQNYIVTWGQSHVSTLHSGEEVDLYMDQSSGGGFESKDAYGSGLFEMRIKVPSGNTGGIVTAFYLTSKGGGHDEIDFEFLGNNNGKPVTLQTNLFLNGEGNREERFLLWFNPTKHYHTYGLLWNPYQIVFYVDNIPIRVYKNENGVSYPSKPMQVEASLWNGDDWATDGGRTKVNWSYSPFIAHFRDFALSGCNIDGRSNNVGACESSNYWWNAGNYQRLSGNEQKLYEHVRSKYMNYDYCTDRSKYQTPPRECY

SEQ ID NO: 24709 - DNA, 1320 bp, Arabidopsis thaliana
  misc_feature (1)..(1320): Ceres Seq. ID no. 12370359
  misc_feature: MA Experiment ID: 108469 Result: Up-regulated in Transcription
  misc_feature: MA Experiment ID: 108561 Result: Down-regulated in Transcription
  misc_feature: MA Experiment 108561 PARAMETER Experiment Name: At_100uM_ABA_cDNA_P Parameter: Timepoint (hr) Value: 6
  misc_feature: MA Experiment 108561 PARAMETER Experiment Name: At_100uM_ABA_cDNA_P Parameter: Tissue Value: Aerial
  misc_feature: MA Experiment 108561 PARAMETER Experiment Name: At_100uM_ABA_cDNA_P Parameter: Treatment Value: 100uM ABA vs. No Treatment
  misc_feature: MA Experiment ID: 108595 Result: Up-regulated in Transcription
  misc_feature: MA Experiment 108595 PARAMETER Experiment Name: At_Ler-pi_Ovule_cDNA_P Parameter: Plant Line Value: null
  misc_feature: MA Experiment ID: 108668 Result: Up-regulated in Transcription
  misc_feature: MA Experiment 108668 PARAMETER Experiment Name: At_2mM_SA_cDNA_P Parameter: Plant Line Value: WS
  misc_feature: MA Experiment 108668 PARAMETER Experiment Name: At_2mM_SA_cDNA_P Parameter: Timepoint (hr) Value: 6
  misc_feature: MA Experiment 108668 PARAMETER Experiment Name: At_2mM_SA_cDNA_P Parameter: Treatment Value: 2mM SA vs. No Treatment
  misc_feature: MA Experiment ID: 20000068 Result: Down-regulated in Transcription
  misc_feature: MA Experiment ID: 20000090 Result: Up-regulated in Transcription
  misc_feature: MA Experiment ID: 20000111 Result: Down-regulated in Transcription
  misc_feature: MA Experiment 20000111 PARAMETER Experiment Name: At_42deg_Heat_cDNA_P Parameter: Temperature (deg C) Value: 42 vs. 22
  misc_feature: MA Experiment 20000111 PARAMETER Experiment Name: At_42deg_Heat_cDNA_P Parameter: Timepoint (hr) Value: 6
  misc_feature: MA Experiment 20000111 PARAMETER Experiment Name: At_42deg_Heat_cDNA_P Parameter: Tissue Value: Aerial
  misc_feature: MA Experiment ID: 20000144 Result: Down-regulated in Transcription
  misc_feature: MA Experiment 20000144 PARAMETER Experiment Name: At_42deg_Heat_cDNA_P Parameter: Temperature (deg C) Value: 42 vs. 22
  misc_feature: MA Experiment 20000144 PARAMETER Experiment Name: At_42deg_Heat_cDNA_P Parameter: Timepoint (hr) Value: 1
  misc_feature: MA Experiment 20000144 PARAMETER Experiment Name: At_42deg_Heat_cDNA_P Parameter: Tissue Value: Aerial
  misc_feature: MA Experiment ID: 20000173 Result: Down-regulated in Transcription
  misc_feature: MA Experiment 20000173 PARAMETER Experiment Name: At_42deg_Heat_P Parameter: Age (day) Value: 14
  misc_feature: MA Experiment 20000173 PARAMETER Experiment Name: At_42deg_Heat_P Parameter: Organism Value: A. thaliana
  misc_feature: MA Experiment 20000173 PARAMETER Experiment Name: At_42deg_Heat_P Parameter: Plant Line Value: WS
  misc_feature: MA Experiment 20000173 PARAMETER Experiment Name: At_42deg_Heat_P Parameter: Temperature (deg C) Value: 42 vs. 22
  misc_feature: MA Experiment 20000173 PARAMETER Experiment Name: At_42deg_Heat_P Parameter: Timepoint (hr) Value: 6
  misc_feature: MA Experiment 20000173 PARAMETER Experiment Name: At_42deg_Heat_P Parameter: Tissue Value: Aerial
  misc_feature: MA Experiment ID: 20000182 Result: Up-regulated in Transcription
  misc_feature: MA Experiment 20000182 PARAMETER Experiment Name: At_2mM_SA_P Parameter: Age (day) Value: 14
  misc_feature: MA Experiment 20000182 PARAMETER Experiment Name: At_2mM_SA_P Parameter: Organism Value: A. thaliana
  misc_feature: MA Experiment 20000182 PARAMETER Experiment Name: At_2mM_SA_P Parameter: Plant Line Value: WS
  misc_feature: MA Experiment 20000182 PARAMETER Experiment Name: At_2mM_SA_P Parameter: Timepoint (hr) Value: 6
  misc_feature: MA Experiment 20000182 PARAMETER Experiment Name: At_2mM_SA_P Parameter: Tissue Value: Aerial
  misc_feature: MA Experiment 20000182 PARAMETER Experiment Name: At_2mM_SA_P Parameter: Treatment Value: 2mM SA vs. No Treatment
  misc_feature: MA Experiment ID: 20000184 Result: Down-regulated in Transcription
  misc_feature: MA Experiment 20000184 PARAMETER Experiment Name: At_Shoots__P Parameter: Age (day) Value: 7
  misc_feature: MA Experiment 20000184 PARAMETER Experiment Name: At_Shoots__P Parameter: Tissue Value: Shoots vs. Whole Plant
  misc_feature: MA Experiment ID: 20000185 Result: Down-regulated in Transcription
  misc_feature: MA Experiment 20000185 PARAMETER Experiment Name: At_Roots__P Parameter: Age (day) Value: 7 vs. 21
  misc_feature: MA Experiment 20000185 PARAMETER Experiment Name: At_Roots__P Parameter: Organism Value: A. thaliana
  misc_feature: MA Experiment 20000185 PARAMETER Experiment Name: At_Roots__P Parameter: Tissue Value: Roots vs. Whole Plant
  misc_feature: MA Experiment ID: 20000235 Result: Down-regulated in Transcription
  misc_feature: MA Experiment 20000235 PARAMETER Experiment Name: At_Siliques_P Parameter: Age (day) Value: 21
  misc_feature: MA Experiment 20000235 PARAMETER Experiment Name: At_Siliques_P Parameter: Organism Value: A. thaliana
  misc_feature: MA Experiment 20000235 PARAMETER Experiment Name: At_Siliques_P Parameter: Plant Line Value: WS
  misc_feature: MA Experiment 20000235 PARAMETER Experiment Name: At_Siliques_P Parameter: Tissue Value: 5-10mm Siliques vs. Whole Plant
  misc_feature: MA Experiment ID: 20000264 Result: Down-regulated in Transcription
  misc_feature: MA Experiment 20000264 PARAMETER Experiment Name: At_Open_Flower_P Parameter: Age (day) Value: 21
  misc_feature: MA Experiment 20000264 PARAMETER Experiment Name: At_Open_Flower_P Parameter: Plant Line Value: WS
  misc_feature: MA Experiment 20000264 PARAMETER Experiment Name: At_Open_Flower_P Parameter: Tissue Value: Open Flower vs. Whole Plant
  misc_feature: MA Experiment ID: 20000265 Result: Down-regulated in Transcription
  misc_feature: MA Experiment 20000265 PARAMETER Experiment Name: At_Open_Flower_P Parameter: Age (day) Value: 21
  misc_feature: MA Experiment 20000265 PARAMETER Experiment Name: At_Open_Flower_P Parameter: Plant Line Value: WS
  misc_feature: MA Experiment 20000265 PARAMETER Experiment Name: At_Open_Flower_P Parameter: Tissue Value: Closed Flower vs. Whole Plant
  misc_feature: MA Experiment ID: 20000286 Result: Down-regulated in Transcription
  misc_feature: MA Experiment 20000286 PARAMETER Experiment Name: At_Open_Flower_P Parameter: Age (day) Value: 21
  misc_feature: MA Experiment 20000286 PARAMETER Experiment Name: At_Open_Flower_P Parameter: Plant Line Value: WS
  misc_feature: MA Experiment 20000286 PARAMETER Experiment Name: At_Open_Flower_P Parameter: Tissue Value: Half Open vs. Whole Plant
  misc_feature: MA Experiment ID: 20000439 Result: Down-regulated in Transcription
  misc_feature: MA Experiment 20000439 PARAMETER Experiment Name: At_Roots__P Parameter: Age (day) Value: 14 vs. 21
  misc_feature: MA Experiment 20000439 PARAMETER Experiment Name: At_Roots__P Parameter: Organism Value: A. thaliana
  misc_feature: MA Experiment 20000439 PARAMETER Experiment Name: At_Roots__P Parameter: Tissue Value: Roots vs. Whole Plant
  misc_feature: MA Experiment ID: 20000573 Result: Up-regulated in Transcription
  misc_feature: MA Experiment 20000573 PARAMETER Experiment Name: At_100uM_ABA_Mutants__P Parameter: Organism Value: A. thaliana
  misc_feature: MA Experiment 20000573 PARAMETER Experiment Name: At_100uM_ABA_Mutants__P Parameter: Plant Line Value: CS22 vs. Ler wt
  misc_feature: MA Experiment 20000573 PARAMETER Experiment Name: At_100uM_ABA_Mutants__P Parameter: Timepoint (hr) Value: N/A
  misc_feature: MA Experiment 20000573 PARAMETER Experiment Name: At_100uM_ABA_Mutants__P Parameter: Tissue Value: Whole Plant
  misc_feature: MA Experiment 20000573 PARAMETER Experiment Name: At_100uM_ABA_Mutants__P Parameter: Treatment Value: None
  misc_feature: MA Experiment ID: 20000574 Result: Up-regulated in Transcription
  misc_feature: MA Experiment 20000574 PARAMETER Experiment Name: At_100uM_ABA_Mutants__P Parameter: Organism Value: A. thaliana
  misc_feature: MA Experiment 20000574 PARAMETER Experiment Name: At_100uM_ABA_Mutants__P Parameter: Plant Line Value: CS23 vs. Ler wt
  misc_feature: MA Experiment 20000574 PARAMETER Experiment Name: At_100uM_ABA_Mutants__P Parameter: Timepoint (hr) Value: N/A
  misc_feature: MA Experiment 20000574 PARAMETER Experiment Name: At_100uM_ABA_Mutants__P Parameter: Tissue Value: Whole Plant
  misc_feature: MA Experiment 20000574 PARAMETER Experiment Name: At_100uM_ABA_Mutants__P Parameter: Treatment Value: None
  misc_feature: MA Experiment ID: 20000576 Result: Down-regulated in Transcription
  misc_feature: MA Experiment 20000576 PARAMETER Experiment Name: At_100uM_ABA_Mutants__P Parameter: Organism Value: A. thaliana
  misc_feature: MA Experiment 20000576 PARAMETER Experiment Name: At_100uM_ABA_Mutants__P Parameter: Plant Line Value: CS23
  misc_feature: MA Experiment 20000576 PARAMETER Experiment Name: At_100uM_ABA_Mutants__P Parameter: Timepoint (hr) Value: 6
  misc_feature: MA Experiment 20000576 PARAMETER Experiment Name: At_100uM_ABA_Mutants__P Parameter: Tissue Value: Whole Plant
  misc_feature: MA Experiment 20000576 PARAMETER Experiment Name: At_100uM_ABA_Mutants__P Parameter: Treatment Value: 1uM ABA vs. No Treatment
  misc_feature: MA Experiment ID: 20000606 Result: Up-regulated in Transcription
  misc_feature: MA Experiment 20000606 PARAMETER Experiment Name: At_CS8548_Mutant_P Parameter: Age (day) Value: 14
  misc_feature: MA Experiment 20000606 PARAMETER Experiment Name: At_CS8548_Mutant_P Parameter: Plant Line Value: CS8548 vs. wt
  misc_feature: MA Experiment 20000606 PARAMETER Experiment Name: At_CS8548_Mutant_P Parameter: Tissue Value: Whole Plant
  misc_feature: MA Experiment ID: 20000709 Result: Down-regulated in Transcription
  misc_feature: MA Experiment 20000709 PARAMETER Experiment Name: At_15mM_NH4NO3_L-to-H_P Parameter: Age (hr) Value: 14
  misc_feature: MA Experiment 20000709 PARAMETER Experiment Name: At_15mM_NH4NO3_L-to-H_P Parameter: Organism Value: A. thaliana
  misc_feature: MA Experiment 20000709 PARAMETER Experiment Name: At_15mM_NH4NO3_L-to-H_P Parameter: Plant Line Value: WS
  misc_feature: MA Experiment 20000709 PARAMETER Experiment Name: At_15mM_NH4NO3_L-to-H_P Parameter: Timepoint (hr) Value: 4
  misc_feature: MA Experiment 20000709 PARAMETER Experiment Name: At_15mM_NH4NO3_L-to-H_P Parameter: Tissue Value: Aerial
  misc_feature: MA Experiment 20000709 PARAMETER Experiment Name: At_15mM_NH4NO3_L-to-H_P Parameter: Treatment Value: 15mM NH4NO3 vs. 30mM Mannitol
  misc_feature: MA Experiment ID: 20000794 Result: Down-regulated in Transcription
  misc_feature: MA Experiment 20000794 PARAMETER Experiment Name: At_Petals_P Parameter: Age (day) Value: 23-25 days
  misc_feature: MA Experiment 20000794 PARAMETER Experiment Name: At_Petals_P Parameter: Plant Line Value: WS
  misc_feature: MA Experiment 20000794 PARAMETER Experiment Name: At_Petals_P Parameter: Tissue Value: Petals vs. Whole plant
  misc_feature: MA Experiment ID: 20001554 Result: Down-regulated in Transcription
  misc_feature: MA Experiment 20001554 PARAMETER Experiment Name: At_Drought_Soil_Dry_P Parameter: Age (day) Value: 21
  misc_feature: MA Experiment 20001554 PARAMETER Experiment Name: At_Drought_Soil_Dry_P Parameter: Organism Value: A. thaliana
  misc_feature: MA Experiment 20001554 PARAMETER Experiment Name: At_Drought_Soil_Dry_P Parameter: Plant Line Value: WS
  misc_feature: MA Experiment 20001554 PARAMETER Experiment Name: At_Drought_Soil_Dry_P Parameter: Post Timepoint (hr) Value: None
  misc_feature: MA Experiment 20001554 PARAMETER Experiment Name: At_Drought_Soil_Dry_P Parameter: Post-Treatment Value: None
  misc_feature: MA Experiment 20001554 PARAMETER Experiment Name: At_Drought_Soil_Dry_P Parameter: Timepoint (day) Value: 7
  misc_feature: MA Experiment 20001554 PARAMETER Experiment Name: At_Drought_Soil_Dry_P Parameter: Treatment Value: Drought vs. No Drought
  misc_feature: MA Experiment ID: 20001555 Result: Down-regulated in Transcription
  misc_feature: MA Experiment 20001555 PARAMETER Experiment Name: At_Drought_Soil_Dry_P Parameter: Age (day) Value: 24
  misc_feature: MA Experiment 20001555 PARAMETER Experiment Name: At_Drought_Soil_Dry_P Parameter: Organism Value: A. thaliana
  misc_feature: MA Experiment 20001555 PARAMETER Experiment Name: At_Drought_Soil_Dry_P Parameter: Plant Line Value: WS
  misc_feature: MA Experiment 20001555 PARAMETER Experiment Name: At_Drought_Soil_Dry_P Parameter: Post Timepoint (hr) Value: None
  misc_feature: MA Experiment 20001555 PARAMETER Experiment Name: At_Drought_Soil_Dry_P Parameter: Post-Treatment Value: None
  misc_feature: MA Experiment 20001555 PARAMETER Experiment Name: At_Drought_Soil_Dry_P Parameter: Timepoint (day) Value: 10
  misc_feature: MA Experiment 20001555 PARAMETER Experiment Name: At_Drought_Soil_Dry_P Parameter: Treatment Value: Drought vs. No Drought
  misc_feature: MA Experiment ID: 20001556 Result: Down-regulated in Transcription
  misc_feature: MA Experiment 20001556 PARAMETER Experiment Name: At_Drought_Soil_Dry_P Parameter: Age (day) Value: 26
  misc_feature: MA Experiment 20001556 PARAMETER Experiment Name: At_Drought_Soil_Dry_P Parameter: Organism Value: A. thaliana
  misc_feature: MA Experiment 20001556 PARAMETER Experiment Name: At_Drought_Soil_Dry_P Parameter: Plant Line Value: WS
  misc_feature: MA Experiment 20001556 PARAMETER Experiment Name: At_Drought_Soil_Dry_P Parameter: Post Timepoint (hr) Value: None
  misc_feature: MA Experiment 20001556 PARAMETER Experiment Name: At_Drought_Soil_Dry_P Parameter: Post-Treatment Value: None
  misc_feature: MA Experiment 20001556 PARAMETER Experiment Name: At_Drought_Soil_Dry_P Parameter: Timepoint (day) Value: 12
  misc_feature: MA Experiment 20001556 PARAMETER Experiment Name: At_Drought_Soil_Dry_P Parameter: Treatment Value: Drought vs. No Drought
  misc_feature: MA Experiment ID: 20001557 Result: Down-regulated in Transcription
  misc_feature: MA Experiment 20001557 PARAMETER Experiment Name: At_Drought_Soil_Dry_P Parameter: Age (day) Value: 27
  misc_feature: MA Experiment 20001557 PARAMETER Experiment Name: At_Drought_Soil_Dry_P Parameter: Organism Value: A. thaliana
  misc_feature: MA Experiment 20001557 PARAMETER Experiment Name: At_Drought_Soil_Dry_P Parameter: Plant Line Value: WS
  misc_feature: MA Experiment 20001557 PARAMETER Experiment Name: At_Drought_Soil_Dry_P Parameter: Post Timepoint (hr) Value: 3
  misc_feature: MA Experiment 20001557 PARAMETER Experiment Name: At_Drought_Soil_Dry_P Parameter: Post-Treatment Value: Re-Water vs. No Drought
  misc_feature: MA Experiment 20001557 PARAMETER Experiment Name: At_Drought_Soil_Dry_P Parameter: Timepoint (day) Value: 13
  misc_feature: MA Experiment 20001557 PARAMETER Experiment Name: At_Drought_Soil_Dry_P Parameter: Treatment Value: Drought vs. No Drought
  misc_feature: MA Experiment ID: 20001558 Result: Down-regulated in Transcription
  misc_feature: MA Experiment 20001558 PARAMETER Experiment Name: At_Drought_Soil_Dry_P Parameter: Age (day) Value: 27
  misc_feature: MA Experiment 20001558 PARAMETER Experiment Name: At_Drought_Soil_Dry_P Parameter: Organism Value: A. thaliana
  misc_feature: MA Experiment 20001558 PARAMETER Experiment Name: At_Drought_Soil_Dry_P Parameter: Plant Line Value: WS
  misc_feature: MA Experiment 20001558 PARAMETER Experiment Name: At_Drought_Soil_Dry_P Parameter: Post Timepoint (hr) Value: 6
  misc_feature: MA Experiment 20001558 PARAMETER Experiment Name: At_Drought_Soil_Dry_P Parameter: Post-Treatment Value: Re-Water vs. No Drought
  misc_feature: MA Experiment 20001558 PARAMETER Experiment Name: At_Drought_Soil_Dry_P Parameter: Timepoint (day) Value: 13
  misc_feature: MA Experiment 20001558 PARAMETER Experiment Name: At_Drought_Soil_Dry_P Parameter: Treatment Value: Drought vs. No Drought
  misc_feature: MA Experiment ID: 20001559 Result: Down-regulated in Transcription
  misc_feature: MA Experiment 20001559 PARAMETER Experiment Name: At_Drought_Soil_Dry_P Parameter: Age (day) Value: 28
  misc_feature: MA Experiment 20001559 PARAMETER Experiment Name: At_Drought_Soil_Dry_P Parameter: Organism Value: A. thaliana
  misc_feature: MA Experiment 20001559 PARAMETER Experiment Name: At_Drought_Soil_Dry_P Parameter: Plant Line Value: WS
  misc_feature: MA Experiment 20001559 PARAMETER Experiment Name: At_Drought_Soil_Dry_P Parameter: Post Timepoint (hr) Value: 29
  misc_feature: MA Experiment 20001559 PARAMETER Experiment Name: At_Drought_Soil_Dry_P Parameter: Post-Treatment Value: Re-Water vs. No Drought
  misc_feature: MA Experiment 20001559 PARAMETER Experiment Name: At_Drought_Soil_Dry_P Parameter: Timepoint (day) Value: 14
  misc_feature: MA Experiment 20001559 PARAMETER Experiment Name: At_Drought_Soil_Dry_P Parameter: Treatment Value: Drought vs. No Drought
  misc_feature: MA Experiment ID: 20001560 Result: Down-regulated in Transcription
  misc_feature: MA Experiment 20001560 PARAMETER Experiment Name: At_Drought_Soil_Dry_P Parameter: Age (day) Value: 28
  misc_feature: MA Experiment 20001560 PARAMETER Experiment Name: At_Drought_Soil_Dry_P Parameter: Organism Value: A. thaliana
  misc_feature: MA Experiment 20001560 PARAMETER Experiment Name: At_Drought_Soil_Dry_P Parameter: Plant Line Value: WS
  misc_feature: MA Experiment 20001560 PARAMETER Experiment Name: At_Drought_Soil_Dry_P Parameter: Post Timepoint (hr) Value: None
  misc_feature: MA Experiment 20001560 PARAMETER Experiment Name: At_Drought_Soil_Dry_P Parameter: Post-Treatment Value: None
  misc_feature: MA Experiment 20001560 PARAMETER Experiment Name: At_Drought_Soil_Dry_P Parameter: Timepoint (day) Value: 14
  misc_feature: MA Experiment 20001560 PARAMETER Experiment Name: At_Drought_Soil_Dry_P Parameter: Treatment Value: Drought vs. No Drought
  misc_feature: MA Experiment ID: 20001757 Result: Up-regulated in Transcription
  misc_feature: MA Experiment 20001757 PARAMETER Experiment Name: At_50mM_NH4NO3_L-to-H_P Parameter: Timepoint (hr) Value: 6
  misc_feature: MA Experiment 20001757 PARAMETER Experiment Name: At_50mM_NH4NO3_L-to-H_P Parameter: Tissue Value: Leaf
  misc_feature: MA Experiment 20001757 PARAMETER Experiment Name: At_50mM_NH4NO3_L-to-H_P Parameter: Treatment Value: 50mM NH4NO3 vs 100mM Mannitol
  misc_feature: MA Experiment ID: 20001904 Result: Down-regulated in Transcription
  misc_feature: MA Experiment 20001904 PARAMETER Experiment Name: At_Drought_Reproduction_P Parameter: Age (day) Value: 37
  misc_feature: MA Experiment 20001904 PARAMETER Experiment Name: At_Drought_Reproduction_P Parameter: Organism Value: A. thaliana
  misc_feature: MA Experiment 20001904 PARAMETER Experiment Name: At_Drought_Reproduction_P Parameter: Plant Line Value: WS
  misc_feature: MA Experiment 20001904 PARAMETER Experiment Name: At_Drought_Reproduction_P Parameter: Timepoint (day) Value: 7
  misc_feature: MA Experiment 20001904 PARAMETER Experiment Name: At_Drought_Reproduction_P Parameter: Tissue Value: Rosettes
  misc_feature: MA Experiment 20001904 PARAMETER Experiment Name: At_Drought_Reproduction_P Parameter: Treatment Value: Drought vs. No Drought
aaatgtgcctctttggttccaaagtcgctctgtaacttaagaaagagtgactgttccgttgacagagcaaaatggcccaaacctattgaaaaccccaaaacccttagtttggaatctcatctcattttgcttctgttcttttccatgtaatttcaacaaagtttgaaactttgtttctatagcaactcaattacatggaaattcttaaaagtctactctttaagtcgccctcttggctgaaactcttagcttcttgttataaaacctgaagttcgaaatcattccaataccacaaataactcaactttcttcaagcatggacaatgaagatcaggagtcccttttacttcaaggggttccagataattatggaggtgttaaggtgaacttgacagaaccaatgactattgaggattttgtcccaaagctgagagcttcacttgtgtattggagcaatcaggggacgaaggggatatggttaaagcttgccgatgggcttgacaatcttattgcacctgcaaaagcagaagggtttgtgtgccaccatgccgagagggaatacaccatgcttacatcttggatcgctgatgttcctagtactcttcctgccaatgcgtctcatcgtattggagttggtgcctttgtcctaaacaagaagaccaaagaggtgcttgtggtccaggagattgatggtcatttcaaaggtacaggagtgtggaaactgcctaccggtgttgttaaagagggtgagaatatttgggaaggagcacttagggaagtggaagaagaaactggtattaagacaaaatttgtagaagtcctggctttcagggaaagccaccaagcattcttggaaataaaaacggatatatttttcctctgtgagttagaaccaaccacttttgaaatcaagaaacaagactctgagatcttagctgctaagtggatgccaattgaagaatacgtaaaccaaccctggaaccagaagaaagaactgtttaggttcatggcgaacctctgcttgaagagattgcaggagatggaatacatgggtttctccaaagtccttactacgacttcatctgggaaagagagctatctttactgcaacaccgatcacgccaacctcctcaacgcaacgcggcctagcctccacctctggttgaaaaacccttcttcagaacgtgtttatgtttcgttgtttcatgtccattgttcaataaaagcaccagtctcgtgtgtacaacgattggagacttctttatgtaatttaccatcatttcctcactacaacttcatatataatatatttctttggct

SEQ ID NO: 24710 - protein, 334 aa, Arabidopsis thaliana
  peptide (1)..(334): Ceres Seq. ID no. 12370360
  misc_feature (102)..(237): Pfam Name: NUDIX domain Pfam Description: NUDIX domain
  misc_feature (161)..(265): Homolog of NCBI NO: 30686884 NR Description: MutT/nudix family protein [Arabidopsis thaliana]
  misc_feature (10)..(162): Homolog of NCBI NO: 30686884 NR Description: MutT/nudix family protein [Arabidopsis thaliana]
  misc_feature (10)..(265): Homolog of NCBI NO: 38564312 NR Description: At4g25434 [Arabidopsis thaliana]
  misc_feature (1)..(266): Homolog of NCBI NO: 9758793 NR Description: MutT domain protein-like [Arabidopsis thaliana]
  misc_feature (1)..(266): Homolog of NCBI NO: 18422823 NR Description: MutT domain protein-like
  misc_feature (1)..(275): Homolog of NCBI NO: 15228145 NR Description: putative mutT domain protein; protein id:
  misc_feature (1)..(275): Homolog of NCBI NO: 38564302 NR Description: At2g04430 [Arabidopsis thaliana]
  misc_feature (10)..(276): Homolog of NCBI NO: 21553511 NR Description: growth factor like protein [Arabidopsis thaliana]
  misc_feature (1)..(276): Homolog of NCBI NO: 15235458 NR Description: growth factor like protein
  misc_feature (1)..(276): Homolog of NCBI NO: 15228147 NR Description: putative mutT domain protein; protein id:
MDNEDQESLLLQGVPDNYGGVKVNLTEPMTIEDFVPKLRASLVYWSNQGTKGIWLKLADGLDNLIAPAKAEGFVCHHAEREYTMLTSWIADVPSTLPANASHRIGVGAFVLNKKTKEVLVVQEIDGHFKGTGVWKLPTGVVKEGENIWEGALREVEEETGIKTKFVEVLAFRESHQAFLEIKTDIFFLCELEPTTFEIKKQDSEILAAKWMPIEEYVNQPWNQKKELFRFMANLCLKRLQEMEYMGFSKVLTTTSSGKESYLYCNTDHANLLNATRPSLHLWLKNPSSERVYVSLFHVHCSIKAPVSCVQRLETSLCNLPSFPHYNFIYNIFLW

SEQ ID NO: 24711 - protein, 306 aa, Arabidopsis thaliana
  peptide (1)..(306): Ceres Seq. ID no. 12370361
  misc_feature (74)..(209): Pfam Name: NUDIX domain Pfam Description: NUDIX domain
  misc_feature (133)..(237): Homolog of NCBI NO: 30686884 NR Description: MutT/nudix family protein [Arabidopsis thaliana]
  misc_feature (1)..(134): Homolog of NCBI NO: 30686884 NR Description: MutT/nudix family protein [Arabidopsis thaliana]
  misc_feature (1)..(237): Homolog of NCBI NO: 38564312 NR Description: At4g25434 [Arabidopsis thaliana]
  misc_feature (1)..(238): Homolog of NCBI NO: 9758793 NR Description: MutT domain protein-like [Arabidopsis thaliana]
  misc_feature (1)..(238): Homolog of NCBI NO: 18422823 NR Description: MutT domain protein-like
  misc_feature (1)..(247): Homolog of NCBI NO: 15228145 NR Description: putative mutT domain protein; protein id:
  misc_feature (1)..(247): Homolog of NCBI NO: 38564302 NR Description: At2g04430 [Arabidopsis thaliana]
  misc_feature (1)..(248): Homolog of NCBI NO: 21553511 NR Description: growth factor like protein [Arabidopsis thaliana]
  misc_feature (1)..(248): Homolog of NCBI NO: 15235458 NR Description: growth factor like protein
  misc_feature (1)..(248): Homolog of NCBI NO: 15228147 NR Description: putative mutT domain protein; protein id:
MTIEDFVPKLRASLVYWSNQGTKGIWLKLADGLDNLIAPAKAEGFVCHHAEREYTMLTSWIADVPSTLPANASHRIGVGAFVLNKKTKEVLVVQEIDGHFKGTGVWKLPTGVVKEGENIWEGALREVEEETGIKTKFVEVLAFRESHQAFLEIKTDIFFLCELEPTTFEIKKQDSEILAAKWMPIEEYVNQPWNQKKELFRFMANLCLKRLQEMEYMGFSKVLTTTSSGKESYLYCNTDHANLLNATRPSLHLWLKNPSSERVYVSLFHVHCSIKAPVSCVQRLETSLCNLPSFPHYNFIYNIFLW

SEQ ID NO: 24712 - protein, 251 aa, Arabidopsis thaliana
  peptide (1)..(251): Ceres Seq. ID no. 12370362
  misc_feature (19)..(154): Pfam Name: NUDIX domain Pfam Description: NUDIX domain
  misc_feature (78)..(182): Homolog of NCBI NO: 30686884 NR Description: MutT/nudix family protein [Arabidopsis thaliana]
  misc_feature (1)..(79): Homolog of NCBI NO: 30686884 NR Description: MutT/nudix family protein [Arabidopsis thaliana]
  misc_feature (1)..(182): Homolog of NCBI NO: 38564312 NR Description: At4g25434 [Arabidopsis thaliana]
  misc_feature (1)..(183): Homolog of NCBI NO: 9758793 NR Description: MutT domain protein-like [Arabidopsis thaliana]
  misc_feature (1)..(183): Homolog of NCBI NO: 18422823 NR Description: MutT domain protein-like
  misc_feature (1)..(192): Homolog of NCBI NO: 15228145 NR Description: putative mutT domain protein; protein id:
  misc_feature (1)..(192): Homolog of NCBI NO: 38564302 NR Description: At2g04430 [Arabidopsis thaliana]
  misc_feature (1)..(193): Homolog of NCBI NO: 21553511 NR Description: growth factor like protein [Arabidopsis thaliana]
  misc_feature (1)..(193): Homolog of NCBI NO: 15235458 NR Description: growth factor like protein
  misc_feature (1)..(193): Homolog of NCBI NO: 15228147 NR Description: putative mutT domain protein; protein id:
MLTSWIADVPSTLPANASHRIGVGAFVLNKKTKEVLVVQEIDGHFKGTGVWKLPTGVVKEGENIWEGALREVEEETGIKTKFVEVLAFRESHQAFLEIKTDIFFLCELEPTTFEIKKQDSEILAAKWMPIEEYVNQPWNQKKELFRFMANLCLKRLQEMEYMGFSKVLTTTSSGKESYLYCNTDHANLLNATRPSLHLWLKNPSSERVYVSLFHVHCSIKAPVSCVQRLETSLCNLPSFPHYNFIYNIFLW

SEQ ID NO: 24713 - DNA, 1475 bp, Arabidopsis thaliana
  misc_feature (1)..(1475): Ceres Seq. ID no. 12371859
  misc_feature: MA Experiment ID: 108461 Result: Up-regulated in Transcription
  misc_feature: MA Experiment 108461 PARAMETER Experiment Name: At_Germinating_Seeds_cDNA_P Parameter: Age (day) Value: 1 vs. 0
  misc_feature: MA Experiment 108461 PARAMETER Experiment Name: At_Germinating_Seeds_cDNA_P Parameter: Tissue Value: Germinating Seeds
  misc_feature: MA Experiment ID: 108462 Result: Up-regulated in Transcription
  misc_feature: MA Experiment 108462 PARAMETER Experiment Name: At_Germinating_Seeds_cDNA_P Parameter: Age (day) Value: 2 vs. 0
  misc_feature: MA Experiment 108462 PARAMETER Experiment Name: At_Germinating_Seeds_cDNA_P Parameter: Tissue Value: Germinating Seeds
  misc_feature: MA Experiment ID: 108463 Result: Up-regulated in Transcription
  misc_feature: MA Experiment 108463 PARAMETER Experiment Name: At_Germinating_Seeds_cDNA_P Parameter: Age (day) Value: 3 vs. 0
  misc_feature: MA Experiment 108463 PARAMETER Experiment Name: At_Germinating_Seeds_cDNA_P Parameter: Tissue Value: Germinating Seeds
  misc_feature: MA Experiment ID: 108464 Result: Up-regulated in Transcription
  misc_feature: MA Experiment 108464 PARAMETER Experiment Name: At_Germinating_Seeds_cDNA_P Parameter: Age (day) Value: 4 vs. 0
  misc_feature: MA Experiment 108464 PARAMETER Experiment Name: At_Germinating_Seeds_cDNA_P Parameter: Tissue Value: Germinating Seeds
  misc_feature: MA Experiment ID: 108573 Result: Up-regulated in Transcription
  misc_feature: MA Experiment 108573 PARAMETER Experiment Name: At_Drought_cDNA_P Parameter: Timepoint (hr) Value: 6
  misc_feature: MA Experiment 108573 PARAMETER Experiment Name: At_Drought_cDNA_P Parameter: Tissue Value: Aerial
  misc_feature: MA Experiment 108573 PARAMETER Experiment Name: At_Drought_cDNA_P Parameter: Treatment Value: Drought vs. No Drought
  misc_feature: MA Experiment ID: 108574 Result: Down-regulated in Transcription
  misc_feature: MA Experiment 108574 PARAMETER Experiment Name: At_Wounding__cDNA_P Parameter: Timepoint (hr) Value: 1
  misc_feature: MA Experiment 108574 PARAMETER Experiment Name: At_Wounding__cDNA_P Parameter: Tissue Value: Aerial
  misc_feature: MA Experiment 108574 PARAMETER Experiment Name: At_Wounding__cDNA_P Parameter: Treatment Value: Wounding vs. No Wounding
  misc_feature: MA Experiment ID: 20000111 Result: Down-regulated in Transcription
  misc_feature: MA Experiment 20000111 PARAMETER Experiment Name: At_42deg_Heat_cDNA_P Parameter: Temperature (deg C) Value: 42 vs. 22
  misc_feature: MA Experiment 20000111 PARAMETER Experiment Name: At_42deg_Heat_cDNA_P Parameter: Timepoint (hr) Value: 6
  misc_feature: MA Experiment 20000111 PARAMETER Experiment Name: At_42deg_Heat_cDNA_P Parameter: Tissue Value: Aerial
  misc_feature: MA Experiment ID: 20000113 Result: Down-regulated in Transcription
  misc_feature: MA Experiment 20000113 PARAMETER Experiment Name: At_42deg_Heat_cDNA_P Parameter: Temperature (deg C) Value: 42 vs. 22
  misc_feature: MA Experiment 20000113 PARAMETER Experiment Name: At_42deg_Heat_cDNA_P Parameter: Timepoint (hr) Value: 8
  misc_feature: MA Experiment 20000113 PARAMETER Experiment Name: At_42deg_Heat_cDNA_P Parameter: Tissue Value: Aerial
  misc_feature: MA Experiment ID: 20000451 Result: Up-regulated in Transcription
  misc_feature: MA Experiment 20000451 PARAMETER Experiment Name: At_CS6879_Shoots-Roots_P Parameter: Age (day) Value: 14
  misc_feature: MA Experiment 20000451 PARAMETER Experiment Name: At_CS6879_Shoots-Roots_P Parameter: Organism Value: A. thaliana
  misc_feature: MA Experiment 20000451 PARAMETER Experiment Name: At_CS6879_Shoots-Roots_P Parameter: Plant Line Value: CS6879 vs. WS
  misc_feature: MA Experiment 20000451 PARAMETER Experiment Name: At_CS6879_Shoots-Roots_P Parameter: Tissue Value: Roots
  misc_feature: MA Experiment ID: 20000452 Result: Up-regulated in Transcription
  misc_feature: MA Experiment 20000452 PARAMETER Experiment Name: At_CS6879_Shoots-Roots_P Parameter: Age (day) Value: 14
  misc_feature: MA Experiment 20000452 PARAMETER Experiment Name: At_CS6879_Shoots-Roots_P Parameter: Organism Value: A. thaliana
  misc_feature: MA Experiment 20000452 PARAMETER Experiment Name: At_CS6879_Shoots-Roots_P Parameter: Plant Line Value: CS6879 vs. WS
  misc_feature: MA Experiment 20000452 PARAMETER Experiment Name: At_CS6879_Shoots-Roots_P Parameter: Tissue Value: Shoots
  misc_feature: MA Experiment ID: 20001248 Result: Up-regulated in Transcription
  misc_feature: MA Experiment 20001248 PARAMETER Experiment Name: At_Far-red-induction_P Parameter: Age (day) Value: 7
  misc_feature: MA Experiment 20001248 PARAMETER Experiment Name: At_Far-red-induction_P Parameter: Light Value: Far-red vs. White
  misc_feature: MA Experiment 20001248 PARAMETER Experiment Name: At_Far-red-induction_P Parameter: Organism Value: A. thaliana
  misc_feature: MA Experiment 20001248 PARAMETER Experiment Name: At_Far-red-induction_P Parameter: Plant Line Value: Columbia
  misc_feature: MA Experiment 20001248 PARAMETER Experiment Name: At_Far-red-induction_P Parameter: Timepoint (hr) Value: 4
  misc_feature: MA Experiment 20001248 PARAMETER Experiment Name: At_Far-red-induction_P Parameter: Tissue Value: Whole Plant
aaaagcaatttagaacttataaaaaggaaagccatttcttcggcatcctcttcaccaactggcataagcagaagaagaagaagacaacgacgacgactttgaagaagaacaaactcttccttcaatctcaatctctcaatctctctctcagatgggttgtggtggaactttgttctacccacttctcataactctctccgttgctctaatcacttacaacatcatcatctccgctaatgctcctctcaaacaaggcttcccaggccgatcttcttcctccgatatctccattgacccagtcatcgaattgccacgtggcggcggatccagaaacaacgatggtaaaaggataagacttttccacacgtcggtgacggcgtctgattccgtctacaacacttggcaatgtagagttatgtactattggttcaaaaagattcaagcttctgctggacccggttctgaaatgggtgggtttactcggatcttacattccggtaaaccggatcagtatatggatgagattcctacttttgttgctcagcctttaccttctgggatggatcagggttatgttgtgttgaataggccatgggcatttgtacaatggcttcaacaaacagatattaaagaagattatattttgatgtctgagcctgatcatatcattgttaaacctataccaaatttggctaaagatgggcttggagctgcatttcctttcttttacattgaaccgaaaaagtatgagaaggtgttgaggaagtattatcctgaagtgagaggaccggttactaatatcgatccgataggaaactctcctgtcattgttggaaaggatgctttgaagaagattgctccaacttggatgaatgtttctttggctatgaagaaggatcctgaagcagacaaggcttttggatgggttcttgaaatgtatgcttatgctgtctcatctgcattgcatggtgttagcaatattctacacaaagacttcatgattcagcctccatgggatatagaggttggtgacaagtacatcatacactacacttatggatgtgattatgatatgaagggtaaattaacttatgggaaaatcggggaatggagatttgacaaaagatcgtatgatagcaaaccaccaccaaggaaccttacaatgcctccacctggtgtttcacaaagtgtggtaacactagtgaagatgataaatgaagccacggccaacataccaaactggggatcataaagagacagagagagagaaaccgtaatctatatgtacctgtgagttgctcctttcttttcaaaataccttgtcctgctctttagtttctcctttggttgtggctaggtttgtaacatatatagtgattcaaacaaagcctttctttggcatcttacttctctaattcggtctagtctccactagactctgatgtcctctagcatctcaaaggataaattacaat

SEQ ID NO: 24714 - protein, 366 aa, Arabidopsis thaliana
  peptide (1)..(366): Ceres Seq. ID no. 12371860
  misc_feature (11)..(165): Homolog of NCBI NO: 34903224 NR Description: unnamed protein product [Oryza sativa (japonica
  misc_feature (1)..(141): Homolog of NCBI NO: 25371351 NR Description: hypothetical protein At2g25260 [imported] -
  misc_feature (183)..(348): Homolog of NCBI NO: 25371351 NR Description: hypothetical protein At2g25260 [imported] -
  misc_feature (1)..(141): Homolog of NCBI NO: 30682704 NR Description: expressed protein [Arabidopsis thaliana]
  misc_feature (183)..(366): Homolog of NCBI NO: 30682704 NR Description: expressed protein [Arabidopsis thaliana]
  misc_feature (1)..(364): Homolog of NCBI NO: 15240642 NR Description: putative protein
  misc_feature (11)..(366): Homolog of NCBI NO: 24413996 NR Description: hypothetical protein~similar to Arabidopsis
  misc_feature (1)..(366): Homolog of NCBI NO: 22327055 NR Description: Expressed protein
  misc_feature (71)..(327): Homolog of NCBI NO: 22330795 NR Description: unknown protein
MGCGGTLFYPLLITLSVALITYNIIISANAPLKQGFPGRSSSSDISIDPVIELPRGGGSRNNDGKRIRLFHTSVTASDSVYNTWQCRVMYYWFKKIQASAGPGSEMGGFTRILHSGKPDQYMDEIPTFVAQPLPSGMDQGYVVLNRPWAFVQWLQQTDIKEDYILMSEPDHIIVKPIPNLAKDGLGAAFPFFYIEPKKYEKVLRKYYPEVRGPVTNIDPIGNSPVIVGKDALKKIAPTWMNVSLAMKKDPEADKAFGWVLEMYAYAVSSALHGVSNILHKDFMIQPPWDIEVGDKYIIHYTYGCDYDMKGKLTYGKIGEWRFDKRSYDSKPPPRNLTMPPPGVSQSVVTLVKMINEATANIPNWGS

SEQ ID NO: 24715 - protein, 278 aa, Arabidopsis thaliana
  peptide (1)..(278): Ceres Seq. ID no. 12371861
  misc_feature (1)..(239): Homolog of NCBI NO: 22330795 NR Description: unknown protein
  misc_feature (1)..(77): Homolog of NCBI NO: 34903224 NR Description: unnamed protein product [Oryza sativa (japonica
  misc_feature (1)..(53): Homolog of NCBI NO: 25371351 NR Description: hypothetical protein At2g25260 [imported] -
  misc_feature (95)..(260): Homolog of NCBI NO: 25371351 NR Description: hypothetical protein At2g25260 [imported] -
  misc_feature (1)..(53): Homolog of NCBI NO: 30682704 NR Description: expressed protein [Arabidopsis thaliana]
  misc_feature (95)..(278): Homolog of NCBI NO: 30682704 NR Description: expressed protein [Arabidopsis thaliana]
  misc_feature (1)..(276): Homolog of NCBI NO: 15240642 NR Description: putative protein
  misc_feature (1)..(278): Homolog of NCBI NO: 24413996 NR Description: hypothetical protein~similar to Arabidopsis
  misc_feature (1)..(278): Homolog of NCBI NO: 22327055 NR Description: Expressed protein
MYYWFKKIQASAGPGSEMGGFTRILHSGKPDQYMDEIPTFVAQPLPSGMDQGYVVLNRPWAFVQWLQQTDIKEDYILMSEPDHIIVKPIPNLAKDGLGAAFPFFYIEPKKYEKVLRKYYPEVRGPVTNIDPIGNSPVIVGKDALKKIAPTWMNVSLAMKKDPEADKAFGWVLEMYAYAVSSALHGVSNILHKDFMIQPPWDIEVGDKYIIHYTYGCDYDMKGKLTYGKIGEWRFDKRSYDSKPPPRNLTMPPPGVSQSVVTLVKMINEATANIPNWGS

SEQ ID NO: 24716 - protein, 261 aa, Arabidopsis thaliana
  peptide (1)..(261): Ceres Seq. ID no. 12371862
  misc_feature (1)..(222): Homolog of NCBI NO: 22330795 NR Description: unknown protein
  misc_feature (1)..(60): Homolog of NCBI NO: 34903224 NR Description: unnamed protein product [Oryza sativa (japonica
  misc_feature (1)..(36): Homolog of NCBI NO: 25371351 NR Description: hypothetical protein At2g25260 [imported] -
  misc_feature (78)..(243): Homolog of NCBI NO: 25371351 NR Description: hypothetical protein At2g25260 [imported] -
  misc_feature (1)..(36): Homolog of NCBI NO: 30682704 NR Description: expressed protein [Arabidopsis thaliana]
  misc_feature (78)..(261): Homolog of NCBI NO: 30682704 NR Description: expressed protein [Arabidopsis thaliana]
  misc_feature (1)..(259): Homolog of NCBI NO: 15240642 NR Description: putative protein
  misc_feature (1)..(261): Homolog of NCBI NO: 24413996 NR Description: hypothetical protein~similar to Arabidopsis
  misc_feature (1)..(261): Homolog of NCBI NO: 22327055 NR Description: Expressed protein
MGGFTRILHSGKPDQYMDEIPTFVAQPLPSGMDQGYVVLNRPWAFVQWLQQTDIKEDYILMSEPDHIIVKPIPNLAKDGLGAAFPFFYIEPKKYEKVLRKYYPEVRGPVTNIDPIGNSPVIVGKDALKKIAPTWMNVSLAMKKDPEADKAFGWVLEMYAYAVSSALHGVSNILHKDFMIQPPWDIEVGDKYIIHYTYGCDYDMKGKLTYGKIGEWRFDKRSYDSKPPPRNLTMPPPGVSQSVVTLVKMINEATANIPNWGS

SEQ ID NO: 24717 - DNA, 1351 bp, Arabidopsis thaliana
  misc_feature (1)..(1351): Ceres Seq. ID no. 12334222
  misc_feature: MA Experiment ID: 108433 Result: Down-regulated in Transcription
  misc_feature: MA Experiment 108433 PARAMETER Experiment Name: At_rhl_Mutant2_cDNA_P Parameter: Age (day) Value: 7
  misc_feature: MA Experiment 108433 PARAMETER Experiment Name: At_rhl_Mutant2_cDNA_P Parameter: Organism Value: A. thaliana
  misc_feature: MA Experiment 108433 PARAMETER Experiment Name: At_rhl_Mutant2_cDNA_P Parameter: Plant Line Value: rhl Mutant vs. wt landsburg
  misc_feature: MA Experiment 108433 PARAMETER Experiment Name: At_rhl_Mutant2_cDNA_P Parameter: Tissue Value: Roots
  misc_feature: MA Experiment ID: 108434 Result: Up-regulated in Transcription
  misc_feature: MA Experiment 108434 PARAMETER Experiment Name: At_Root_Tips_cDNA_P Parameter: Tissue Value: Root Tips
  misc_feature: MA Experiment ID: 108462 Result: Down-regulated in Transcription
  misc_feature: MA Experiment 108462 PARAMETER Experiment Name: At_Germinating_Seeds_cDNA_P Parameter: Age (day) Value: 2 vs. 0
  misc_feature: MA Experiment 108462 PARAMETER Experiment Name: At_Germinating_Seeds_cDNA_P Parameter: Tissue Value: Germinating Seeds
  misc_feature: MA Experiment ID: 108463 Result: Down-regulated in Transcription
  misc_feature: MA Experiment 108463 PARAMETER Experiment Name: At_Germinating_Seeds_cDNA_P Parameter: Age (day) Value: 3 vs. 0
  misc_feature: MA Experiment 108463 PARAMETER Experiment Name: At_Germinating_Seeds_cDNA_P Parameter: Tissue Value: Germinating Seeds
  misc_feature: MA Experiment ID: 108489 Result: Up-regulated in Transcription
  misc_feature: MA Experiment ID: 108573 Result: Down-regulated in Transcription
  misc_feature: MA Experiment 108573 PARAMETER Experiment Name: At_Drought_cDNA_P Parameter: Timepoint (hr) Value: 6
  misc_feature: MA Experiment 108573 PARAMETER Experiment Name: At_Drought_cDNA_P Parameter: Tissue Value: Aerial
  misc_feature: MA Experiment 108573 PARAMETER Experiment Name: At_Drought_cDNA_P Parameter: Treatment Value: Drought vs. No Drought
  misc_feature: MA Experiment ID: 20001557 Result: Up-regulated in Transcription
  misc_feature: MA Experiment 20001557 PARAMETER Experiment Name: At_Drought_Soil_Dry_P Parameter: Age (day) Value: 27
  misc_feature: MA Experiment 20001557 PARAMETER Experiment Name: At_Drought_Soil_Dry_P Parameter: Organism Value: A. thaliana
  misc_feature: MA Experiment 20001557 PARAMETER Experiment Name: At_Drought_Soil_Dry_P Parameter: Plant Line Value: WS
  misc_feature: MA Experiment 20001557 PARAMETER Experiment Name: At_Drought_Soil_Dry_P Parameter: Post Timepoint (hr) Value: 3
  misc_feature: MA Experiment 20001557 PARAMETER Experiment Name: At_Drought_Soil_Dry_P Parameter: Post-Treatment Value: Re-Water vs. No Drought
  misc_feature: MA Experiment 20001557 PARAMETER Experiment Name: At_Drought_Soil_Dry_P Parameter: Timepoint (day) Value: 13
  misc_feature: MA Experiment 20001557 PARAMETER Experiment Name: At_Drought_Soil_Dry_P Parameter: Treatment Value: Drought vs. No Drought
  misc_feature: MA Experiment ID: 20001558 Result: Up-regulated in Transcription
  misc_feature: MA Experiment 20001558 PARAMETER Experiment Name: At_Drought_Soil_Dry_P Parameter: Age (day) Value: 27
  misc_feature: MA Experiment 20001558 PARAMETER Experiment Name: At_Drought_Soil_Dry_P Parameter: Organism Value: A. thaliana
  misc_feature: MA Experiment 20001558 PARAMETER Experiment Name: At_Drought_Soil_Dry_P Parameter: Plant Line Value: WS
  misc_feature: MA Experiment 20001558 PARAMETER Experiment Name: At_Drought_Soil_Dry_P Parameter: Post Timepoint (hr) Value: 6
  misc_feature: MA Experiment 20001558 PARAMETER Experiment Name: At_Drought_Soil_Dry_P Parameter: Post-Treatment Value: Re-Water vs. No Drought
  misc_feature: MA Experiment 20001558 PARAMETER Experiment Name: At_Drought_Soil_Dry_P Parameter: Timepoint (day) Value: 13
  misc_feature: MA Experiment 20001558 PARAMETER Experiment Name: At_Drought_Soil_Dry_P Parameter: Treatment Value: Drought vs. No Drought
  misc_feature: MA Experiment ID: 20001560 Result: Up-regulated in Transcription
  misc_feature: MA Experiment 20001560 PARAMETER Experiment Name: At_Drought_Soil_Dry_P Parameter: Age (day) Value: 28
  misc_feature: MA Experiment 20001560 PARAMETER Experiment Name: At_Drought_Soil_Dry_P Parameter: Organism Value: A. thaliana
  misc_feature: MA Experiment 20001560 PARAMETER Experiment Name: At_Drought_Soil_Dry_P Parameter: Plant Line Value: WS
  misc_feature: MA Experiment 20001560 PARAMETER Experiment Name: At_Drought_Soil_Dry_P Parameter: Post Timepoint (hr) Value: None
  misc_feature: MA Experiment 20001560 PARAMETER Experiment Name: At_Drought_Soil_Dry_P Parameter: Post-Treatment Value: None
  misc_feature: MA Experiment 20001560 PARAMETER Experiment Name: At_Drought_Soil_Dry_P Parameter: Timepoint (day) Value: 14
  misc_feature: MA Experiment 20001560 PARAMETER Experiment Name: At_Drought_Soil_Dry_P Parameter: Treatment Value: Drought vs. No Drought
  misc_feature: MA Experiment ID: 20001757 Result: Up-regulated in Transcription
  misc_feature: MA Experiment 20001757 PARAMETER Experiment Name: At_50mM_NH4NO3_L-to-H_P Parameter: Timepoint (hr) Value: 6
  misc_feature: MA Experiment 20001757 PARAMETER Experiment Name: At_50mM_NH4NO3_L-to-H_P Parameter: Tissue Value: Leaf
  misc_feature: MA Experiment 20001757 PARAMETER Experiment Name: At_50mM_NH4NO3_L-to-H_P Parameter: Treatment Value: 50mM NH4NO3 vs 100mM Mannitol
aagctgaagaaaacccttacttctctttctcttgttccatttcgtcccattttgttctttctactgtcgccgtaaaggatattcaaaagcggtagaggcggcgatggcggatcttttaccacctcttacggcggcacaagtcgatgctaagactaaagtcgatgagaaagtcgattactcgaacctcccttctcctgttccctatgaggaactccaccgtgaagctctcatgtctttaaagtcggacaattttgagggtttacgcttcgactttaccagggcgttgaatcagaagttttctctcagtcatagtgtaatgatggggccaaccgaagttcctgctcagtcacctgaaactactatcaaaattccaacagcccattatgagtttggtgccaattattatgacccaaagttgctgctcatcggaagggtaatgactgatggtagactaaatgcgagactgaaagcagatttaactgataagttagttgtgaaggcgaatgctctgataacaaatgaggaacatatgtcacaagcaatgttcaactttgattacatgggatcagactacagagctcagcttcaacttggacagagtgccctaattggagcaacttatatccagagtgttacaaaccatttatccttgggtggtgaaattttctgggctggtgtgcctcggaagtcgggaataggctatgctgctagatacgagacagataaaatggttgcttctggtcaagttgctagcacgggtgctgttgttatgaactatgttcagaagatttcagataaggtgtcacttgccactgatttcatgtacaactacttttcaagagatgtaacagctagtgtgggttatgactatatgcttagacaggctcgtgtgcggggtaagatcgattcaaacggtgttgcatccgctctccttgaagaaagattgagtatgggactcaattttcttctttctgcagagctggatcataagaagaaggactacaagtttggtttcggattaacagttggttaaaagaccgaataaaaaccggcacacaataagcctggcgcacagagcagattgcagcagtagtggtttcagctgcgaggatttcggttaaaatttattctatttcagtttaggctttttggtgaagttgggaagataaacggtaacgatgttgtgttgttatttgaggtttaggatttgtttccaagaaccattttataaaagaagaagaagcaaatgaggtttttgttttacttccttgctctaagatctcgtgaacttccgagagaggtgtatcatttcatttccttgccataaaaaaaaacgaattctttttttctt

SEQ ID NO: 24718 - protein, 309 aa, Arabidopsis thaliana
  peptide (1)..(309): Ceres Seq. ID no. 12334223
  misc_feature (30)..(303): Pfam Name: Eukaryotic porin Pfam Description: Eukaryotic porin
  misc_feature (30)..(303): Pfam Name: Eukaryotic porin Pfam Description: Eukaryotic porin
  misc_feature (213)..(309): Homolog of NCBI NO: 34903264 NR Description: unnamed protein product [Oryza sativa (japonica
  misc_feature (218)..(309): Homolog of NCBI NO: 2982293 NR Description: ISP42-like protein [Picea mariana]
  misc_feature (73)..(105): Homolog of NCBI NO: 25405370 NR Description: hypothetical protein F14I3.2 [imported] -
  misc_feature (137)..(306): Homolog of NCBI NO: 25405370 NR Description: hypothetical protein F14I3.2 [imported] -
  misc_feature (1)..(105): Homolog of NCBI NO: 13162531 NR Description: Hypothetical protein [Arabidopsis thaliana]
  misc_feature (213)..(309): Homolog of NCBI NO: 34903264 NR Description: unnamed protein product [Oryza sativa (japonica
  misc_feature (73)..(105): Homolog of NCBI NO: 25405370 NR Description: hypothetical protein F14I3.2 [imported] -
  misc_feature (1)..(105): Homolog of NCBI NO: 13162531 NR Description: Hypothetical protein [Arabidopsis thaliana]
  misc_feature (1)..(309): Homolog of NCBI NO: 15231008 NR Description: membrane import protein, putative
  misc_feature (137)..(309): Homolog of NCBI NO: 11994775 NR Description: membrane import protein-like [Arabidopsis
  misc_feature (1)..(105): Homolog of NCBI NO: 11994775 NR Description: membrane import protein-like [Arabidopsis
  misc_feature (1)..(306): Homolog of NCBI NO: 15222963 NR Description: hypothetical protein; protein id: At1g50400.1
  misc_feature (137)..(306): Homolog of NCBI NO: 13162531 NR Description: Hypothetical protein [Arabidopsis thaliana]
  misc_feature (137)..(306): Homolog of NCBI NO: 25405370 NR Description: hypothetical protein F14I3.2 [imported] -
  misc_feature (218)..(309): Homolog of NCBI NO: 2982293 NR Description: ISP42-like protein [Picea mariana]
  misc_feature (137)..(306): Homolog of NCBI NO: 13162531 NR Description: Hypothetical protein [Arabidopsis thaliana]
  misc_feature (1)..(306): Homolog of NCBI NO: 15222963 NR Description: hypothetical protein; protein id: At1g50400.1
  misc_feature (1)..(105): Homolog of NCBI NO: 11994775 NR Description: membrane import protein-like [Arabidopsis
  misc_feature (137)..(309): Homolog of NCBI NO: 11994775 NR Description: membrane import protein-like [Arabidopsis
  misc_feature (1)..(309): Homolog of NCBI NO: 15231008 NR Description: membrane import protein, putative
MADLLPPLTAAQVDAKTKVDEKVDYSNLPSPVPYEELHREALMSLKSDNFEGLRFDFTRALNQKFSLSHSVMMGPTEVPAQSPETTIKIPTAHYEFGANYYDPKLLLIGRVMTDGRLNARLKADLTDKLVVKANALITNEEHMSQAMFNFDYMGSDYRAQLQLGQSALIGATYIQSVTNHLSLGGEIFWAGVPRKSGIGYAARYETDKMVASGQVASTGAVVMNYVQKISDKVSLATDFMYNYFSRDVTASVGYDYMLRQARVRGKIDSNGVASALLEERLSMGLNFLLSAELDHKKKDYKFGFGLTVG

SEQ ID NO: 24719 - protein, 267 aa, Arabidopsis thaliana
  peptide (1)..(267): Ceres Seq. ID no. 12334224
  misc_feature (1)..(261): Pfam Name: Eukaryotic porin Pfam Description: Eukaryotic porin
  misc_feature (1)..(261): Pfam Name: Eukaryotic porin Pfam Description: Eukaryotic porin
  misc_feature (171)..(267): Homolog of NCBI NO: 34903264 NR Description: unnamed protein product [Oryza sativa (japonica
  misc_feature (176)..(267): Homolog of NCBI NO: 2982293 NR Description: ISP42-like protein [Picea mariana]
  misc_feature (31)..(63): Homolog of NCBI NO: 25405370 NR Description: hypothetical protein F14I3.2 [imported] -
  misc_feature (95)..(264): Homolog of NCBI NO: 25405370 NR Description: hypothetical protein F14I3.2 [imported] -
  misc_feature (1)..(63): Homolog of NCBI NO: 13162531 NR Description: Hypothetical protein [Arabidopsis thaliana]
  misc_feature (171)..(267): Homolog of NCBI NO: 34903264 NR Description: unnamed protein product [Oryza sativa (japonica
  misc_feature (31)..(63): Homolog of NCBI NO: 25405370 NR Description: hypothetical protein F14I3.2 [imported] -
  misc_feature (1)..(63): Homolog of NCBI NO: 13162531 NR Description: Hypothetical protein [Arabidopsis thaliana]
  misc_feature (1)..(267): Homolog of NCBI NO: 15231008 NR Description: membrane import protein, putative
  misc_feature (95)..(267): Homolog of NCBI NO: 11994775 NR Description: membrane import protein-like [Arabidopsis
  misc_feature (1)..(63): Homolog of NCBI NO: 11994775 NR Description: membrane import protein-like [Arabidopsis
  misc_feature (1)..(264): Homolog of NCBI NO: 15222963 NR Description: hypothetical protein; protein id: At1g50400.1
  misc_feature (95)..(264): Homolog of NCBI NO: 13162531 NR Description: Hypothetical protein [Arabidopsis thaliana]
  misc_feature (95)..(264): Homolog of NCBI NO: 25405370 NR Description: hypothetical protein F14I3.2 [imported] -
  misc_feature (176)..(267): Homolog of NCBI NO: 2982293 NR Description: ISP42-like protein [Picea mariana]
  misc_feature (95)..(264): Homolog of NCBI NO: 13162531 NR Description: Hypothetical protein [Arabidopsis thaliana]
  misc_feature (1)..(264): Homolog of NCBI NO: 15222963 NR Description: hypothetical protein; protein id: At1g50400.1
  misc_feature (1)..(63): Homolog of NCBI NO: 11994775 NR Description: membrane import protein-like [Arabidopsis
  misc_feature (95)..(267): Homolog of NCBI NO: 11994775 NR Description: membrane import protein-like [Arabidopsis
  misc_feature (1)..(267): Homolog of NCBI NO: 15231008 NR Description: membrane import protein, putative
MSLKSDNFEGLRFDFTRALNQKFSLSHSVMMGPTEVPAQSPETTIKIPTAHYEFGANYYDPKLLLIGRVMTDGRLNARLKADLTDKLVVKANALITNEEHMSQAMFNFDYMGSDYRAQLQLGQSALIGATYIQSVTNHLSLGGEIFWAGVPRKSGIGYAARYETDKMVASGQVASTGAVVMNYVQKISDKVSLATDFMYNYFSRDVTASVGYDYMLRQARVRGKIDSNGVASALLEERLSMGLNFLLSAELDHKKKDYKFGFGLTVG

SEQ ID NO: 24720 - protein, 238 aa, Arabidopsis thaliana
  peptide (1)..(238): Ceres Seq. ID no. 12334225
  misc_feature (1)..(232): Pfam Name: Eukaryotic porin Pfam Description: Eukaryotic porin
  misc_feature (1)..(232): Pfam Name: Eukaryotic porin Pfam Description: Eukaryotic porin
  misc_feature (142)..(238): Homolog of NCBI NO: 34903264 NR Description: unnamed protein product [Oryza sativa (japonica
  misc_feature (147)..(238): Homolog of NCBI NO: 2982293 NR Description: ISP42-like protein [Picea mariana]
  misc_feature (2)..(34): Homolog of NCBI NO: 25405370 NR Description: hypothetical protein F14I3.2 [imported] -
  misc_feature (66)..(235): Homolog of NCBI NO: 25405370 NR Description: hypothetical protein F14I3.2 [imported] -
  misc_feature (1)..(34): Homolog of NCBI NO: 13162531 NR Description: Hypothetical protein [Arabidopsis thaliana]
  misc_feature (142)..(238): Homolog of NCBI NO: 34903264 NR Description: unnamed protein product [Oryza sativa (japonica
  misc_feature (2)..(34): Homolog of NCBI NO: 25405370 NR Description: hypothetical protein F14I3.2 [imported] -
  misc_feature (1)..(34): Homolog of NCBI NO: 13162531 NR Description: Hypothetical protein [Arabidopsis thaliana]
  misc_feature (1)..(238): Homolog of NCBI NO: 15231008 NR Description: membrane import protein, putative
  misc_feature (66)..(238): Homolog of NCBI NO: 11994775 NR Description: membrane import protein-like [Arabidopsis
  misc_feature (1)..(34): Homolog of NCBI NO: 11994775 NR Description: membrane import protein-like [Arabidopsis
  misc_feature (1)..(235): Homolog of NCBI NO: 15222963 NR Description: hypothetical protein; protein id: At1g50400.1
  misc_feature (66)..(235): Homolog of NCBI NO: 13162531 NR Description: Hypothetical protein [Arabidopsis thaliana]
  misc_feature (66)..(235): Homolog of NCBI NO: 25405370 NR Description: hypothetical protein F14I3.2 [imported] -
  misc_feature (147)..(238): Homolog of NCBI NO: 2982293 NR Description: ISP42-like protein [Picea mariana]
  misc_feature (66)..(235): Homolog of NCBI NO: 13162531 NR Description: Hypothetical protein [Arabidopsis thaliana]
  misc_feature (1)..(235): Homolog of NCBI NO: 15222963 NR Description: hypothetical protein; protein id: At1g50400.1
  misc_feature (1)..(34): Homolog of NCBI NO: 11994775 NR Description: membrane import protein-like [Arabidopsis
  misc_feature (66)..(238): Homolog of NCBI NO: 11994775 NR Description: membrane import protein-like [Arabidopsis
  misc_feature (1)..(238): Homolog of NCBI NO: 15231008 NR Description: membrane import protein, putative
MMGPTEVPAQSPETTIKIPTAHYEFGANYYDPKLLLIGRVMTDGRLNARLKADLTDKLVVKANALITNEEHMSQAMFNFDYMGSDYRAQLQLGQSALIGATYIQSVTNHLSLGGEIFWAGVPRKSGIGYAARYETDKMVASGQVASTGAVVMNYVQKISDKVSLATDFMYNYFSRDVTASVGYDYMLRQARVRGKIDSNGVASALLEERLSMGLNFLLSAELDHKKKDYKFGFGLTVG

SEQ ID NO: 24721 - DNA, 1549 bp, Arabidopsis thaliana
  misc_feature (1)..(1549): Ceres Seq. ID no. 13488566
  misc_feature: MA Experiment ID: 108434 Result: Up-regulated in Transcription
  misc_feature: MA Experiment 108434 PARAMETER Experiment Name: At_Root_Tips_cDNA_P Parameter: Tissue Value: Root Tips
  misc_feature: MA Experiment ID: 108462 Result: Down-regulated in Transcription
  misc_feature: MA Experiment 108462 PARAMETER Experiment Name: At_Germinating_Seeds_cDNA_P Parameter: Age (day) Value: 2 vs. 0
  misc_feature: MA Experiment 108462 PARAMETER Experiment Name: At_Germinating_Seeds_cDNA_P Parameter: Tissue Value: Germinating Seeds
  misc_feature: MA Experiment ID: 108463 Result: Down-regulated in Transcription
  misc_feature: MA Experiment 108463 PARAMETER Experiment Name: At_Germinating_Seeds_cDNA_P Parameter: Age (day) Value: 3 vs. 0
  misc_feature: MA Experiment 108463 PARAMETER Experiment Name: At_Germinating_Seeds_cDNA_P Parameter: Tissue Value: Germinating Seeds
  misc_feature: MA Experiment ID: 108464 Result: Down-regulated in Transcription
  misc_feature: MA Experiment 108464 PARAMETER Experiment Name: At_Germinating_Seeds_cDNA_P Parameter: Age (day) Value: 4 vs. 0
  misc_feature: MA Experiment 108464 PARAMETER Experiment Name: At_Germinating_Seeds_cDNA_P Parameter: Tissue Value: Germinating Seeds
  misc_feature: MA Experiment ID: 108488 Result: Up-regulated in Transcription
  misc_feature: MA Experiment ID: 108489 Result: Up-regulated in Transcription
  misc_feature: MA Experiment ID: 108561 Result: Down-regulated in Transcription
  misc_feature: MA Experiment 108561 PARAMETER Experiment Name: At_100uM_ABA_cDNA_P Parameter: Timepoint (hr) Value: 6
  misc_feature: MA Experiment 108561 PARAMETER Experiment Name: At_100uM_ABA_cDNA_P Parameter: Tissue Value: Aerial
  misc_feature: MA Experiment 108561 PARAMETER Experiment Name: At_100uM_ABA_cDNA_P Parameter: Treatment Value: 100uM ABA vs. No Treatment
  misc_feature: MA Experiment ID: 108573 Result: Down-regulated in Transcription
  misc_feature: MA Experiment 108573 PARAMETER Experiment Name: At_Drought_cDNA_P Parameter: Timepoint (hr) Value: 6
  misc_feature: MA Experiment 108573 PARAMETER Experiment Name: At_Drought_cDNA_P Parameter: Tissue Value: Aerial
  misc_feature: MA Experiment 108573 PARAMETER Experiment Name: At_Drought_cDNA_P Parameter: Treatment Value: Drought vs. No Drought
  misc_feature: MA Experiment ID: 108577 Result: Down-regulated in Transcription
  misc_feature: MA Experiment 108577 PARAMETER Experiment Name: At_42deg_Heat_cDNA_P Parameter: Temperature (deg C) Value: 42 vs. 22
  misc_feature: MA Experiment 108577 PARAMETER Experiment Name: At_42deg_Heat_cDNA_P Parameter: Timepoint (hr) Value: 6
  misc_feature: MA Experiment 108577 PARAMETER Experiment Name: At_42deg_Heat_cDNA_P Parameter: Tissue Value: Aerial
  misc_feature: MA Experiment ID: 108595 Result: Down-regulated in Transcription
  misc_feature: MA Experiment 108595 PARAMETER Experiment Name: At_Ler-pi_Ovule_cDNA_P Parameter: Plant Line Value: null
  misc_feature: MA Experiment ID: 108605 Result: Down-regulated in Transcription
  misc_feature: MA Experiment 108605 PARAMETER Experiment Name: At_100uM_ABA_cDNA_P Parameter: Timepoint (hr) Value: 6
  misc_feature: MA Experiment 108605 PARAMETER Experiment Name: At_100uM_ABA_cDNA_P Parameter: Tissue Value: Aerial
  misc_feature: MA Experiment 108605 PARAMETER Experiment Name: At_100uM_ABA_cDNA_P Parameter: Treatment Value: 100uM ABA vs. No Treatment
  misc_feature: MA Experiment ID: 108607 Result: Down-regulated in Transcription
  misc_feature: MA Experiment 108607 PARAMETER Experiment Name: At_100uM_ABA_cDNA_P Parameter: Timepoint (hr) Value: 4
  misc_feature: MA Experiment 108607 PARAMETER Experiment Name: At_100uM_ABA_cDNA_P Parameter: Tissue Value: Aerial
  misc_feature: MA Experiment 108607 PARAMETER Experiment Name: At_100uM_ABA_cDNA_P Parameter: Treatment Value: 100uM ABA vs. No Treatment
  misc_feature: MA Experiment ID: 20000069 Result: Up-regulated in Transcription
  misc_feature: MA Experiment 20000069 PARAMETER Experiment Name: At_100uM_ABA_Mutants_cDNA_P Parameter: Plant Line Value: CS23
  misc_feature: MA Experiment 20000069 PARAMETER Experiment Name: At_100uM_ABA_Mutants_cDNA_P Parameter: Timepoint (hr) Value: 6
  misc_feature: MA Experiment 20000069 PARAMETER Experiment Name: At_100uM_ABA_Mutants_cDNA_P Parameter: Tissue Value: Aerial
  misc_feature: MA Experiment 20000069 PARAMETER Experiment Name: At_100uM_ABA_Mutants_cDNA_P Parameter: Treatment Value: 100uM ABA vs. No Treatment
  misc_feature: MA Experiment ID: 20000071 Result: Up-regulated in Transcription
  misc_feature: MA Experiment 20000071 PARAMETER Experiment Name: At_100uM_ABA_Mutants_cDNA_P Parameter: Plant Line Value: CS8104
  misc_feature: MA Experiment 20000071 PARAMETER Experiment Name: At_100uM_ABA_Mutants_cDNA_P Parameter: Timepoint (hr) Value: 6
  misc_feature: MA Experiment 20000071 PARAMETER Experiment Name: At_100uM_ABA_Mutants_cDNA_P Parameter: Tissue Value: Aerial
  misc_feature: MA Experiment 20000071 PARAMETER Experiment Name: At_100uM_ABA_Mutants_cDNA_P Parameter: Treatment Value: 100uM ABA vs. No Treatment
  misc_feature: MA Experiment ID: 20000072 Result: Up-regulated in Transcription
  misc_feature: MA Experiment 20000072 PARAMETER Experiment Name: At_100uM_ABA_Mutants_cDNA_P Parameter: Plant Line Value: CS8105
  misc_feature: MA Experiment 20000072 PARAMETER Experiment Name: At_100uM_ABA_Mutants_cDNA_P Parameter: Timepoint (hr) Value: 6
  misc_feature: MA Experiment 20000072 PARAMETER Experiment Name: At_100uM_ABA_Mutants_cDNA_P Parameter: Tissue Value: Aerial
  misc_feature: MA Experiment 20000072 PARAMETER Experiment Name: At_100uM_ABA_Mutants_cDNA_P Parameter: Treatment Value: 100uM ABA vs. No Treatment
  misc_feature: MA Experiment ID: 20000086 Result: Up-regulated in Transcription
  misc_feature: MA Experiment 20000086 PARAMETER Experiment Name: At_100uM_ABA_Mutants_cDNA_P Parameter: Plant Line Value: CS22
  misc_feature: MA Experiment 20000086 PARAMETER Experiment Name: At_100uM_ABA_Mutants_cDNA_P Parameter: Timepoint (hr) Value: 6
  misc_feature: MA Experiment 20000086 PARAMETER Experiment Name: At_100uM_ABA_Mutants_cDNA_P Parameter: Tissue Value: Aerial
  misc_feature: MA Experiment 20000086 PARAMETER Experiment Name: At_100uM_ABA_Mutants_cDNA_P Parameter: Treatment Value: 100uM ABA vs. No Treatment
  misc_feature: MA Experiment ID: 20000088 Result: Up-regulated in Transcription
  misc_feature: MA Experiment 20000088 PARAMETER Experiment Name: At_100uM_ABA_Mutants_cDNA_P Parameter: Plant Line Value: Landsberg
  misc_feature: MA Experiment 20000088 PARAMETER Experiment Name: At_100uM_ABA_Mutants_cDNA_P Parameter: Timepoint (hr) Value: 6
  misc_feature: MA Experiment 20000088 PARAMETER Experiment Name: At_100uM_ABA_Mutants_cDNA_P Parameter: Tissue Value: Aerial
  misc_feature: MA Experiment 20000088 PARAMETER Experiment Name: At_100uM_ABA_Mutants_cDNA_P Parameter: Treatment Value: 100uM ABA vs. No Treatment
  misc_feature: MA Experiment ID: 20000089 Result: Up-regulated in Transcription
  misc_feature: MA Experiment ID: 20000090 Result: Up-regulated in Transcription
  misc_feature: MA Experiment ID: 20000169 Result: Down-regulated in Transcription
  misc_feature: MA Experiment 20000169 PARAMETER Experiment Name: At_100uM_ABA_P Parameter: Age (day) Value: 14
  misc_feature: MA Experiment 20000169 PARAMETER Experiment Name: At_100uM_ABA_P Parameter: Organism Value: A. thaliana
  misc_feature: MA Experiment 20000169 PARAMETER Experiment Name: At_100uM_ABA_P Parameter: Plant Line Value: WS
  misc_feature: MA Experiment 20000169 PARAMETER Experiment Name: At_100uM_ABA_P Parameter: Timepoint (hr) Value: 6
  misc_feature: MA Experiment 20000169 PARAMETER Experiment Name: At_100uM_ABA_P Parameter: Tissue Value: Aerial
  misc_feature: MA Experiment 20000169 PARAMETER Experiment Name: At_100uM_ABA_P Parameter: Treatment Value: 100uM ABA vs. No Treatment
  misc_feature: MA Experiment ID: 20000182 Result: Down-regulated in Transcription
  misc_feature: MA Experiment 20000182 PARAMETER Experiment Name: At_2mM_SA_P Parameter: Age (day) Value: 14
  misc_feature: MA Experiment 20000182 PARAMETER Experiment Name: At_2mM_SA_P Parameter: Organism Value: A. thaliana
  misc_feature: MA Experiment 20000182 PARAMETER Experiment Name: At_2mM_SA_P Parameter: Plant Line Value: WS
  misc_feature: MA Experiment 20000182 PARAMETER Experiment Name: At_2mM_SA_P Parameter: Timepoint (hr) Value: 6
  misc_feature: MA Experiment 20000182 PARAMETER Experiment Name: At_2mM_SA_P Parameter: Tissue Value: Aerial
  misc_feature: MA Experiment 20000182 PARAMETER Experiment Name: At_2mM_SA_P Parameter: Treatment Value: 2mM SA vs. No Treatment
  misc_feature: MA Experiment ID: 20000185 Result: Down-regulated in Transcription
  misc_feature: MA Experiment 20000185 PARAMETER Experiment Name: At_Roots__P Parameter: Age (day) Value: 7 vs. 21
  misc_feature: MA Experiment 20000185 PARAMETER Experiment Name: At_Roots__P Parameter: Organism Value: A. thaliana
  misc_feature: MA Experiment 20000185 PARAMETER Experiment Name: At_Roots__P Parameter: Tissue Value: Roots vs. Whole Plant
  misc_feature: MA Experiment ID: 20000213 Result: Up-regulated in Transcription
  misc_feature: MA Experiment 20000213 PARAMETER Experiment Name: At_4deg_Cold_P Parameter: Timepoint (hr) Value: 2
  misc_feature: MA Experiment ID: 20000224 Result: Down-regulated in Transcription
  misc_feature: MA Experiment ID: 20000264 Result: Down-regulated in Transcription
  misc_feature: MA Experiment 20000264 PARAMETER Experiment Name: At_Open_Flower_P Parameter: Age (day) Value: 21
  misc_feature: MA Experiment 20000264 PARAMETER Experiment Name: At_Open_Flower_P Parameter: Plant Line Value: WS
  misc_feature: MA Experiment 20000264 PARAMETER Experiment Name: At_Open_Flower_P Parameter: Tissue Value: Open Flower vs. Whole Plant
  misc_feature: MA Experiment ID: 20000436 Result: Down-regulated in Transcription
  misc_feature: MA Experiment 20000436 PARAMETER Experiment Name: At_Drought_P Parameter: Age (day) Value: 7
  misc_feature: MA Experiment 20000436 PARAMETER Experiment Name: At_Drought_P Parameter: Organism Value: A. thaliana
  misc_feature: MA Experiment 20000436 PARAMETER Experiment Name: At_Drought_P Parameter: Plant Line Value: WS
  misc_feature: MA Experiment 20000436 PARAMETER Experiment Name: At_Drought_P Parameter: Timepoint (hr) Value: 12
  misc_feature: MA Experiment 20000436 PARAMETER Experiment Name: At_Drought_P Parameter: Tissue Value: Whole Plant
  misc_feature: MA Experiment 20000436 PARAMETER Experiment Name: At_Drought_P Parameter: Treatment Value: Drought vs. No Drought
  misc_feature: MA Experiment ID: 20000439 Result: Down-regulated in Transcription
  misc_feature: MA Experiment 20000439 PARAMETER Experiment Name: At_Roots__P Parameter: Age (day) Value: 14 vs. 21
  misc_feature: MA Experiment 20000439 PARAMETER Experiment Name: At_Roots__P Parameter: Organism Value: A. thaliana
  misc_feature: MA Experiment 20000439 PARAMETER Experiment Name: At_Roots__P Parameter: Tissue Value: Roots vs. Whole Plant
  misc_feature: MA Experiment ID: 20000527 Result: Up-regulated in Transcription
  misc_feature: MA Experiment 20000527 PARAMETER Experiment Name: At_10percent_PEG_P Parameter: Age (day) Value: 20
  misc_feature: MA Experiment 20000527 PARAMETER Experiment Name: At_10percent_PEG_P Parameter: Organism Value: A. thaliana
  misc_feature: MA Experiment 20000527 PARAMETER Experiment Name: At_10percent_PEG_P Parameter: Plant Line Value: WS
  misc_feature: MA Experiment 20000527 PARAMETER Experiment Name: At_10percent_PEG_P Parameter: Timepoint (day) Value: 20
  misc_feature: MA Experiment 20000527 PARAMETER Experiment Name: At_10percent_PEG_P Parameter: Tissue Value: Whole Plant
  misc_feature: MA Experiment 20000527 PARAMETER Experiment Name: At_10percent_PEG_P Parameter: Treatment Value: 10percent PEG vs. No Treatment
  misc_feature: MA Experiment ID: 20000709 Result: Up-regulated in Transcription
  misc_feature: MA Experiment 20000709 PARAMETER Experiment Name: At_15mM_NH4NO3_L-to-H_P Parameter: Age (hr) Value: 14
  misc_feature: MA Experiment 20000709 PARAMETER Experiment Name: At_15mM_NH4NO3_L-to-H_P Parameter: Organism Value: A. thaliana
  misc_feature: MA Experiment 20000709 PARAMETER Experiment Name: At_15mM_NH4NO3_L-to-H_P Parameter: Plant Line Value: WS
  misc_feature: MA Experiment 20000709 PARAMETER Experiment Name: At_15mM_NH4NO3_L-to-H_P Parameter: Timepoint (hr) Value: 4
  misc_feature: MA Experiment 20000709 PARAMETER Experiment Name: At_15mM_NH4NO3_L-to-H_P Parameter: Tissue Value: Aerial
  misc_feature: MA Experiment 20000709 PARAMETER Experiment Name: At_15mM_NH4NO3_L-to-H_P Parameter: Treatment Value: 15mM NH4NO3 vs. 30mM Mannitol
  misc_feature: MA Experiment ID: 20000794 Result: Down-regulated in Transcription
  misc_feature: MA Experiment 20000794 PARAMETER Experiment Name: At_Petals_P Parameter: Age (day) Value: 23-25 days
  misc_feature: MA Experiment 20000794 PARAMETER Experiment Name: At_Petals_P Parameter: Plant Line Value: WS
  misc_feature: MA Experiment 20000794 PARAMETER Experiment Name: At_Petals_P Parameter: Tissue Value: Petals vs. Whole plant
  misc_feature: MA Experiment ID: 20001248 Result: Up-regulated in Transcription
  misc_feature: MA Experiment 20001248 PARAMETER Experiment Name: At_Far-red-induction_P Parameter: Age (day) Value: 7
  misc_feature: MA Experiment 20001248 PARAMETER Experiment Name: At_Far-red-induction_P Parameter: Light Value: Far-red vs. White
  misc_feature: MA Experiment 20001248 PARAMETER Experiment Name: At_Far-red-induction_P Parameter: Organism Value: A. thaliana
  misc_feature: MA Experiment 20001248 PARAMETER Experiment Name: At_Far-red-induction_P Parameter: Plant Line Value: Columbia
  misc_feature: MA Experiment 20001248 PARAMETER Experiment Name: At_Far-red-induction_P Parameter: Timepoint (hr) Value: 4
  misc_feature: MA Experiment 20001248 PARAMETER Experiment Name: At_Far-red-induction_P Parameter: Tissue Value: Whole Plant
  misc_feature: MA Experiment ID: 20001458 Result: Up-regulated in Transcription
  misc_feature: MA Experiment 20001458 PARAMETER Experiment Name: At_50mM_NH4NO3_L-to-H_P Parameter: Age (day) Value: Undefined
  misc_feature: MA Experiment 20001458 PARAMETER Experiment Name: At_50mM_NH4NO3_L-to-H_P Parameter: Organism Value: Undefined
  misc_feature: MA Experiment 20001458 PARAMETER Experiment Name: At_50mM_NH4NO3_L-to-H_P Parameter: Plant Line Value: Undefined
  misc_feature: MA Experiment 20001458 PARAMETER Experiment Name: At_50mM_NH4NO3_L-to-H_P Parameter: Timepoint (hr) Value: 2
  misc_feature: MA Experiment 20001458 PARAMETER Experiment Name: At_50mM_NH4NO3_L-to-H_P Parameter: Tissue Value: Siliques
  misc_feature: MA Experiment 20001458 PARAMETER Experiment Name: At_50mM_NH4NO3_L-to-H_P Parameter: Treatment Value: 50mM NH4NO3 vs. 100mM Manitol
  misc_feature: MA Experiment ID: 20001556 Result: Up-regulated in Transcription
  misc_feature: MA Experiment 20001556 PARAMETER Experiment Name: At_Drought_Soil_Dry_P Parameter: Age (day) Value: 26
  misc_feature: MA Experiment 20001556 PARAMETER Experiment Name: At_Drought_Soil_Dry_P Parameter: Organism Value: A. thaliana
  misc_feature: MA Experiment 20001556 PARAMETER Experiment Name: At_Drought_Soil_Dry_P Parameter: Plant Line Value: WS
  misc_feature: MA Experiment 20001556 PARAMETER Experiment Name: At_Drought_Soil_Dry_P Parameter: Post Timepoint (hr) Value: None
  misc_feature: MA Experiment 20001556 PARAMETER Experiment Name: At_Drought_Soil_Dry_P Parameter: Post-Treatment Value: None
  misc_feature: MA Experiment 20001556 PARAMETER Experiment Name: At_Drought_Soil_Dry_P Parameter: Timepoint (day) Value: 12
  misc_feature: MA Experiment 20001556 PARAMETER Experiment Name: At_Drought_Soil_Dry_P Parameter: Treatment Value: Drought vs. No Drought
  misc_feature: MA Experiment ID: 20001557 Result: Up-regulated in Transcription
  misc_feature: MA Experiment 20001557 PARAMETER Experiment Name: At_Drought_Soil_Dry_P Parameter: Age (day) Value: 27
  misc_feature: MA Experiment 20001557 PARAMETER Experiment Name: At_Drought_Soil_Dry_P Parameter: Organism Value: A. thaliana
  misc_feature: MA Experiment 20001557 PARAMETER Experiment Name: At_Drought_Soil_Dry_P Parameter: Plant Line Value: WS
  misc_feature: MA Experiment 20001557 PARAMETER Experiment Name: At_Drought_Soil_Dry_P Parameter: Post Timepoint (hr) Value: 3
  misc_feature: MA Experiment 20001557 PARAMETER Experiment Name: At_Drought_Soil_Dry_P Parameter: Post-Treatment Value: Re-Water vs. No Drought
  misc_feature: MA Experiment 20001557 PARAMETER Experiment Name: At_Drought_Soil_Dry_P Parameter: Timepoint (day) Value: 13
  misc_feature: MA Experiment 20001557 PARAMETER Experiment Name: At_Drought_Soil_Dry_P Parameter: Treatment Value: Drought vs. No Drought
  misc_feature: MA Experiment ID: 20001558 Result: Up-regulated in Transcription
  misc_feature: MA Experiment 20001558 PARAMETER Experiment Name: At_Drought_Soil_Dry_P Parameter: Age (day) Value: 27
  misc_feature: MA Experiment 20001558 PARAMETER Experiment Name: At_Drought_Soil_Dry_P Parameter: Organism Value: A. thaliana
  misc_feature: MA Experiment 20001558 PARAMETER Experiment Name: At_Drought_Soil_Dry_P Parameter: Plant Line Value: WS
  misc_feature: MA Experiment 20001558 PARAMETER Experiment Name: At_Drought_Soil_Dry_P Parameter: Post Timepoint (hr) Value: 6
  misc_feature: MA Experiment 20001558 PARAMETER Experiment Name: At_Drought_Soil_Dry_P Parameter: Post-Treatment Value: Re-Water vs. No Drought
  misc_feature: MA Experiment 20001558 PARAMETER Experiment Name: At_Drought_Soil_Dry_P Parameter: Timepoint (day) Value: 13
  misc_feature: MA Experiment 20001558 PARAMETER Experiment Name: At_Drought_Soil_Dry_P Parameter: Treatment Value: Drought vs. No Drought
  misc_feature: MA Experiment ID: 20001560 Result: Up-regulated in Transcription
  misc_feature: MA Experiment 20001560 PARAMETER Experiment Name: At_Drought_Soil_Dry_P Parameter: Age (day) Value: 28
  misc_feature: MA Experiment 20001560 PARAMETER Experiment Name: At_Drought_Soil_Dry_P Parameter: Organism Value: A. thaliana
  misc_feature: MA Experiment 20001560 PARAMETER Experiment Name: At_Drought_Soil_Dry_P Parameter: Plant Line Value: WS
  misc_feature: MA Experiment 20001560 PARAMETER Experiment Name: At_Drought_Soil_Dry_P Parameter: Post Timepoint (hr) Value: None
  misc_feature: MA Experiment 20001560 PARAMETER Experiment Name: At_Drought_Soil_Dry_P Parameter: Post-Treatment Value: None
  misc_feature: MA Experiment 20001560 PARAMETER Experiment Name: At_Drought_Soil_Dry_P Parameter: Timepoint (day) Value: 14
  misc_feature: MA Experiment 20001560 PARAMETER Experiment Name: At_Drought_Soil_Dry_P Parameter: Treatment Value: Drought vs. No Drought
  misc_feature: MA Experiment ID: 20001757 Result: Up-regulated in Transcription
  misc_feature: MA Experiment 20001757 PARAMETER Experiment Name: At_50mM_NH4NO3_L-to-H_P Parameter: Timepoint (hr) Value: 6
  misc_feature: MA Experiment 20001757 PARAMETER Experiment Name: At_50mM_NH4NO3_L-to-H_P Parameter: Tissue Value: Leaf
  misc_feature: MA Experiment 20001757 PARAMETER Experiment Name: At_50mM_NH4NO3_L-to-H_P Parameter: Treatment Value: 50mM NH4NO3 vs 100mM Mannitol
  misc_feature: MA Experiment ID: 20001905 Result: Down-regulated in Transcription
  misc_feature: MA Experiment 20001905 PARAMETER Experiment Name: At_Drought_Reproduction_P Parameter: Age (day) Value: 40
  misc_feature: MA Experiment 20001905 PARAMETER Experiment Name: At_Drought_Reproduction_P Parameter: Organism Value: A. thaliana
  misc_feature: MA Experiment 20001905 PARAMETER Experiment Name: At_Drought_Reproduction_P Parameter: Plant Line Value: WS
  misc_feature: MA Experiment 20001905 PARAMETER Experiment Name: At_Drought_Reproduction_P Parameter: Timepoint (day) Value: 10
  misc_feature: MA Experiment 20001905 PARAMETER Experiment Name: At_Drought_Reproduction_P Parameter: Tissue Value: Rosettes
  misc_feature: MA Experiment 20001905 PARAMETER Experiment Name: At_Drought_Reproduction_P Parameter: Treatment Value: Drought vs. No Drought
cccccccccccccggcagaacccttaaaccttatctcttcaccaccagcttctcaaagctttagcctcgagagcaaaattctctcaagctttagccatgtctgcctctgcttcttccctctctgctttcaatcctaaatcccttcctctctgcgtctccagacccgcttccgtctccgtcttacctccttccctctccttcaaacttcactccgaccacctcgtctctatcttcgcttcctccgccctcaaatgctcatcccccgccgagtacccgtcgcgtttcgttagaaacgttgctgtatcttcggattttgaggtggaggaagatgatatgttcgctgacggtgacgattcagcgcctgtggagcgtaactccttctctcctgaccttaagctctttgttggtaacctttcttttaacgttgatagcgctcagcttgctcagctctttgagagcgctggaaatgttgagatggttgaggttatctatgacaaagtgactggccggagcaggggtttcggatttgtgacaatgtcaaccgcagcggaagttgaagcagcagctcaacagttcaatggctatgaatttgaaggcagacctttgagagtcaatgctggccctcctccacctaaaagagaggaatccttctccagaggaccaagaagtggaggttacggttctgagcgtggtggaggttacggttccgagcgtggtggtggttatggttccgagcgtggtggtggttatggttccgagcgtggtggtggatacggttctcaacgtagtggtggtggttacggagggtctcaacgttccagttatggttcggggtcagggtccggttcgggctcaggttcaggaaaccgtctctacgtgggcaacctttcttggggtgttgatgacatggcacttgagaacttgtttaacgagcaaggaaaggtagttgaagctagggttatctacgacagggacagcggtagatccaagggttttggatttgtgacacttagctcttcccaagaggttcagaaggcgatcaattccttgaatggagcagatttggatggaagacaaataagagtctcagaggctgaggctaggccaccaagaggccaattttgagcggtcacacctctttcatattctcaaaaaatgcaaattctggagggttctttgaagcatatagggttagtggaaaatggcggtttcagacagtaactaaaactcactgctggtgcacgctaggctttatccgcctttgatgcatgaaggtcgttaaggaatggtctttttttgagaaagataacaattagattaaagcagagaacccatgtttcttgtctgttcgaatcctgcgagattggttgtagttgaagttgcattttcttcttgtcttttttgttggtattttgacacaatttggctttttggcatatgagagtgactgtagcagtctgttttatttgatgttcgtgatcttcttatgttctgaaaaccagttttcctaaaacttaacaaatttcgatatggaacaagaaattttttg

SEQ ID NO: 24722 - protein, 342 aa, Arabidopsis thaliana
  peptide (1)..(342): Ceres Seq. ID no. 13488567
  misc_feature (193)..(263): Pfam Name: Dec-1 protein, C terminal region Pfam Description: Dec-1 protein, C terminal region
  misc_feature (8)..(208): Homolog of NCBI NO: 12230585 NR Description: 29 kDa ribonucleoprotein B, chloroplast precursor
  misc_feature (239)..(342): Homolog of NCBI NO: 1350820 NR Description: 30 kDa ribonucleoprotein, chloroplast precursor
  misc_feature (1)..(201): Homolog of NCBI NO: 1350820 NR Description: 30 kDa ribonucleoprotein, chloroplast precursor
  misc_feature (234)..(342): Homolog of NCBI NO: 15228102 NR Description: 29 kDa ribonucleoprotein, chloroplast
  misc_feature (1)..(212): Homolog of NCBI NO: 15228102 NR Description: 29 kDa ribonucleoprotein, chloroplast
  misc_feature (234)..(342): Homolog of NCBI NO: 21617920 NR Description: putative RNA-binding protein [Arabidopsis
  misc_feature (1)..(212): Homolog of NCBI NO: 21617920 NR Description: putative RNA-binding protein [Arabidopsis
  misc_feature (9)..(342): Homolog of NCBI NO: 681904 NR Description: cp29 [Arabidopsis thaliana]
  misc_feature (1)..(342): Homolog of NCBI NO: 30693824 NR Description: 29 kDa ribonucleoprotein, chloroplast
  misc_feature (1)..(342): Homolog of NCBI NO: 15231817 NR Description: 29 kDa ribonucleoprotein, chloroplast
MSASASSLSAFNPKSLPLCVSRPASVSVLPPSLSFKLHSDHLVSIFASSALKCSSPAEYPSRFVRNVAVSSDFEVEEDDMFADGDDSAPVERNSFSPDLKLFVGNLSFNVDSAQLAQLFESAGNVEMVEVIYDKVTGRSRGFGFVTMSTAAEVEAAAQQFNGYEFEGRPLRVNAGPPPPKREESFSRGPRSGGYGSERGGGYGSERGGGYGSERGGGYGSERGGGYGSQRSGGGYGGSQRSSYGSGSGSGSGSGSGNRLYVGNLSWGVDDMALENLFNEQGKVVEARVIYDRDSGRSKGFGFVTLSSSQEVQKAINSLNGADLDGRQIRVSEAEARPPRGQF

SEQ ID NO: 24723 - protein, 263 aa, Arabidopsis thaliana
  peptide (1)..(263): Ceres Seq. ID no. 13488568
  misc_feature (114)..(184): Pfam Name: Dec-1 protein, C terminal region Pfam Description: Dec-1 protein, C terminal region
  misc_feature (1)..(129): Homolog of NCBI NO: 12230585 NR Description: 29 kDa ribonucleoprotein B, chloroplast precursor
  misc_feature (160)..(263): Homolog of NCBI NO: 1350820 NR Description: 30 kDa ribonucleoprotein, chloroplast precursor
  misc_feature (1)..(122): Homolog of NCBI NO: 1350820 NR Description: 30 kDa ribonucleoprotein, chloroplast precursor
  misc_feature (155)..(263): Homolog of NCBI NO: 15228102 NR Description: 29 kDa ribonucleoprotein, chloroplast
  misc_feature (1)..(133): Homolog of NCBI NO: 15228102 NR Description: 29 kDa ribonucleoprotein, chloroplast
  misc_feature (155)..(263): Homolog of NCBI NO: 21617920 NR Description: putative RNA-binding protein [Arabidopsis
  misc_feature (1)..(133): Homolog of NCBI NO: 21617920 NR Description: putative RNA-binding protein [Arabidopsis
  misc_feature (1)..(263): Homolog of NCBI NO: 681904 NR Description: cp29 [Arabidopsis thaliana]
  misc_feature (1)..(263): Homolog of NCBI NO: 30693824 NR Description: 29 kDa ribonucleoprotein, chloroplast
  misc_feature (1)..(263): Homolog of NCBI NO: 15231817 NR Description: 29 kDa ribonucleoprotein, chloroplast
MFADGDDSAPVERNSFSPDLKLFVGNLSFNVDSAQLAQLFESAGNVEMVEVIYDKVTGRSRGFGFVTMSTAAEVEAAAQQFNGYEFEGRPLRVNAGPPPPKREESFSRGPRSGGYGSERGGGYGSERGGGYGSERGGGYGSERGGGYGSQRSGGGYGGSQRSSYGSGSGSGSGSGSGNRLYVGNLSWGVDDMALENLFNEQGKVVEARVIYDRDSGRSKGFGFVTLSSSQEVQKAINSLNGADLDGRQIRVSEAEARPPRGQF

SEQ ID NO: 24724 - protein, 216 aa, Arabidopsis thaliana
  peptide (1)..(216): Ceres Seq. ID no. 13488569
  misc_feature (67)..(137): Pfam Name: Dec-1 protein, C terminal region Pfam Description: Dec-1 protein, C terminal region
  misc_feature (1)..(82): Homolog of NCBI NO: 12230585 NR Description: 29 kDa ribonucleoprotein B, chloroplast precursor
  misc_feature (113)..(216): Homolog of NCBI NO: 1350820 NR Description: 30 kDa ribonucleoprotein, chloroplast precursor
  misc_feature (1)..(75): Homolog of NCBI NO: 1350820 NR Description: 30 kDa ribonucleoprotein, chloroplast precursor
  misc_feature (108)..(216): Homolog of NCBI NO: 15228102 NR Description: 29 kDa ribonucleoprotein, chloroplast
  misc_feature (1)..(86): Homolog of NCBI NO: 15228102 NR Description: 29 kDa ribonucleoprotein, chloroplast
  misc_feature (108)..(216): Homolog of NCBI NO: 21617920 NR Description: putative RNA-binding protein [Arabidopsis
  misc_feature (1)..(86): Homolog of NCBI NO: 21617920 NR Description: putative RNA-binding protein [Arabidopsis
  misc_feature (1)..(216): Homolog of NCBI NO: 681904 NR Description: cp29 [Arabidopsis thaliana]
  misc_feature (1)..(216): Homolog of NCBI NO: 30693824 NR Description: 29 kDa ribonucleoprotein, chloroplast
  misc_feature (1)..(216): Homolog of NCBI NO: 15231817 NR Description: 29 kDa ribonucleoprotein, chloroplast
MVEVIYDKVTGRSRGFGFVTMSTAAEVEAAAQQFNGYEFEGRPLRVNAGPPPPKREESFSRGPRSGGYGSERGGGYGSERGGGYGSERGGGYGSERGGGYGSQRSGGGYGGSQRSSYGSGSGSGSGSGSGNRLYVGNLSWGVDDMALENLFNEQGKVVEARVIYDRDSGRSKGFGFVTLSSSQEVQKAINSLNGADLDGRQIRVSEAEARPPRGQF

SEQ ID NO: 24725 - DNA, 1461 bp, Arabidopsis thaliana
  misc_feature (1)..(1461): Ceres Seq. ID no. 12396151
  misc_feature: MA Experiment ID: 108434 Result: Down-regulated in Transcription
  misc_feature: MA Experiment 108434 PARAMETER Experiment Name: At_Root_Tips_cDNA_P Parameter: Tissue Value: Root Tips
  misc_feature: MA Experiment ID: 108462 Result: Up-regulated in Transcription
  misc_feature: MA Experiment 108462 PARAMETER Experiment Name: At_Germinating_Seeds_cDNA_P Parameter: Age (day) Value: 2 vs. 0
  misc_feature: MA Experiment 108462 PARAMETER Experiment Name: At_Germinating_Seeds_cDNA_P Parameter: Tissue Value: Germinating Seeds
  misc_feature: MA Experiment ID: 108463 Result: Up-regulated in Transcription
  misc_feature: MA Experiment 108463 PARAMETER Experiment Name: At_Germinating_Seeds_cDNA_P Parameter: Age (day) Value: 3 vs. 0
  misc_feature: MA Experiment 108463 PARAMETER Experiment Name: At_Germinating_Seeds_cDNA_P Parameter: Tissue Value: Germinating Seeds
  misc_feature: MA Experiment ID: 108464 Result: Up-regulated in Transcription
  misc_feature: MA Experiment 108464 PARAMETER Experiment Name: At_Germinating_Seeds_cDNA_P Parameter: Age (day) Value: 4 vs. 0
  misc_feature: MA Experiment 108464 PARAMETER Experiment Name: At_Germinating_Seeds_cDNA_P Parameter: Tissue Value: Germinating Seeds
  misc_feature: MA Experiment ID: 108473 Result: Down-regulated in Transcription
  misc_feature: MA Experiment 108473 PARAMETER Experiment Name: At_Drought_Flowers_cDNA_P Parameter: Timepoint (hr) Value: 7 d
  misc_feature: MA Experiment 108473 PARAMETER Experiment Name: At_Drought_Flowers_cDNA_P Parameter: Tissue Value: Flower
  misc_feature: MA Experiment 108473 PARAMETER Experiment Name: At_Drought_Flowers_cDNA_P Parameter: Treatment Value: Drought vs. No Drought
  misc_feature: MA Experiment ID: 108561 Result: Down-regulated in Transcription
  misc_feature: MA Experiment 108561 PARAMETER Experiment Name: At_100uM_ABA_cDNA_P Parameter: Timepoint (hr) Value: 6
  misc_feature: MA Experiment 108561 PARAMETER Experiment Name: At_100uM_ABA_cDNA_P Parameter: Tissue Value: Aerial
  misc_feature: MA Experiment 108561 PARAMETER Experiment Name: At_100uM_ABA_cDNA_P Parameter: Treatment Value: 100uM ABA vs. No Treatment
  misc_feature: MA Experiment ID: 108577 Result: Down-regulated in Transcription
  misc_feature: MA Experiment 108577 PARAMETER Experiment Name: At_42deg_Heat_cDNA_P Parameter: Temperature (deg C) Value: 42 vs. 22
  misc_feature: MA Experiment 108577 PARAMETER Experiment Name: At_42deg_Heat_cDNA_P Parameter: Timepoint (hr) Value: 6
  misc_feature: MA Experiment 108577 PARAMETER Experiment Name: At_42deg_Heat_cDNA_P Parameter: Tissue Value: Aerial
  misc_feature: MA Experiment ID: 108595 Result: Down-regulated in Transcription
  misc_feature: MA Experiment 108595 PARAMETER Experiment Name: At_Ler-pi_Ovule_cDNA_P Parameter: Plant Line Value: null
  misc_feature: MA Experiment ID: 108605 Result: Down-regulated in Transcription
  misc_feature: MA Experiment 108605 PARAMETER Experiment Name: At_100uM_ABA_cDNA_P Parameter: Timepoint (hr) Value: 6
  misc_feature: MA Experiment 108605 PARAMETER Experiment Name: At_100uM_ABA_cDNA_P Parameter: Tissue Value: Aerial
  misc_feature: MA Experiment 108605 PARAMETER Experiment Name: At_100uM_ABA_cDNA_P Parameter: Treatment Value: 100uM ABA vs. No Treatment
  misc_feature: MA Experiment ID: 108607 Result: Down-regulated in Transcription
  misc_feature: MA Experiment 108607 PARAMETER Experiment Name: At_100uM_ABA_cDNA_P Parameter: Timepoint (hr) Value: 4
  misc_feature: MA Experiment 108607 PARAMETER Experiment Name: At_100uM_ABA_cDNA_P Parameter: Tissue Value: Aerial
  misc_feature: MA Experiment 108607 PARAMETER Experiment Name: At_100uM_ABA_cDNA_P Parameter: Treatment Value: 100uM ABA vs. No Treatment
  misc_feature: MA Experiment ID: 108608 Result: Down-regulated in Transcription
  misc_feature: MA Experiment 108608 PARAMETER Experiment Name: At_100uM_ABA_cDNA_P Parameter: Timepoint (hr) Value: 1
  misc_feature: MA Experiment 108608 PARAMETER Experiment Name: At_100uM_ABA_cDNA_P Parameter: Tissue Value: Aerial
  misc_feature: MA Experiment 108608 PARAMETER Experiment Name: At_100uM_ABA_cDNA_P Parameter: Treatment Value: 100uM ABA vs. No Treatment
  misc_feature: MA Experiment ID: 108609 Result: Down-regulated in Transcription
  misc_feature: MA Experiment 108609 PARAMETER Experiment Name: At_100uM_ABA_cDNA_P Parameter: Timepoint (hr) Value: 24
  misc_feature: MA Experiment 108609 PARAMETER Experiment Name: At_100uM_ABA_cDNA_P Parameter: Tissue Value: Aerial
  misc_feature: MA Experiment 108609 PARAMETER Experiment Name: At_100uM_ABA_cDNA_P Parameter: Treatment Value: 100uM ABA vs. No Treatment
  misc_feature: MA Experiment ID: 20000069 Result: Down-regulated in Transcription
  misc_feature: MA Experiment 20000069 PARAMETER Experiment Name: At_100uM_ABA_Mutants_cDNA_P Parameter: Plant Line Value: CS23
  misc_feature: MA Experiment 20000069 PARAMETER Experiment Name: At_100uM_ABA_Mutants_cDNA_P Parameter: Timepoint (hr) Value: 6
  misc_feature: MA Experiment 20000069 PARAMETER Experiment Name: At_100uM_ABA_Mutants_cDNA_P Parameter: Tissue Value: Aerial
  misc_feature: MA Experiment 20000069 PARAMETER Experiment Name: At_100uM_ABA_Mutants_cDNA_P Parameter: Treatment Value: 100uM ABA vs. No Treatment
  misc_feature: MA Experiment ID: 20000070 Result: Down-regulated in Transcription
  misc_feature: MA Experiment 20000070 PARAMETER Experiment Name: At_100uM_ABA_Mutants_cDNA_P Parameter: Plant Line Value: CS24
  misc_feature: MA Experiment 20000070 PARAMETER Experiment Name: At_100uM_ABA_Mutants_cDNA_P Parameter: Timepoint (hr) Value: 6
  misc_feature: MA Experiment 20000070 PARAMETER Experiment Name: At_100uM_ABA_Mutants_cDNA_P Parameter: Tissue Value: Aerial
  misc_feature: MA Experiment 20000070 PARAMETER Experiment Name: At_100uM_ABA_Mutants_cDNA_P Parameter: Treatment Value: 100uM ABA vs. No Treatment
  misc_feature: MA Experiment ID: 20000071 Result: Down-regulated in Transcription
  misc_feature: MA Experiment 20000071 PARAMETER Experiment Name: At_100uM_ABA_Mutants_cDNA_P Parameter: Plant Line Value: CS8104
  misc_feature: MA Experiment 20000071 PARAMETER Experiment Name: At_100uM_ABA_Mutants_cDNA_P Parameter: Timepoint (hr) Value: 6
  misc_feature: MA Experiment 20000071 PARAMETER Experiment Name: At_100uM_ABA_Mutants_cDNA_P Parameter: Tissue Value: Aerial
  misc_feature: MA Experiment 20000071 PARAMETER Experiment Name: At_100uM_ABA_Mutants_cDNA_P Parameter: Treatment Value: 100uM ABA vs. No Treatment
  misc_feature: MA Experiment ID: 20000072 Result: Down-regulated in Transcription
  misc_feature: MA Experiment 20000072 PARAMETER Experiment Name: At_100uM_ABA_Mutants_cDNA_P Parameter: Plant Line Value: CS8105
  misc_feature: MA Experiment 20000072 PARAMETER Experiment Name: At_100uM_ABA_Mutants_cDNA_P Parameter: Timepoint (hr) Value: 6
  misc_feature: MA Experiment 20000072 PARAMETER Experiment Name: At_100uM_ABA_Mutants_cDNA_P Parameter: Tissue Value: Aerial
  misc_feature: MA Experiment 20000072 PARAMETER Experiment Name: At_100uM_ABA_Mutants_cDNA_P Parameter: Treatment Value: 100uM ABA vs. No Treatment
  misc_feature: MA Experiment ID: 20000086 Result: Down-regulated in Transcription
  misc_feature: MA Experiment 20000086 PARAMETER Experiment Name: At_100uM_ABA_Mutants_cDNA_P Parameter: Plant Line Value: CS22
  misc_feature: MA Experiment 20000086 PARAMETER Experiment Name: At_100uM_ABA_Mutants_cDNA_P Parameter: Timepoint (hr) Value: 6
  misc_feature: MA Experiment 20000086 PARAMETER Experiment Name: At_100uM_ABA_Mutants_cDNA_P Parameter: Tissue Value: Aerial
  misc_feature: MA Experiment 20000086 PARAMETER Experiment Name: At_100uM_ABA_Mutants_cDNA_P Parameter: Treatment Value: 100uM ABA vs. No Treatment
  misc_feature: MA Experiment ID: 20000087 Result: Down-regulated in Transcription
  misc_feature: MA Experiment 20000087 PARAMETER Experiment Name: At_100uM_ABA_Mutants_cDNA_P Parameter: Plant Line Value: WS
  misc_feature: MA Experiment 20000087 PARAMETER Experiment Name: At_100uM_ABA_Mutants_cDNA_P Parameter: Timepoint (hr) Value: 6
  misc_feature: MA Experiment 20000087 PARAMETER Experiment Name: At_100uM_ABA_Mutants_cDNA_P Parameter: Tissue Value: Aerial
  misc_feature: MA Experiment 20000087 PARAMETER Experiment Name: At_100uM_ABA_Mutants_cDNA_P Parameter: Treatment Value: 100uM ABA vs. No Treatment
  misc_feature: MA Experiment ID: 20000088 Result: Down-regulated in Transcription
  misc_feature: MA Experiment 20000088 PARAMETER Experiment Name: At_100uM_ABA_Mutants_cDNA_P Parameter: Plant Line Value: Landsberg
  misc_feature: MA Experiment 20000088 PARAMETER Experiment Name: At_100uM_ABA_Mutants_cDNA_P Parameter: Timepoint (hr) Value: 6
  misc_feature: MA Experiment 20000088 PARAMETER Experiment Name: At_100uM_ABA_Mutants_cDNA_P Parameter: Tissue Value: Aerial
  misc_feature: MA Experiment 20000088 PARAMETER Experiment Name: At_100uM_ABA_Mutants_cDNA_P Parameter: Treatment Value: 100uM ABA vs. No Treatment
  misc_feature: MA Experiment ID: 20000090 Result: Down-regulated in Transcription
  misc_feature: MA Experiment ID: 20000111 Result: Down-regulated in Transcription
  misc_feature: MA Experiment 20000111 PARAMETER Experiment Name: At_42deg_Heat_cDNA_P Parameter: Temperature (deg C) Value: 42 vs. 22
  misc_feature: MA Experiment 20000111 PARAMETER Experiment Name: At_42deg_Heat_cDNA_P Parameter: Timepoint (hr) Value: 6
  misc_feature: MA Experiment 20000111 PARAMETER Experiment Name: At_42deg_Heat_cDNA_P Parameter: Tissue Value: Aerial
  misc_feature: MA Experiment ID: 20000113 Result: Down-regulated in Transcription
  misc_feature: MA Experiment 20000113 PARAMETER Experiment Name: At_42deg_Heat_cDNA_P Parameter: Temperature (deg C) Value: 42 vs. 22
  misc_feature: MA Experiment 20000113 PARAMETER Experiment Name: At_42deg_Heat_cDNA_P Parameter: Timepoint (hr) Value: 8
  misc_feature: MA Experiment 20000113 PARAMETER Experiment Name: At_42deg_Heat_cDNA_P Parameter: Tissue Value: Aerial
  misc_feature: MA Experiment ID: 20000117 Result: Down-regulated in Transcription
  misc_feature: MA Experiment 20000117 PARAMETER Experiment Name: At_100uM_ABA_Mutants_cDNA_P Parameter: Plant Line Value: Columbia
  misc_feature: MA Experiment 20000117 PARAMETER Experiment Name: At_100uM_ABA_Mutants_cDNA_P Parameter: Timepoint (hr) Value: 6
  misc_feature: MA Experiment 20000117 PARAMETER Experiment Name: At_100uM_ABA_Mutants_cDNA_P Parameter: Tissue Value: Aerial
  misc_feature: MA Experiment 20000117 PARAMETER Experiment Name: At_100uM_ABA_Mutants_cDNA_P Parameter: Treatment Value: 100uM ABA vs. No Treatment
  misc_feature: MA Experiment ID: 20000314 Result: Down-regulated in Transcription
  misc_feature: MA Experiment 20000314 PARAMETER Experiment Name: At_14day_Shoots-Roots_Sub_P Parameter: Age (day) Value: 14
  misc_feature: MA Experiment 20000314 PARAMETER Experiment Name: At_14day_Shoots-Roots_Sub_P Parameter: Organism Value: A. thaliana
  misc_feature: MA Experiment 20000314 PARAMETER Experiment Name: At_14day_Shoots-Roots_Sub_P Parameter: Plant Line Value: WS
  misc_feature: MA Experiment 20000314 PARAMETER Experiment Name: At_14day_Shoots-Roots_Sub_P Parameter: Tissue Value: Roots vs. Whole Plant
  misc_feature: MA Experiment ID: 20000328 Result: Down-regulated in Transcription
  misc_feature: MA Experiment 20000328 PARAMETER Experiment Name: At_42deg_Heat_Sub_P Parameter: Age (day) Value: 14
  misc_feature: MA Experiment 20000328 PARAMETER Experiment Name: At_42deg_Heat_Sub_P Parameter: Organism Value: A. thaliana
  misc_feature: MA Experiment 20000328 PARAMETER Experiment Name: At_42deg_Heat_Sub_P Parameter: Plant Line Value: WS
  misc_feature: MA Experiment 20000328 PARAMETER Experiment Name: At_42deg_Heat_Sub_P Parameter: Temperature (deg C) Value: 42 vs. 22
  misc_feature: MA Experiment 20000328 PARAMETER Experiment Name: At_42deg_Heat_Sub_P Parameter: Timepoint (hr) Value: 6
  misc_feature: MA Experiment 20000328 PARAMETER Experiment Name: At_42deg_Heat_Sub_P Parameter: Tissue Value: Aerial
  misc_feature: MA Experiment ID: 20000329 Result: Up-regulated in Transcription
  misc_feature: MA Experiment 20000329 PARAMETER Experiment Name: At_4deg_Cold_Sub_P Parameter: Age (day) Value: 14
  misc_feature: MA Experiment 20000329 PARAMETER Experiment Name: At_4deg_Cold_Sub_P Parameter: Organism Value: A. thaliana
  misc_feature: MA Experiment 20000329 PARAMETER Experiment Name: At_4deg_Cold_Sub_P Parameter: Plant Line Value: WS
  misc_feature: MA Experiment 20000329 PARAMETER Experiment Name: At_4deg_Cold_Sub_P Parameter: Temperature (deg C) Value: 4 vs. 22
  misc_feature: MA Experiment 20000329 PARAMETER Experiment Name: At_4deg_Cold_Sub_P Parameter: Timepoint (hr) Value: 6
  misc_feature: MA Experiment 20000329 PARAMETER Experiment Name: At_4deg_Cold_Sub_P Parameter: Tissue Value: Aerial
  misc_feature: MA Experiment ID: 20000347 Result: Down-regulated in Transcription
  misc_feature: MA Experiment 20000347 PARAMETER Experiment Name: At_2mM_SA_Sub_P Parameter: Age (day) Value: 14
  misc_feature: MA Experiment 20000347 PARAMETER Experiment Name: At_2mM_SA_Sub_P Parameter: Organism Value: A. thaliana
  misc_feature: MA Experiment 20000347 PARAMETER Experiment Name: At_2mM_SA_Sub_P Parameter: Plant Line Value: WS
  misc_feature: MA Experiment 20000347 PARAMETER Experiment Name: At_2mM_SA_Sub_P Parameter: Timepoint (hr) Value: 6
  misc_feature: MA Experiment 20000347 PARAMETER Experiment Name: At_2mM_SA_Sub_P Parameter: Tissue Value: Aerial
  misc_feature: MA Experiment 20000347 PARAMETER Experiment Name: At_2mM_SA_Sub_P Parameter: Treatment Value: 2mM SA vs. No Treatment
  misc_feature: MA Experiment ID: 20000348 Result: Down-regulated in Transcription
  misc_feature: MA Experiment 20000348 PARAMETER Experiment Name: At_100uM_ABA_Sub_P Parameter: Age (day) Value: 14
  misc_feature: MA Experiment 20000348 PARAMETER Experiment Name: At_100uM_ABA_Sub_P Parameter: Organism Value: A. thaliana
  misc_feature: MA Experiment 20000348 PARAMETER Experiment Name: At_100uM_ABA_Sub_P Parameter: Plant Line Value: WS
  misc_feature: MA Experiment 20000348 PARAMETER Experiment Name: At_100uM_ABA_Sub_P Parameter: Timepoint (hr) Value: 1
  misc_feature: MA Experiment 20000348 PARAMETER Experiment Name: At_100uM_ABA_Sub_P Parameter: Tissue Value: Aerial
  misc_feature: MA Experiment 20000348 PARAMETER Experiment Name: At_100uM_ABA_Sub_P Parameter: Treatment Value: 100uM ABA vs. No Treatment
  misc_feature: MA Experiment ID: 20000349 Result: Down-regulated in Transcription
  misc_feature: MA Experiment 20000349 PARAMETER Experiment Name: At_100uM_ABA_Sub_P Parameter: Age (day) Value: 14
  misc_feature: MA Experiment 20000349 PARAMETER Experiment Name: At_100uM_ABA_Sub_P Parameter: Organism Value: A. thaliana
  misc_feature: MA Experiment 20000349 PARAMETER Experiment Name: At_100uM_ABA_Sub_P Parameter: Plant Line Value: WS
  misc_feature: MA Experiment 20000349 PARAMETER Experiment Name: At_100uM_ABA_Sub_P Parameter: Timepoint (hr) Value: 6
  misc_feature: MA Experiment 20000349 PARAMETER Experiment Name: At_100uM_ABA_Sub_P Parameter: Tissue Value: Aerial
  misc_feature: MA Experiment 20000349 PARAMETER Experiment Name: At_100uM_ABA_Sub_P Parameter: Treatment Value: 100uM ABA vs. No Treatment
  misc_feature: MA Experiment ID: 20000352 Result: Down-regulated in Transcription
  misc_feature: MA Experiment 20000352 PARAMETER Experiment Name: At_Drought_Sub_P Parameter: Age (day) Value: 7
  misc_feature: MA Experiment 20000352 PARAMETER Experiment Name: At_Drought_Sub_P Parameter: Organism Value: A. thaliana
  misc_feature: MA Experiment 20000352 PARAMETER Experiment Name: At_Drought_Sub_P Parameter: Plant Line Value: WS
  misc_feature: MA Experiment 20000352 PARAMETER Experiment Name: At_Drought_Sub_P Parameter: Timepoint (hr) Value: 6
  misc_feature: MA Experiment 20000352 PARAMETER Experiment Name: At_Drought_Sub_P Parameter: Tissue Value: Whole Plant
  misc_feature: MA Experiment 20000352 PARAMETER Experiment Name: At_Drought_Sub_P Parameter: Treatment Value: Drought vs. No Drought
  misc_feature: MA Experiment ID: 20001807 Result: Up-regulated in Transcription
  misc_feature: MA Experiment 20001807 PARAMETER Experiment Name: At_50mM_NH4NO3_L-to-H_Sub_P Parameter: Timepoint (hr) Value: 6
  misc_feature: MA Experiment 20001807 PARAMETER Experiment Name: At_50mM_NH4NO3_L-to-H_Sub_P Parameter: Tissue Value: Leaf
  misc_feature: MA Experiment 20001807 PARAMETER Experiment Name: At_50mM_NH4NO3_L-to-H_Sub_P Parameter: Treatment Value: 50mM NH4NO3 vs 100mM Mannitol
acgtattagtaagttccatgcaaaggacaaacatataataacaacaacttctcttctttactcgtttctctctcttttcttttcttttcttcaagcgcttctttaatggcggctgttcaatgtctcactttcctcttcttgtttcttctccaaaacgcgacgtcagcttcacctctccctctcttccggcggccgatccaaagcaaccacagcaacttcgtgaagcatcctcgccgaagtcaggtggttttcccggtgaatcatagtagttgtgatctgttcgccggcgagtgggtgcgggatgagacttacccactttaccggtctaaagaatgcggccgaggaatcatagatccgggattcgactgccagacttacggcagacctgactccgactatctcaagttccggtggaaacctttcaactgcaatgtccctagattcaatggagtgaagtttctacaagaaatgagagacaaaaccataatgttcgttggtgattcgttgggtagaaaccaatgggagtcgttgatatgtatgatctcttcatcagcaccgtccattaatactcacatcattcatgaagatcctctctctaccttcaagatccttgactacaacgtgaaggtatcattctatagagctccttatcttgtagacatcgacaaaattaacggaaagacaactcttaaactcgacgaaatctctgtggatgcatcgaatgcttggcgcacagccgacgttctattgttcaacactggtcactggtggagccacacaggttctttacgagggtgggagcagatggagacaggtgggagatattacggcgacatggataggttagtggcgttgagaaaaggactaggaacgtggtctagttgggtccttcgttatatcaattctcctctcactagagttttcttcctctcggtctcacccacacactacaacccaaatgagtggacttcaagatcaaaaacttcaacaataactcaaggaggtaaaagctgctacggacaaacgacaccgtttagtggaacaacgtatccaacaagttcatacgtgaaccagaagaaagtgatagacgacgtggttaaagagatgaagtctcatgtctcattgatggatataactatgctctctgctcttcgtgtcgacggtcatccttcgatatatagtggagatctcaacccttctttgaaaagaaatcctgaccgttcatctgattgtagccattggtgtcttccgggtcttcccgacacttggaaccaattgttttatgctgctttgttgtactgaagatttgattaaccaagatcaaacaaaatgtatctattgaattatatagtttcctaatttttatttgtaagttcactaagttgttacgtttaatcaaacatataattgtgaagttgaggatcttgttacgtttaatcaaacatataagttgttacgttc

SEQ ID NO: 24726 - protein, 398 aa, Arabidopsis thaliana
  peptide (1)..(398): Ceres Seq. ID no. 12396152
  misc_feature (54)..(360): Homolog of NCBI NO: 34911864 NR Description: OSJNBb0032K15.9 [Oryza sativa (japonica
  misc_feature (56)..(398): Homolog of NCBI NO: 30350855 NR Description: hypothetical protein At2g30900 [Arabidopsis
  misc_feature (56)..(398): Homolog of NCBI NO: 15224585 NR Description: hypothetical protein; protein id: At2g30900.1
  misc_feature (1)..(398): Homolog of NCBI NO: 21553643 NR Description: unknown [Arabidopsis thaliana]
  misc_feature (1)..(398): Homolog of NCBI NO: 15237711 NR Description: putative protein
  misc_feature (1)..(398): Homolog of NCBI NO: 18402220 NR Description: expressed protein
  misc_feature (31)..(397): Homolog of NCBI NO: 15229945 NR Description: hypothetical protein; protein id: At3g12060.1
  misc_feature (55)..(397): Homolog of NCBI NO: 9759298 NR Description: emb|CAB82953.1~gene_id:MPH15.5~strong similarity
  misc_feature (54)..(361): Homolog of NCBI NO: 18396930 NR Description: expressed protein
  misc_feature (54)..(361): Homolog of NCBI NO: 18403435 NR Description: expressed protein
MAAVQCLTFLFLFLLQNATSASPLPLFRRPIQSNHSNFVKHPRRSQVVFPVNHSSCDLFAGEWVRDETYPLYRSKECGRGIIDPGFDCQTYGRPDSDYLKFRWKPFNCNVPRFNGVKFLQEMRDKTIMFVGDSLGRNQWESLICMISSSAPSINTHIIHEDPLSTFKILDYNVKVSFYRAPYLVDIDKINGKTTLKLDEISVDASNAWRTADVLLFNTGHWWSHTGSLRGWEQMETGGRYYGDMDRLVALRKGLGTWSSWVLRYINSPLTRVFFLSVSPTHYNPNEWTSRSKTSTITQGGKSCYGQTTPFSGTTYPTSSYVNQKKVIDDVVKEMKSHVSLMDITMLSALRVDGHPSIYSGDLNPSLKRNPDRSSDCSHWCLPGLPDTWNQLFYAALLY

SEQ ID NO: 24727 - protein, 277 aa, Arabidopsis thaliana
  peptide (1)..(277): Ceres Seq. ID no. 12396153
  misc_feature (1)..(276): Homolog of NCBI NO: 15229945 NR Description: hypothetical protein; protein id: At3g12060.1
  misc_feature (1)..(276): Homolog of NCBI NO: 9759298 NR Description: emb|CAB82953.1~gene_id:MPH15.5~strong similarity
  misc_feature (1)..(240): Homolog of NCBI NO: 18396930 NR Description: expressed protein
  misc_feature (1)..(240): Homolog of NCBI NO: 18403435 NR Description: expressed protein
  misc_feature (1)..(239): Homolog of NCBI NO: 34911864 NR Description: OSJNBb0032K15.9 [Oryza sativa (japonica
  misc_feature (1)..(277): Homolog of NCBI NO: 30350855 NR Description: hypothetical protein At2g30900 [Arabidopsis
  misc_feature (1)..(277): Homolog of NCBI NO: 15224585 NR Description: hypothetical protein; protein id: At2g30900.1
  misc_feature (1)..(277): Homolog of NCBI NO: 21553643 NR Description: unknown [Arabidopsis thaliana]
  misc_feature (1)..(277): Homolog of NCBI NO: 15237711 NR Description: putative protein
  misc_feature (1)..(277): Homolog of NCBI NO: 18402220 NR Description: expressed protein
MRDKTIMFVGDSLGRNQWESLICMISSSAPSINTHIIHEDPLSTFKILDYNVKVSFYRAPYLVDIDKINGKTTLKLDEISVDASNAWRTADVLLFNTGHWWSHTGSLRGWEQMETGGRYYGDMDRLVALRKGLGTWSSWVLRYINSPLTRVFFLSVSPTHYNPNEWTSRSKTSTITQGGKSCYGQTTPFSGTTYPTSSYVNQKKVIDDVVKEMKSHVSLMDITMLSALRVDGHPSIYSGDLNPSLKRNPDRSSDCSHWCLPGLPDTWNQLFYAALLY

SEQ ID NO: 24728 - protein, 271 aa, Arabidopsis thaliana
  peptide (1)..(271): Ceres Seq. ID no. 12396154
  misc_feature (1)..(270): Homolog of NCBI NO: 15229945 NR Description: hypothetical protein; protein id: At3g12060.1
  misc_feature (1)..(270): Homolog of NCBI NO: 9759298 NR Description: emb|CAB82953.1~gene_id:MPH15.5~strong similarity
  misc_feature (1)..(234): Homolog of NCBI NO: 18396930 NR Description: expressed protein
  misc_feature (1)..(234): Homolog of NCBI NO: 18403435 NR Description: expressed protein
  misc_feature (1)..(233): Homolog of NCBI NO: 34911864 NR Description: OSJNBb0032K15.9 [Oryza sativa (japonica
  misc_feature (1)..(271): Homolog of NCBI NO: 30350855 NR Description: hypothetical protein At2g30900 [Arabidopsis
  misc_feature (1)..(271): Homolog of NCBI NO: 15224585 NR Description: hypothetical protein; protein id: At2g30900.1
  misc_feature (1)..(271): Homolog of NCBI NO: 21553643 NR Description: unknown [Arabidopsis thaliana]
  misc_feature (1)..(271): Homolog of NCBI NO: 15237711 NR Description: putative protein
  misc_feature (1)..(271): Homolog of NCBI NO: 18402220 NR Description: expressed protein
MFVGDSLGRNQWESLICMISSSAPSINTHIIHEDPLSTFKILDYNVKVSFYRAPYLVDIDKINGKTTLKLDEISVDASNAWRTADVLLFNTGHWWSHTGSLRGWEQMETGGRYYGDMDRLVALRKGLGTWSSWVLRYINSPLTRVFFLSVSPTHYNPNEWTSRSKTSTITQGGKSCYGQTTPFSGTTYPTSSYVNQKKVIDDVVKEMKSHVSLMDITMLSALRVDGHPSIYSGDLNPSLKRNPDRSSDCSHWCLPGLPDTWNQLFYAALLY

SEQ ID NO: 24729 - DNA, 1571 bp, Arabidopsis thaliana
  misc_feature (1)..(1571): Ceres Seq. ID no. 12421870
  misc_feature: MA Experiment ID: 108433 Result: Up-regulated in Transcription
  misc_feature: MA Experiment 108433 PARAMETER Experiment Name: At_rhl_Mutant2_cDNA_P Parameter: Age (day) Value: 7
  misc_feature: MA Experiment 108433 PARAMETER Experiment Name: At_rhl_Mutant2_cDNA_P Parameter: Organism Value: A. thaliana
  misc_feature: MA Experiment 108433 PARAMETER Experiment Name: At_rhl_Mutant2_cDNA_P Parameter: Plant Line Value: rhl Mutant vs. wt landsburg
  misc_feature: MA Experiment 108433 PARAMETER Experiment Name: At_rhl_Mutant2_cDNA_P Parameter: Tissue Value: Roots
  misc_feature: MA Experiment ID: 108434 Result: Down-regulated in Transcription
  misc_feature: MA Experiment 108434 PARAMETER Experiment Name: At_Root_Tips_cDNA_P Parameter: Tissue Value: Root Tips
  misc_feature: MA Experiment ID: 108462 Result: Up-regulated in Transcription
  misc_feature: MA Experiment 108462 PARAMETER Experiment Name: At_Germinating_Seeds_cDNA_P Parameter: Age (day) Value: 2 vs. 0
  misc_feature: MA Experiment 108462 PARAMETER Experiment Name: At_Germinating_Seeds_cDNA_P Parameter: Tissue Value: Germinating Seeds
  misc_feature: MA Experiment ID: 108463 Result: Up-regulated in Transcription
  misc_feature: MA Experiment 108463 PARAMETER Experiment Name: At_Germinating_Seeds_cDNA_P Parameter: Age (day) Value: 3 vs. 0
  misc_feature: MA Experiment 108463 PARAMETER Experiment Name: At_Germinating_Seeds_cDNA_P Parameter: Tissue Value: Germinating Seeds
  misc_feature: MA Experiment ID: 20000112 Result: Up-regulated in Transcription
  misc_feature: MA Experiment 20000112 PARAMETER Experiment Name: At_42deg_Heat_cDNA_P Parameter: Temperature (deg C) Value: 42 vs. 22
  misc_feature: MA Experiment 20000112 PARAMETER Experiment Name: At_42deg_Heat_cDNA_P Parameter: Timepoint (hr) Value: 2
  misc_feature: MA Experiment 20000112 PARAMETER Experiment Name: At_42deg_Heat_cDNA_P Parameter: Tissue Value: Aerial
  misc_feature: MA Experiment ID: 20000113 Result: Up-regulated in Transcription
  misc_feature: MA Experiment 20000113 PARAMETER Experiment Name: At_42deg_Heat_cDNA_P Parameter: Temperature (deg C) Value: 42 vs. 22
  misc_feature: MA Experiment 20000113 PARAMETER Experiment Name: At_42deg_Heat_cDNA_P Parameter: Timepoint (hr) Value: 8
  misc_feature: MA Experiment 20000113 PARAMETER Experiment Name: At_42deg_Heat_cDNA_P Parameter: Tissue Value: Aerial
  misc_feature: MA Experiment ID: 20000234 Result: Up-regulated in Transcription
  misc_feature: MA Experiment 20000234 PARAMETER Experiment Name: At_Siliques_P Parameter: Age (day) Value: 21
  misc_feature: MA Experiment 20000234 PARAMETER Experiment Name: At_Siliques_P Parameter: Organism Value: A. thaliana
  misc_feature: MA Experiment 20000234 PARAMETER Experiment Name: At_Siliques_P Parameter: Plant Line Value: WS
  misc_feature: MA Experiment 20000234 PARAMETER Experiment Name: At_Siliques_P Parameter: Tissue Value: Less Than 5mm Siliques vs. Whole Plant
  misc_feature: MA Experiment ID: 20000495 Result: Up-regulated in Transcription
  misc_feature: MA Experiment 20000495 PARAMETER Experiment Name: At_Guard_Cells_P Parameter: Harvest Date Value: 8/2/2002
  misc_feature: MA Experiment 20000495 PARAMETER Experiment Name: At_Guard_Cells_P Parameter: Organism Value: A. thaliana
  misc_feature: MA Experiment 20000495 PARAMETER Experiment Name: At_Guard_Cells_P Parameter: Tissue Value: Guard Cells vs. Leaves
aagtagatccaacatcattcatatctctctctctatctctgcataagctacggagcgatgtcggcgtgcatcaatggcttatgcagagccgtgactgtctctcttcttcttcttcttctttctttctctttttcctcagcttgctccaatggaaattgccagctgctggattcatgctcctcggctactgattgtgtctctggtttatactgtggagactgtcctgccgttggaagaagtaaacccgtctgcacaagaggccaagccacaagtccaacttccattatcaatggattgccttttaacaagtatacatggttgatgactcataatgcctttagcaatgcaaatgcaccacttttgccaggtgttgagaggattacattttacaatcaagaagatactattactaatcagctacaaaatggagttagagggctaatgctggatatgtatgacttcaacaatgatatctggctttgccattcgcttcgagggcaatgtttcaacttcaccgcttttcaacctgcaattaacatactgagggaagttgaggcatttctgagtcaaaacccaacagagattgttaccatcataatagaggattatgtgcacagacctaaaggcttatcaacactgtttgccaacgctggtttggacaaatactggttccctgtttcgaaaatgcctagaaagggagaagattggcctactgtgactgacatggtgcaagagaatcataggctcctggttttcacttctgttgctgccaaagaagatgaagaaggcgttgcgtatcagtggagatacatggttgaaaatgaatctggggatcccggagtgaagcgaggttcttgtcctaacagaaaagagtctcaacctttaaattcaaaaagttcttcgctattcttgatgaattacttcccgacatatccggttgagaaagacgcttgcaaggagcactcagctccacttgctgagatggttgggacttgtctcaagtcaggagggaatagaatgccaaactttcttgctgttaacttctacatgagaagtgatggaggcggcgttttcgaaattctggatagaatgaatggaccggtactttgcggttgtgaaactctttctgcttgccagccaggagcagcttatggttcatgcaaaaatgttactgtacagacaagaactccaagcatggattcaacggctggaagcaactcaggtggaagctactcaggttcagttcagttctcaagatctttagcttctgtggcccaactaaacaacattgttgtcttctgcttctcattgcttccgttgctgatatttctactatgacacaaccaatcaaaccacgtggagagattcttaggttagagaatcttgatcacttctttagaacgaatgagagagcctaagttgacatgaattgccttagaaagagtttctgatttgattcttgtattgtagactgcagagctataggcagaaatcttgtgtatgtgtgtcttcagcttctgttgattgttatgcaacttatatatatatatatatagacacaattctactcc

SEQ ID NO: 24730 - protein, 426 aa, Arabidopsis thaliana
  peptide (1)..(426): Ceres Seq. ID no. 12421871
  misc_feature (8)..(380): Homolog of NCBI NO: 38345515 NR Description: OSJNBa0039K24.18 [Oryza sativa (japonica
  misc_feature (38)..(388): Homolog of NCBI NO: 38345461 NR Description: OSJNBa0042L16.16 [Oryza sativa (japonica
  misc_feature (17)..(369): Homolog of NCBI NO: 27754722 NR Description: unknown protein [Arabidopsis thaliana]
  misc_feature (11)..(369): Homolog of NCBI NO: 15230348 NR Description: unknown protein; protein id: At3g19310.1
  misc_feature (10)..(368): Homolog of NCBI NO: 18402763 NR Description: expressed protein
  misc_feature (25)..(368): Homolog of NCBI NO: 25407778 NR Description: MAP3K-like protein kinase [imported] -
  misc_feature (14)..(423): Homolog of NCBI NO: 38637049 NR Description: MAP3K-like protein kinase [Oryza sativa (japonica
  misc_feature (77)..(256): Homolog of NCBI NO: 10177600 NR Description: contains similarity to MAP3K-like protein
  misc_feature (1)..(426): Homolog of NCBI NO: 21593427 NR Description: unknown [Arabidopsis thaliana]
  misc_feature (1)..(426): Homolog of NCBI NO: 18425155 NR Description: putative protein
MSACINGLCRAVTVSLLLLLLSFSFSSACSNGNCQLLDSCSSATDCVSGLYCGDCPAVGRSKPVCTRGQATSPTSIINGLPFNKYTWLMTHNAFSNANAPLLPGVERITFYNQEDTITNQLQNGVRGLMLDMYDFNNDIWLCHSLRGQCFNFTAFQPAINILREVEAFLSQNPTEIVTIIIEDYVHRPKGLSTLFANAGLDKYWFPVSKMPRKGEDWPTVTDMVQENHRLLVFTSVAAKEDEEGVAYQWRYMVENESGDPGVKRGSCPNRKESQPLNSKSSSLFLMNYFPTYPVEKDACKEHSAPLAEMVGTCLKSGGNRMPNFLAVNFYMRSDGGGVFEILDRMNGPVLCGCETLSACQPGAAYGSCKNVTVQTRTPSMDSTAGSNSGGSYSGSVQFSRSLASVAQLNNIVVFCFSLLPLLIFLL

SEQ ID NO: 24731 - protein, 338 aa, Arabidopsis thaliana
  peptide (1)..(338): Ceres Seq. ID no. 12421872
  misc_feature (1)..(292): Homolog of NCBI NO: 38345515 NR Description: OSJNBa0039K24.18 [Oryza sativa (japonica
  misc_feature (1)..(300): Homolog of NCBI NO: 38345461 NR Description: OSJNBa0042L16.16 [Oryza sativa (japonica
  misc_feature (1)..(281): Homolog of NCBI NO: 27754722 NR Description: unknown protein [Arabidopsis thaliana]
  misc_feature (1)..(281): Homolog of NCBI NO: 15230348 NR Description: unknown protein; protein id: At3g19310.1
  misc_feature (1)..(280): Homolog of NCBI NO: 18402763 NR Description: expressed protein
  misc_feature (1)..(280): Homolog of NCBI NO: 25407778 NR Description: MAP3K-like protein kinase [imported] -
  misc_feature (1)..(335): Homolog of NCBI NO: 38637049 NR Description: MAP3K-like protein kinase [Oryza sativa (japonica
  misc_feature (1)..(168): Homolog of NCBI NO: 10177600 NR Description: contains similarity to MAP3K-like protein
  misc_feature (1)..(338): Homolog of NCBI NO: 21593427 NR Description: unknown [Arabidopsis thaliana]
  misc_feature (1)..(338): Homolog of NCBI NO: 18425155 NR Description: putative protein
MTHNAFSNANAPLLPGVERITFYNQEDTITNQLQNGVRGLMLDMYDFNNDIWLCHSLRGQCFNFTAFQPAINILREVEAFLSQNPTEIVTIIIEDYVHRPKGLSTLFANAGLDKYWFPVSKMPRKGEDWPTVTDMVQENHRLLVFTSVAAKEDEEGVAYQWRYMVENESGDPGVKRGSCPNRKESQPLNSKSSSLFLMNYFPTYPVEKDACKEHSAPLAEMVGTCLKSGGNRMPNFLAVNFYMRSDGGGVFEILDRMNGPVLCGCETLSACQPGAAYGSCKNVTVQTRTPSMDSTAGSNSGGSYSGSVQFSRSLASVAQLNNIVVFCFSLLPLLIFLL

SEQ ID NO: 24732 - protein, 298 aa, Arabidopsis thaliana
  peptide (1)..(298): Ceres Seq. ID no. 12421873
  misc_feature (1)..(252): Homolog of NCBI NO: 38345515 NR Description: OSJNBa0039K24.18 [Oryza sativa (japonica
  misc_feature (1)..(260): Homolog of NCBI NO: 38345461 NR Description: OSJNBa0042L16.16 [Oryza sativa (japonica
  misc_feature (1)..(241): Homolog of NCBI NO: 27754722 NR Description: unknown protein [Arabidopsis thaliana]
  misc_feature (1)..(241): Homolog of NCBI NO: 15230348 NR Description: unknown protein; protein id: At3g19310.1
  misc_feature (1)..(240): Homolog of NCBI NO: 18402763 NR Description: expressed protein
  misc_feature (1)..(240): Homolog of NCBI NO: 25407778 NR Description: MAP3K-like protein kinase [imported] -
  misc_feature (1)..(295): Homolog of NCBI NO: 38637049 NR Description: MAP3K-like protein kinase [Oryza sativa (japonica
  misc_feature (1)..(128): Homolog of NCBI NO: 10177600 NR Description: contains similarity to MAP3K-like protein
  misc_feature (1)..(298): Homolog of NCBI NO: 21593427 NR Description: unknown [Arabidopsis thaliana]
  misc_feature (1)..(298): Homolog of NCBI NO: 18425155 NR Description: putative protein
MLDMYDFNNDIWLCHSLRGQCFNFTAFQPAINILREVEAFLSQNPTEIVTIIIEDYVHRPKGLSTLFANAGLDKYWFPVSKMPRKGEDWPTVTDMVQENHRLLVFTSVAAKEDEEGVAYQWRYMVENESGDPGVKRGSCPNRKESQPLNSKSSSLFLMNYFPTYPVEKDACKEHSAPLAEMVGTCLKSGGNRMPNFLAVNFYMRSDGGGVFEILDRMNGPVLCGCETLSACQPGAAYGSCKNVTVQTRTPSMDSTAGSNSGGSYSGSVQFSRSLASVAQLNNIVVFCFSLLPLLIFLL

SEQ ID NO: 24733 - DNA, 1512 bp, Arabidopsis thaliana
  misc_feature (1)..(1512): Ceres Seq. ID no. 12335241
  misc_feature: MA Experiment ID: 108434 Result: Down-regulated in Transcription
  misc_feature: MA Experiment 108434 PARAMETER Experiment Name: At_Root_Tips_cDNA_P Parameter: Tissue Value: Root Tips
  misc_feature: MA Experiment ID: 108577 Result: Down-regulated in Transcription
  misc_feature: MA Experiment 108577 PARAMETER Experiment Name: At_42deg_Heat_cDNA_P Parameter: Temperature (deg C) Value: 42 vs. 22
  misc_feature: MA Experiment 108577 PARAMETER Experiment Name: At_42deg_Heat_cDNA_P Parameter: Timepoint (hr) Value: 6
  misc_feature: MA Experiment 108577 PARAMETER Experiment Name: At_42deg_Heat_cDNA_P Parameter: Tissue Value: Aerial
  misc_feature: MA Experiment ID: 108585 Result: Up-regulated in Transcription
  misc_feature: MA Experiment 108585 PARAMETER Experiment Name: At_5mM_NaNP_cDNA_P Parameter: Timepoint (hr) Value: 6
  misc_feature: MA Experiment 108585 PARAMETER Experiment Name: At_5mM_NaNP_cDNA_P Parameter: Tissue Value: Aerial
  misc_feature: MA Experiment 108585 PARAMETER Experiment Name: At_5mM_NaNP_cDNA_P Parameter: Treatment Value: null
  misc_feature: MA Experiment ID: 108667 Result: Up-regulated in Transcription
  misc_feature: MA Experiment 108667 PARAMETER Experiment Name: At_2mM_SA_cDNA_P Parameter: Plant Line Value: WS
  misc_feature: MA Experiment 108667 PARAMETER Experiment Name: At_2mM_SA_cDNA_P Parameter: Timepoint (hr) Value: 1
  misc_feature: MA Experiment 108667 PARAMETER Experiment Name: At_2mM_SA_cDNA_P Parameter: Treatment Value: 2mM SA vs. No Treatment
  misc_feature: MA Experiment ID: 108668 Result: Up-regulated in Transcription
  misc_feature: MA Experiment 108668 PARAMETER Experiment Name: At_2mM_SA_cDNA_P Parameter: Plant Line Value: WS
  misc_feature: MA Experiment 108668 PARAMETER Experiment Name: At_2mM_SA_cDNA_P Parameter: Timepoint (hr) Value: 6
  misc_feature: MA Experiment 108668 PARAMETER Experiment Name: At_2mM_SA_cDNA_P Parameter: Treatment Value: 2mM SA vs. No Treatment
  misc_feature: MA Experiment ID: 20000088 Result: Up-regulated in Transcription
  misc_feature: MA Experiment 20000088 PARAMETER Experiment Name: At_100uM_ABA_Mutants_cDNA_P Parameter: Plant Line Value: Landsberg
  misc_feature: MA Experiment 20000088 PARAMETER Experiment Name: At_100uM_ABA_Mutants_cDNA_P Parameter: Timepoint (hr) Value: 6
  misc_feature: MA Experiment 20000088 PARAMETER Experiment Name: At_100uM_ABA_Mutants_cDNA_P Parameter: Tissue Value: Aerial
  misc_feature: MA Experiment 20000088 PARAMETER Experiment Name: At_100uM_ABA_Mutants_cDNA_P Parameter: Treatment Value: 100uM ABA vs. No Treatment
  misc_feature: MA Experiment ID: 20000090 Result: Up-regulated in Transcription
  misc_feature: MA Experiment ID: 20000113 Result: Down-regulated in Transcription
  misc_feature: MA Experiment 20000113 PARAMETER Experiment Name: At_42deg_Heat_cDNA_P Parameter: Temperature (deg C) Value: 42 vs. 22
  misc_feature: MA Experiment 20000113 PARAMETER Experiment Name: At_42deg_Heat_cDNA_P Parameter: Timepoint (hr) Value: 8
  misc_feature: MA Experiment 20000113 PARAMETER Experiment Name: At_42deg_Heat_cDNA_P Parameter: Tissue Value: Aerial
  misc_feature: MA Experiment ID: 20000179 Result: Up-regulated in Transcription
  misc_feature: MA Experiment 20000179 PARAMETER Experiment Name: At_Germinating_Seeds_P Parameter: Age (hr) Value: 6 vs. 0
  misc_feature: MA Experiment 20000179 PARAMETER Experiment Name: At_Germinating_Seeds_P Parameter: Tissue Value: Germinating Seeds
  misc_feature: MA Experiment ID: 20000182 Result: Up-regulated in Transcription
  misc_feature: MA Experiment 20000182 PARAMETER Experiment Name: At_2mM_SA_P Parameter: Age (day) Value: 14
  misc_feature: MA Experiment 20000182 PARAMETER Experiment Name: At_2mM_SA_P Parameter: Organism Value: A. thaliana
  misc_feature: MA Experiment 20000182 PARAMETER Experiment Name: At_2mM_SA_P Parameter: Plant Line Value: WS
  misc_feature: MA Experiment 20000182 PARAMETER Experiment Name: At_2mM_SA_P Parameter: Timepoint (hr) Value: 6
  misc_feature: MA Experiment 20000182 PARAMETER Experiment Name: At_2mM_SA_P Parameter: Tissue Value: Aerial
  misc_feature: MA Experiment 20000182 PARAMETER Experiment Name: At_2mM_SA_P Parameter: Treatment Value: 2mM SA vs. No Treatment
  misc_feature: MA Experiment ID: 20000185 Result: Down-regulated in Transcription
  misc_feature: MA Experiment 20000185 PARAMETER Experiment Name: At_Roots__P Parameter: Age (day) Value: 7 vs. 21
  misc_feature: MA Experiment 20000185 PARAMETER Experiment Name: At_Roots__P Parameter: Organism Value: A. thaliana
  misc_feature: MA Experiment 20000185 PARAMETER Experiment Name: At_Roots__P Parameter: Tissue Value: Roots vs. Whole Plant
  misc_feature: MA Experiment ID: 20000234 Result: Down-regulated in Transcription
  misc_feature: MA Experiment 20000234 PARAMETER Experiment Name: At_Siliques_P Parameter: Age (day) Value: 21
  misc_feature: MA Experiment 20000234 PARAMETER Experiment Name: At_Siliques_P Parameter: Organism Value: A. thaliana
  misc_feature: MA Experiment 20000234 PARAMETER Experiment Name: At_Siliques_P Parameter: Plant Line Value: WS
  misc_feature: MA Experiment 20000234 PARAMETER Experiment Name: At_Siliques_P Parameter: Tissue Value: Less Than 5mm Siliques vs. Whole Plant
  misc_feature: MA Experiment ID: 20000264 Result: Down-regulated in Transcription
  misc_feature: MA Experiment 20000264 PARAMETER Experiment Name: At_Open_Flower_P Parameter: Age (day) Value: 21
  misc_feature: MA Experiment 20000264 PARAMETER Experiment Name: At_Open_Flower_P Parameter: Plant Line Value: WS
  misc_feature: MA Experiment 20000264 PARAMETER Experiment Name: At_Open_Flower_P Parameter: Tissue Value: Open Flower vs. Whole Plant
  misc_feature: MA Experiment ID: 20000265 Result: Down-regulated in Transcription
  misc_feature: MA Experiment 20000265 PARAMETER Experiment Name: At_Open_Flower_P Parameter: Age (day) Value: 21
  misc_feature: MA Experiment 20000265 PARAMETER Experiment Name: At_Open_Flower_P Parameter: Plant Line Value: WS
  misc_feature: MA Experiment 20000265 PARAMETER Experiment Name: At_Open_Flower_P Parameter: Tissue Value: Closed Flower vs. Whole Plant
  misc_feature: MA Experiment ID: 20000286 Result: Down-regulated in Transcription
  misc_feature: MA Experiment 20000286 PARAMETER Experiment Name: At_Open_Flower_P Parameter: Age (day) Value: 21
  misc_feature: MA Experiment 20000286 PARAMETER Experiment Name: At_Open_Flower_P Parameter: Plant Line Value: WS
  misc_feature: MA Experiment 20000286 PARAMETER Experiment Name: At_Open_Flower_P Parameter: Tissue Value: Half Open vs. Whole Plant
  misc_feature: MA Experiment ID: 20000438 Result: Down-regulated in Transcription
  misc_feature: MA Experiment 20000438 PARAMETER Experiment Name: At_Shoots__P Parameter: Age (day) Value: 14
  misc_feature: MA Experiment 20000438 PARAMETER Experiment Name: At_Shoots__P Parameter: Tissue Value: Shoots vs. Whole Plant
  misc_feature: MA Experiment ID: 20000439 Result: Down-regulated in Transcription
  misc_feature: MA Experiment 20000439 PARAMETER Experiment Name: At_Roots__P Parameter: Age (day) Value: 14 vs. 21
  misc_feature: MA Experiment 20000439 PARAMETER Experiment Name: At_Roots__P Parameter: Organism Value: A. thaliana
  misc_feature: MA Experiment 20000439 PARAMETER Experiment Name: At_Roots__P Parameter: Tissue Value: Roots vs. Whole Plant
  misc_feature: MA Experiment ID: 20000794 Result: Down-regulated in Transcription
  misc_feature: MA Experiment 20000794 PARAMETER Experiment Name: At_Petals_P Parameter: Age (day) Value: 23-25 days
  misc_feature: MA Experiment 20000794 PARAMETER Experiment Name: At_Petals_P Parameter: Plant Line Value: WS
  misc_feature: MA Experiment 20000794 PARAMETER Experiment Name: At_Petals_P Parameter: Tissue Value: Petals vs. Whole plant
  misc_feature: MA Experiment ID: 20001556 Result: Down-regulated in Transcription
  misc_feature: MA Experiment 20001556 PARAMETER Experiment Name: At_Drought_Soil_Dry_P Parameter: Age (day) Value: 26
  misc_feature: MA Experiment 20001556 PARAMETER Experiment Name: At_Drought_Soil_Dry_P Parameter: Organism Value: A. thaliana
  misc_feature: MA Experiment 20001556 PARAMETER Experiment Name: At_Drought_Soil_Dry_P Parameter: Plant Line Value: WS
  misc_feature: MA Experiment 20001556 PARAMETER Experiment Name: At_Drought_Soil_Dry_P Parameter: Post Timepoint (hr) Value: None
  misc_feature: MA Experiment 20001556 PARAMETER Experiment Name: At_Drought_Soil_Dry_P Parameter: Post-Treatment Value: None
  misc_feature: MA Experiment 20001556 PARAMETER Experiment Name: At_Drought_Soil_Dry_P Parameter: Timepoint (day) Value: 12
  misc_feature: MA Experiment 20001556 PARAMETER Experiment Name: At_Drought_Soil_Dry_P Parameter: Treatment Value: Drought vs. No Drought
  misc_feature: MA Experiment ID: 20001559 Result: Down-regulated in Transcription
  misc_feature: MA Experiment 20001559 PARAMETER Experiment Name: At_Drought_Soil_Dry_P Parameter: Age (day) Value: 28
  misc_feature: MA Experiment 20001559 PARAMETER Experiment Name: At_Drought_Soil_Dry_P Parameter: Organism Value: A. thaliana
  misc_feature: MA Experiment 20001559 PARAMETER Experiment Name: At_Drought_Soil_Dry_P Parameter: Plant Line Value: WS
  misc_feature: MA Experiment 20001559 PARAMETER Experiment Name: At_Drought_Soil_Dry_P Parameter: Post Timepoint (hr) Value: 29
  misc_feature: MA Experiment 20001559 PARAMETER Experiment Name: At_Drought_Soil_Dry_P Parameter: Post-Treatment Value: Re-Water vs. No Drought
  misc_feature: MA Experiment 20001559 PARAMETER Experiment Name: At_Drought_Soil_Dry_P Parameter: Timepoint (day) Value: 14
  misc_feature: MA Experiment 20001559 PARAMETER Experiment Name: At_Drought_Soil_Dry_P Parameter: Treatment Value: Drought vs. No Drought
  misc_feature: MA Experiment ID: 20001907 Result: Down-regulated in Transcription
  misc_feature: MA Experiment 20001907 PARAMETER Experiment Name: At_Drought_Reproduction_P Parameter: Age (day) Value: 37
  misc_feature: MA Experiment 20001907 PARAMETER Experiment Name: At_Drought_Reproduction_P Parameter: Organism Value: A. thaliana
  misc_feature: MA Experiment 20001907 PARAMETER Experiment Name: At_Drought_Reproduction_P Parameter: Plant Line Value: WS
  misc_feature: MA Experiment 20001907 PARAMETER Experiment Name: At_Drought_Reproduction_P Parameter: Timepoint (day) Value: 7
  misc_feature: MA Experiment 20001907 PARAMETER Experiment Name: At_Drought_Reproduction_P Parameter: Tissue Value: Siliques
  misc_feature: MA Experiment 20001907 PARAMETER Experiment Name: At_Drought_Reproduction_P Parameter: Treatment Value: Drought vs. No Drought
ttcgctttcaacttcaccttcccttctccgccattgttactttctcagaagcttccaagtcaaccaatagagacttacttgtttgacttcttcctcacttacctcataatcctccttttggacttttcaataaaaccgcctacttgaatctgtacgacttcttctcatttttccattctttaagtcttcccgttgattcattccgatctgaaatctctctctagatttctctatttttcgaattttaaatgaacgatttgttttccagctcattctctcgcttccgcagcggagaaccatcccctcgccgagacgttgccggcggtggcgacggagttcagatggcgaatcccgcgggatcaaccggtggtgtgaacctcgacaagttcttcgaagatgttgaatctgtgaaagaagagctaaaggagctagatcggctcaacgaaacactctcttcatgtcacgagcagagcaagacgcttcacaatgctaaagccgttaaagatctccggtctaaaatggacggtgacgttggagtcgcgttgaagaaggcgaagatgattaaagttaaactcgaggcgctagatcgtgccaatgctgctaatcggagtctccctggctgtggacctggttcttcctccgatcgaaccaggacctctgtcctcaatggtctcaggaagaaattgatggactctatggatagtttcaaccgattgagggagcttatctcgtccgagtatagagaaactgtacagaggaggtacttcaccgtcaccggcgagaatccggatgaacgaaccctagatcgactgatttccactggagagagtgagagattcttgcagaaagcaatacaagaacaaggaagaggaagggtgttagacaccattaacgagattcaagaaaggcatgatgcggttaaagacattgagaagaatctcagggagcttcaccaggtgtttctagacatggccgtgctggtagagcaccagggagctcagcttgatgacatcgagagtcatgtgggtcgagctagctcctttatcagaggcggaactgaccagctacaaaccgctcgggtttaccagaagaacacgcgaaaatggacatgtattgccattattattctcatcatcatcataactgttgtggttcttgctgttttaaaaccgtggaacaacagcagtggcggcggcggcggtggtggtggtgggggtaccactggaggaagtcaaccaaattcagggacaccaccaaatcctcctcaggcaaggcgtctattgcgttgaagttgaagttgaagttgagtttcgttatttgcatatatattctttctttgaaaaaccttattatcaaaccagctttgtgttactactttctactgctggtttgttgttaatctcccgtttatttggtttttgtgaaagaatttaaaatgtgggttagatgagaaaattagtacaacattctcttgtatctatgtttgctatatgggttatatttacttgatgt

SEQ ID NO: 24734 - protein, 346 aa, Arabidopsis thaliana
  peptide (1)..(346): Ceres Seq. ID no. 12335242
  misc_feature (219)..(281): Pfam Name: SNARE domain Pfam Description: SNARE domain
  misc_feature (1)..(312): Homolog of NCBI NO: 5912543 NR Description: Knolle [Capsicum annuum]
  misc_feature (1)..(312): Homolog of NCBI NO: 28974542 NR Description: knolle [Antirrhinum majus]
  misc_feature (1)..(313): Homolog of NCBI NO: 18415701 NR Description: syntaxin SYP132
  misc_feature (1)..(306): Homolog of NCBI NO: 15236285 NR Description: syntaxin SYP123
  misc_feature (1)..(306): Homolog of NCBI NO: 15220328 NR Description: syntaxin SYP125; protein id: At1g11250.1
  misc_feature (1)..(306): Homolog of NCBI NO: 15219900 NR Description: syntaxin SYP124; protein id: At1g61290.1
  misc_feature (1)..(346): Homolog of NCBI NO: 11358871 NR Description: syntaxin synt4 [imported] - Arabidopsis thaliana
  misc_feature (1)..(346): Homolog of NCBI NO: 15231205 NR Description: syntaxin SYP122
  misc_feature (1)..(309): Homolog of NCBI NO: 4206787 NR Description: syntaxin-related protein Nt-syr1 [Nicotiana
  misc_feature (1)..(346): Homolog of NCBI NO: 15229865 NR Description: syntaxin SYP121
MNDLFSSSFSRFRSGEPSPRRDVAGGGDGVQMANPAGSTGGVNLDKFFEDVESVKEELKELDRLNETLSSCHEQSKTLHNAKAVKDLRSKMDGDVGVALKKAKMIKVKLEALDRANAANRSLPGCGPGSSSDRTRTSVLNGLRKKLMDSMDSFNRLRELISSEYRETVQRRYFTVTGENPDERTLDRLISTGESERFLQKAIQEQGRGRVLDTINEIQERHDAVKDIEKNLRELHQVFLDMAVLVEHQGAQLDDIESHVGRASSFIRGGTDQLQTARVYQKNTRKWTCIAIIILIIIITVVVLAVLKPWNNSSGGGGGGGGGGTTGGSQPNSGTPPNPPQARRLLR

SEQ ID NO: 24735 - protein, 315 aa, Arabidopsis thaliana
  peptide (1)..(315): Ceres Seq. ID no. 12335243
  misc_feature (188)..(250): Pfam Name: SNARE domain Pfam Description: SNARE domain
  misc_feature (1)..(281): Homolog of NCBI NO: 5912543 NR Description: Knolle [Capsicum annuum]
  misc_feature (1)..(281): Homolog of NCBI NO: 28974542 NR Description: knolle [Antirrhinum majus]
  misc_feature (1)..(282): Homolog of NCBI NO: 18415701 NR Description: syntaxin SYP132
  misc_feature (1)..(275): Homolog of NCBI NO: 15236285 NR Description: syntaxin SYP123
  misc_feature (1)..(275): Homolog of NCBI NO: 15220328 NR Description: syntaxin SYP125; protein id: At1g11250.1
  misc_feature (1)..(275): Homolog of NCBI NO: 15219900 NR Description: syntaxin SYP124; protein id: At1g61290.1
  misc_feature (1)..(315): Homolog of NCBI NO: 11358871 NR Description: syntaxin synt4 [imported] - Arabidopsis thaliana
  misc_feature (1)..(315): Homolog of NCBI NO: 15231205 NR Description: syntaxin SYP122
  misc_feature (1)..(278): Homolog of NCBI NO: 4206787 NR Description: syntaxin-related protein Nt-syr1 [Nicotiana
  misc_feature (1)..(315): Homolog of NCBI NO: 15229865 NR Description: syntaxin SYP121
MANPAGSTGGVNLDKFFEDVESVKEELKELDRLNETLSSCHEQSKTLHNAKAVKDLRSKMDGDVGVALKKAKMIKVKLEALDRANAANRSLPGCGPGSSSDRTRTSVLNGLRKKLMDSMDSFNRLRELISSEYRETVQRRYFTVTGENPDERTLDRLISTGESERFLQKAIQEQGRGRVLDTINEIQERHDAVKDIEKNLRELHQVFLDMAVLVEHQGAQLDDIESHVGRASSFIRGGTDQLQTARVYQKNTRKWTCIAIIILIIIITVVVLAVLKPWNNSSGGGGGGGGGGTTGGSQPNSGTPPNPPQARRLLR

SEQ ID NO: 24736 - protein, 256 aa, Arabidopsis thaliana
  peptide (1)..(256): Ceres Seq. ID no. 12335244
  misc_feature (129)..(191): Pfam Name: SNARE domain Pfam Description: SNARE domain
  misc_feature (1)..(256): Homolog of NCBI NO: 15231205 NR Description: syntaxin SYP122
  misc_feature (1)..(219): Homolog of NCBI NO: 4206787 NR Description: syntaxin-related protein Nt-syr1 [Nicotiana
  misc_feature (1)..(222): Homolog of NCBI NO: 28974542 NR Description: knolle [Antirrhinum majus]
  misc_feature (1)..(216): Homolog of NCBI NO: 15236285 NR Description: syntaxin SYP123
  misc_feature (1)..(216): Homolog of NCBI NO: 15219900 NR Description: syntaxin SYP124; protein id: At1g61290.1
  misc_feature (1)..(256): Homolog of NCBI NO: 11358871 NR Description: syntaxin synt4 [imported] - Arabidopsis thaliana
  misc_feature (1)..(216): Homolog of NCBI NO: 15220328 NR Description: syntaxin SYP125; protein id: At1g11250.1
  misc_feature (1)..(223): Homolog of NCBI NO: 18415701 NR Description: syntaxin SYP132
  misc_feature (1)..(222): Homolog of NCBI NO: 5912543 NR Description: Knolle [Capsicum annuum]
  misc_feature (1)..(256): Homolog of NCBI NO: 15229865 NR Description: syntaxin SYP121
MDGDVGVALKKAKMIKVKLEALDRANAANRSLPGCGPGSSSDRTRTSVLNGLRKKLMDSMDSFNRLRELISSEYRETVQRRYFTVTGENPDERTLDRLISTGESERFLQKAIQEQGRGRVLDTINEIQERHDAVKDIEKNLRELHQVFLDMAVLVEHQGAQLDDIESHVGRASSFIRGGTDQLQTARVYQKNTRKWTCIAIIILIIIITVVVLAVLKPWNNSSGGGGGGGGGGTTGGSQPNSGTPPNPPQARRLLR

SEQ ID NO: 24737 - DNA, 1403 bp, Arabidopsis thaliana
  misc_feature (1)..(1403): Ceres Seq. ID no. 12337010
  misc_feature: MA Experiment ID: 108576 Result: Up-regulated in Transcription
  misc_feature: MA Experiment 108576 PARAMETER Experiment Name: At_42deg_Heat_cDNA_P Parameter: Temperature (deg C) Value: 42 vs. 22
  misc_feature: MA Experiment 108576 PARAMETER Experiment Name: At_42deg_Heat_cDNA_P Parameter: Timepoint (hr) Value: 1
  misc_feature: MA Experiment 108576 PARAMETER Experiment Name: At_42deg_Heat_cDNA_P Parameter: Tissue Value: Aerial
  misc_feature: MA Experiment ID: 20000173 Result: Down-regulated in Transcription
  misc_feature: MA Experiment 20000173 PARAMETER Experiment Name: At_42deg_Heat_P Parameter: Age (day) Value: 14
  misc_feature: MA Experiment 20000173 PARAMETER Experiment Name: At_42deg_Heat_P Parameter: Organism Value: A. thaliana
  misc_feature: MA Experiment 20000173 PARAMETER Experiment Name: At_42deg_Heat_P Parameter: Plant Line Value: WS
  misc_feature: MA Experiment 20000173 PARAMETER Experiment Name: At_42deg_Heat_P Parameter: Temperature (deg C) Value: 42 vs. 22
  misc_feature: MA Experiment 20000173 PARAMETER Experiment Name: At_42deg_Heat_P Parameter: Timepoint (hr) Value: 6
  misc_feature: MA Experiment 20000173 PARAMETER Experiment Name: At_42deg_Heat_P Parameter: Tissue Value: Aerial
  misc_feature: MA Experiment ID: 20001557 Result: Down-regulated in Transcription
  misc_feature: MA Experiment 20001557 PARAMETER Experiment Name: At_Drought_Soil_Dry_P Parameter: Age (day) Value: 27
  misc_feature: MA Experiment 20001557 PARAMETER Experiment Name: At_Drought_Soil_Dry_P Parameter: Organism Value: A. thaliana
  misc_feature: MA Experiment 20001557 PARAMETER Experiment Name: At_Drought_Soil_Dry_P Parameter: Plant Line Value: WS
  misc_feature: MA Experiment 20001557 PARAMETER Experiment Name: At_Drought_Soil_Dry_P Parameter: Post Timepoint (hr) Value: 3
  misc_feature: MA Experiment 20001557 PARAMETER Experiment Name: At_Drought_Soil_Dry_P Parameter: Post-Treatment Value: Re-Water vs. No Drought
  misc_feature: MA Experiment 20001557 PARAMETER Experiment Name: At_Drought_Soil_Dry_P Parameter: Timepoint (day) Value: 13
  misc_feature: MA Experiment 20001557 PARAMETER Experiment Name: At_Drought_Soil_Dry_P Parameter: Treatment Value: Drought vs. No Drought
aaattaaatcaaaaataggttctgttttttgtgggaagatatgagattttcttcaagcaaaaagggagttatgagatgattggtcgtcctcgccggagaaaagatacgagacttgtctctcaatcctgaagcagactcgattcatccatcagtcaacaaatcttccttcacaatggatgaagaagaagcaatgttactgctaaaggaagaagatgaaggaacaagaagaactagtgttcctacacaactcatgaaactaaaacgaacccattggtggattcttgtctttataagtatcttcttcctcatctctgcacaagccattgctgttcttcttggtcggttttattacaacgaaggtggaaacagtaaatggatctctactcttgtccaaacttgtggttttccgattctctatctccctctttgtttccttcctgcttcacactcttcttcatcttcttgttctttcaagactctggtttggatttatctttctcttggttttgctattggtttagacaatcttttatactcttttggtcttttgtatctctctgcttcaacttattcgattctttgttcttcacagttagctttcaatggtgtcttctcttattacatcaattctcagaaaatcacttgtttgattctcttctctgtgttgtttctctctgtctctgctgtgttggtttctcttgacgatgattccaatagcccatcaggagattctaagtggagttacttgattggttgtttatgtactgtttttgcttctcttatctattctcttcagctctctcttatgcagttttctttcgagaatgttctcaagagtgagacgttctctatggttctcgagatgcaaatctatacgtcgcttgtggcttcttgtgttgcggttatcgggttgtttgcgagcggggaatggatgttgttgagtgtggagatggaagagtttcacgagggtcaagtcatttatgttttgactttggttgggaccgcggtttcgtggcaattgggttctgtaggagccgtggcgcttatatttctggtttcttcgctgttttcgaaccttattggtacactctcactcattgttacgcctcttgcagccattgcggtgttccacgacaagctgactgaggttaagatggtcgcgatgctcattgccttcatggggttcgggttttatatctaccagaattatcttgatgacctgaaagtacaaagagcacgagaagctcaggctgaatagttctgctgtgttttattagttaattttgttagtaacctttcttagaacaagctagctacaagtgttgtattgtatatagtagagttcataatccggtgataatatacataatactaattgcatatggagcttgtttttacgggtc

SEQ ID NO: 24738 - protein, 361 aa, Arabidopsis thaliana
  peptide (1)..(361): Ceres Seq. ID no. 12337011
  misc_feature (177)..(359): Pfam Name: Domain of unknown function, DUF250 Pfam Description: Domain of unknown function, DUF250
  misc_feature (21)..(351): Homolog of NCBI NO: 38605752 NR Description: OSJNBb0016D16.5 [Oryza sativa (japonica
  misc_feature (59)..(357): Homolog of NCBI NO: 7487849 NR Description: hypothetical protein T9A21.60 - Arabidopsis
  misc_feature (46)..(357): Homolog of NCBI NO: 15236799 NR Description: putative protein; protein id: At4g18220.1
  misc_feature (13)..(357): Homolog of NCBI NO: 30684325 NR Description: purine permease family [Arabidopsis thaliana]
  misc_feature (1)..(355): Homolog of NCBI NO: 38344290 NR Description: OSJNBa0013K16.22 [Oryza sativa (japonica
  misc_feature (1)..(355): Homolog of NCBI NO: 38605752 NR Description: OSJNBb0016D16.5 [Oryza sativa (japonica
  misc_feature (8)..(360): Homolog of NCBI NO: 15219436 NR Description: hypothetical protein
  misc_feature (7)..(361): Homolog of NCBI NO: 15237573 NR Description: purine permease-like protein; protein id:
  misc_feature (7)..(361): Homolog of NCBI NO: 25407443 NR Description: hypothetical protein AT4g08700 [imported] -
  misc_feature (1)..(361): Homolog of NCBI NO: 18413147 NR Description: putative protein
MDEEEAMLLLKEEDEGTRRTSVPTQLMKLKRTHWWILVFISIFFLISAQAIAVLLGRFYYNEGGNSKWISTLVQTCGFPILYLPLCFLPASHSSSSSCSFKTLVWIYLSLGFAIGLDNLLYSFGLLYLSASTYSILCSSQLAFNGVFSYYINSQKITCLILFSVLFLSVSAVLVSLDDDSNSPSGDSKWSYLIGCLCTVFASLIYSLQLSLMQFSFENVLKSETFSMVLEMQIYTSLVASCVAVIGLFASGEWMLLSVEMEEFHEGQVIYVLTLVGTAVSWQLGSVGAVALIFLVSSLFSNLIGTLSLIVTPLAAIAVFHDKLTEVKMVAMLIAFMGFGFYIYQNYLDDLKVQRAREAQAE

SEQ ID NO: 24739 - protein, 355 aa, Arabidopsis thaliana
  peptide (1)..(355): Ceres Seq. ID no. 12337012
  misc_feature (171)..(353): Pfam Name: Domain of unknown function, DUF250 Pfam Description: Domain of unknown function, DUF250
  misc_feature (15)..(345): Homolog of NCBI NO: 38605752 NR Description: OSJNBb0016D16.5 [Oryza sativa (japonica
  misc_feature (53)..(351): Homolog of NCBI NO: 7487849 NR Description: hypothetical protein T9A21.60 - Arabidopsis
  misc_feature (40)..(351): Homolog of NCBI NO: 15236799 NR Description: putative protein; protein id: At4g18220.1
  misc_feature (7)..(351): Homolog of NCBI NO: 30684325 NR Description: purine permease family [Arabidopsis thaliana]
  misc_feature (1)..(349): Homolog of NCBI NO: 38344290 NR Description: OSJNBa0013K16.22 [Oryza sativa (japonica
  misc_feature (1)..(349): Homolog of NCBI NO: 38605752 NR Description: OSJNBb0016D16.5 [Oryza sativa (japonica
  misc_feature (2)..(354): Homolog of NCBI NO: 15219436 NR Description: hypothetical protein
  misc_feature (1)..(355): Homolog of NCBI NO: 15237573 NR Description: purine permease-like protein; protein id:
  misc_feature (1)..(355): Homolog of NCBI NO: 25407443 NR Description: hypothetical protein AT4g08700 [imported] -
  misc_feature (1)..(355): Homolog of NCBI NO: 18413147 NR Description: putative protein
MLLLKEEDEGTRRTSVPTQLMKLKRTHWWILVFISIFFLISAQAIAVLLGRFYYNEGGNSKWISTLVQTCGFPILYLPLCFLPASHSSSSSCSFKTLVWIYLSLGFAIGLDNLLYSFGLLYLSASTYSILCSSQLAFNGVFSYYINSQKITCLILFSVLFLSVSAVLVSLDDDSNSPSGDSKWSYLIGCLCTVFASLIYSLQLSLMQFSFENVLKSETFSMVLEMQIYTSLVASCVAVIGLFASGEWMLLSVEMEEFHEGQVIYVLTLVGTAVSWQLGSVGAVALIFLVSSLFSNLIGTLSLIVTPLAAIAVFHDKLTEVKMVAMLIAFMGFGFYIYQNYLDDLKVQRAREAQAE

SEQ ID NO: 24740 - protein, 335 aa, Arabidopsis thaliana
  peptide (1)..(335): Ceres Seq. ID no. 12337013
  misc_feature (151)..(333): Pfam Name: Domain of unknown function, DUF250 Pfam Description: Domain of unknown function, DUF250
  misc_feature (1)..(325): Homolog of NCBI NO: 38605752 NR Description: OSJNBb0016D16.5 [Oryza sativa (japonica
  misc_feature (33)..(331): Homolog of NCBI NO: 7487849 NR Description: hypothetical protein T9A21.60 - Arabidopsis
  misc_feature (20)..(331): Homolog of NCBI NO: 15236799 NR Description: putative protein; protein id: At4g18220.1
  misc_feature (1)..(331): Homolog of NCBI NO: 30684325 NR Description: purine permease family [Arabidopsis thaliana]
  misc_feature (1)..(329): Homolog of NCBI NO: 38344290 NR Description: OSJNBa0013K16.22 [Oryza sativa (japonica
  misc_feature (1)..(329): Homolog of NCBI NO: 38605752 NR Description: OSJNBb0016D16.5 [Oryza sativa (japonica
  misc_feature (1)..(334): Homolog of NCBI NO: 15219436 NR Description: hypothetical protein
  misc_feature (1)..(335): Homolog of NCBI NO: 15237573 NR Description: purine permease-like protein; protein id:
  misc_feature (1)..(335): Homolog of NCBI NO: 25407443 NR Description: hypothetical protein AT4g08700 [imported] -
  misc_feature (1)..(335): Homolog of NCBI NO: 18413147 NR Description: putative protein
MKLKRTHWWILVFISIFFLISAQAIAVLLGRFYYNEGGNSKWISTLVQTCGFPILYLPLCFLPASHSSSSSCSFKTLVWIYLSLGFAIGLDNLLYSFGLLYLSASTYSILCSSQLAFNGVFSYYINSQKITCLILFSVLFLSVSAVLVSLDDDSNSPSGDSKWSYLIGCLCTVFASLIYSLQLSLMQFSFENVLKSETFSMVLEMQIYTSLVASCVAVIGLFASGEWMLLSVEMEEFHEGQVIYVLTLVGTAVSWQLGSVGAVALIFLVSSLFSNLIGTLSLIVTPLAAIAVFHDKLTEVKMVAMLIAFMGFGFYIYQNYLDDLKVQRAREAQAE

SEQ ID NO: 24741 - DNA, 815 bp, Arabidopsis thaliana
  misc_feature (1)..(815): Ceres Seq. ID no. 13492861
  misc_feature: MA Experiment ID: 108462 Result: Down-regulated in Transcription
  misc_feature: MA Experiment 108462 PARAMETER Experiment Name: At_Germinating_Seeds_cDNA_P Parameter: Age (day) Value: 2 vs. 0
  misc_feature: MA Experiment 108462 PARAMETER Experiment Name: At_Germinating_Seeds_cDNA_P Parameter: Tissue Value: Germinating Seeds
  misc_feature: MA Experiment ID: 108463 Result: Down-regulated in Transcription
  misc_feature: MA Experiment 108463 PARAMETER Experiment Name: At_Germinating_Seeds_cDNA_P Parameter: Age (day) Value: 3 vs. 0
  misc_feature: MA Experiment 108463 PARAMETER Experiment Name: At_Germinating_Seeds_cDNA_P Parameter: Tissue Value: Germinating Seeds
  misc_feature: MA Experiment ID: 20000113 Result: Down-regulated in Transcription
  misc_feature: MA Experiment 20000113 PARAMETER Experiment Name: At_42deg_Heat_cDNA_P Parameter: Temperature (deg C) Value: 42 vs. 22
  misc_feature: MA Experiment 20000113 PARAMETER Experiment Name: At_42deg_Heat_cDNA_P Parameter: Timepoint (hr) Value: 8
  misc_feature: MA Experiment 20000113 PARAMETER Experiment Name: At_42deg_Heat_cDNA_P Parameter: Tissue Value: Aerial
  misc_feature: MA Experiment ID: 20000451 Result: Down-regulated in Transcription
  misc_feature: MA Experiment 20000451 PARAMETER Experiment Name: At_CS6879_Shoots-Roots_P Parameter: Age (day) Value: 14
  misc_feature: MA Experiment 20000451 PARAMETER Experiment Name: At_CS6879_Shoots-Roots_P Parameter: Organism Value: A. thaliana
  misc_feature: MA Experiment 20000451 PARAMETER Experiment Name: At_CS6879_Shoots-Roots_P Parameter: Plant Line Value: CS6879 vs. WS
  misc_feature: MA Experiment 20000451 PARAMETER Experiment Name: At_CS6879_Shoots-Roots_P Parameter: Tissue Value: Roots
  misc_feature: MA Experiment ID: 20000452 Result: Down-regulated in Transcription
  misc_feature: MA Experiment 20000452 PARAMETER Experiment Name: At_CS6879_Shoots-Roots_P Parameter: Age (day) Value: 14
  misc_feature: MA Experiment 20000452 PARAMETER Experiment Name: At_CS6879_Shoots-Roots_P Parameter: Organism Value: A. thaliana
  misc_feature: MA Experiment 20000452 PARAMETER Experiment Name: At_CS6879_Shoots-Roots_P Parameter: Plant Line Value: CS6879 vs. WS
  misc_feature: MA Experiment 20000452 PARAMETER Experiment Name: At_CS6879_Shoots-Roots_P Parameter: Tissue Value: Shoots
gtacatttgtttttaaccagttagcaacttcttcttccggaatctttaaaccaacaaaaaaaagttatcattcgggttaagatggagaaaccgggtcatgaaacggatattgcgggttcaagacgaacccatctgaagaaatcattcaaatccactcttcgacatcttctcactgcttgctccaaacaggattttgttgatattttctcgaaattcagtggggctgagcaagaactgctttttcagttgtatactcgggttgttgtgaatttgcatcagacaatagaggaagagtttgatgaacaatgtcacgaaactcaggtcggaccaattcttgatacagtcgaggagctggtcgaagaacagagtttggatcccttgttttctgataagactgatgtaatggcaatagcatatgatcttacaacatctaagaagaacgagatacaaaagttaacagttttgctccaaagggctgaagaacagaatcgccagaaggaagcccggatcagcatgctcaaaaaacaaacacaagatctctcaggcacagcggacagaatcgaaaagctgaatgccggggtctccggctactttgaaggaaaagacaagctacctccaatatagtttcgagaaaattgcaatgaagaagcgtgtcatttccattccctgcatttgtatatactttattatagagtcttaacaatctagtcagtagtcacaataacttgcttcatgtgtaaaccactgagaatctgaatgagtttgtactttggtattggtttgacgacaattcatgcaaaatattttccaaggtt

SEQ ID NO: 24742 - protein, 180 aa, Arabidopsis thaliana
  peptide (1)..(180): Ceres Seq. ID no. 13492862
  misc_feature (1)..(163): Homolog of NCBI NO: 7487713 NR Description: hypothetical protein T5K18.130 - Arabidopsis
  misc_feature (11)..(173): Homolog of NCBI NO: 34905298 NR Description: P0577B11.20 [Oryza sativa (japonica
  misc_feature (45)..(180): Homolog of NCBI NO: 7487713 NR Description: hypothetical protein T5K18.130 - Arabidopsis
  misc_feature (1)..(180): Homolog of NCBI NO: 18415295 NR Description: expressed protein [Arabidopsis thaliana]
MEKPGHETDIAGSRRTHLKKSFKSTLRHLLTACSKQDFVDIFSKFSGAEQELLFQLYTRVVVNLHQTIEEEFDEQCHETQVGPILDTVEELVEEQSLDPLFSDKTDVMAIAYDLTTSKKNEIQKLTVLLQRAEEQNRQKEARISMLKKQTQDLSGTADRIEKLNAGVSGYFEGKDKLPPI

SEQ ID NO: 24743 - DNA, 1059 bp, Arabidopsis thaliana
  misc_feature (1)..(1059): Ceres Seq. ID no. 12421562
  misc_feature: MA Experiment ID: 108434 Result: Down-regulated in Transcription
  misc_feature: MA Experiment 108434 PARAMETER Experiment Name: At_Root_Tips_cDNA_P Parameter: Tissue Value: Root Tips
  misc_feature: MA Experiment ID: 108574 Result: Up-regulated in Transcription
  misc_feature: MA Experiment 108574 PARAMETER Experiment Name: At_Wounding__cDNA_P Parameter: Timepoint (hr) Value: 1
  misc_feature: MA Experiment 108574 PARAMETER Experiment Name: At_Wounding__cDNA_P Parameter: Tissue Value: Aerial
  misc_feature: MA Experiment 108574 PARAMETER Experiment Name: At_Wounding__cDNA_P Parameter: Treatment Value: Wounding vs. No Wounding
  misc_feature: MA Experiment ID: 108608 Result: Up-regulated in Transcription
  misc_feature: MA Experiment 108608 PARAMETER Experiment Name: At_100uM_ABA_cDNA_P Parameter: Timepoint (hr) Value: 1
  misc_feature: MA Experiment 108608 PARAMETER Experiment Name: At_100uM_ABA_cDNA_P Parameter: Tissue Value: Aerial
  misc_feature: MA Experiment 108608 PARAMETER Experiment Name: At_100uM_ABA_cDNA_P Parameter: Treatment Value: 100uM ABA vs. No Treatment
  misc_feature: MA Experiment ID: 20000111 Result: Up-regulated in Transcription
  misc_feature: MA Experiment 20000111 PARAMETER Experiment Name: At_42deg_Heat_cDNA_P Parameter: Temperature (deg C) Value: 42 vs. 22
  misc_feature: MA Experiment 20000111 PARAMETER Experiment Name: At_42deg_Heat_cDNA_P Parameter: Timepoint (hr) Value: 6
  misc_feature: MA Experiment 20000111 PARAMETER Experiment Name: At_42deg_Heat_cDNA_P Parameter: Tissue Value: Aerial
attcatcgcatcccccacacacctcattaacattataattgtttttttagttattcttcaatttcaagaaaatgctgcaaggctttctcttcctcctctcagtcgtactcctcttctcctcatctgcagccgcctgcgaccgatgtcttcacagttctaaggcagcttatttctcctctgcatctgctctctcctctggagcttgtgcatatggctctatggctaccggtttcttcgccggacacattgctgcggctctgccttccatctacaaagacggctccggctgcggagcttgcttccaggtcagatgcaagaacccgacgctttgcagcagcaaaggaaccacggtgattgtcacagacttgaacaagaccaaccaaaccgatcttgtccttagcagcagagcctttagggccatggctaagcctgttgttggcgccgacagagatcttctcaaacaaggcattgtcgatattgaatacaggagagttccttgcgattacggtaacaagaagatgaacgtgagagttgaagaatcaagcaaaaatccaaactacttggcgataaagctcttgtaccaaggaggccaaactgaagtggtagccatttacattgctcaggttggttcgtcacattggagttacatgaccagaagccacggagccgtgtgggttactgacaaagtacccaacggagctctgcagttcaggttcgtggtgaccgcaggctacgacggcaaaatggtctggtcgcagagggtccttccagctaactgggaagctggaaagtcctatgacgccggcgttcagatcacagacattgctcaggaaggttgtgatccatgcgacgatcacatctggaactgagtctctctgctttccttctaatgtgtaagtaacagacttgtttattagatgagaggaagaatcaacgggaatgcataatctgacgatttcataagaatgaatgaaacaaaacaagagagagctaagaagaagaaaaaggattgtatatgtatgtacaaaaggtctatatatgtacaccattattcttttc

SEQ ID NO: 24744 - protein, 265 aa, Arabidopsis thaliana
  peptide (1)..(265): Ceres Seq. ID no. 12421563
  misc_feature (150)..(233): Pfam Name: Pollen allergen Pfam Description: Pollen allergen
  misc_feature (5)..(264): Homolog of NCBI NO: 34901594 NR Description: P0571D04.11 [Oryza sativa (japonica
  misc_feature (6)..(264): Homolog of NCBI NO: 20502989 NR Description: Putative pollen allergen [Oryza sativa (japonica
  misc_feature (6)..(264): Homolog of NCBI NO: 37536544 NR Description: putative pollen allergen [Oryza sativa (japonica
  misc_feature (6)..(264): Homolog of NCBI NO: 21654743 NR Description: expansin-like protein 1 [Oryza sativa]
  misc_feature (7)..(264): Homolog of NCBI NO: 33111959 NR Description: expansin-like protein [Quercus robur]
  misc_feature (50)..(265): Homolog of NCBI NO: 30692657 NR Description: expansin protein family (EXPL3) [Arabidopsis
  misc_feature (2)..(265): Homolog of NCBI NO: 20138389 NR Description: Expansin-like 3 precursor (At-EXPL3)
  misc_feature (5)..(265): Homolog of NCBI NO: 21555265 NR Description: Expansin-like 1 precursor (At-EXPL1)
  misc_feature (5)..(265): Homolog of NCBI NO: 15231303 NR Description: putative protein
  misc_feature (1)..(265): Homolog of NCBI NO: 15233841 NR Description: putative pollen allergen
MLQGFLFLLSVVLLFSSSAAACDRCLHSSKAAYFSSASALSSGACAYGSMATGFFAGHIAAALPSIYKDGSGCGACFQVRCKNPTLCSSKGTTVIVTDLNKTNQTDLVLSSRAFRAMAKPVVGADRDLLKQGIVDIEYRRVPCDYGNKKMNVRVEESSKNPNYLAIKLLYQGGQTEVVAIYIAQVGSSHWSYMTRSHGAVWVTDKVPNGALQFRFVVTAGYDGKMVWSQRVLPANWEAGKSYDAGVQITDIAQEGCDPCDDHIWN

SEQ ID NO: 24745 - protein, 216 aa, Arabidopsis thaliana
  peptide (1)..(216): Ceres Seq. ID no. 12421564
  misc_feature (101)..(184): Pfam Name: Pollen allergen Pfam Description: Pollen allergen
  misc_feature (1)..(215): Homolog of NCBI NO: 34901594 NR Description: P0571D04.11 [Oryza sativa (japonica
  misc_feature (1)..(215): Homolog of NCBI NO: 20502989 NR Description: Putative pollen allergen [Oryza sativa (japonica
  misc_feature (1)..(215): Homolog of NCBI NO: 37536544 NR Description: putative pollen allergen [Oryza sativa (japonica
  misc_feature (1)..(215): Homolog of NCBI NO: 21654743 NR Description: expansin-like protein 1 [Oryza sativa]
  misc_feature (1)..(215): Homolog of NCBI NO: 33111959 NR Description: expansin-like protein [Quercus robur]
  misc_feature (1)..(216): Homolog of NCBI NO: 30692657 NR Description: expansin protein family (EXPL3) [Arabidopsis
  misc_feature (1)..(216): Homolog of NCBI NO: 20138389 NR Description: Expansin-like 3 precursor (At-EXPL3)
  misc_feature (1)..(216): Homolog of NCBI NO: 21555265 NR Description: Expansin-like 1 precursor (At-EXPL1)
  misc_feature (1)..(216): Homolog of NCBI NO: 15231303 NR Description: putative protein
  misc_feature (1)..(216): Homolog of NCBI NO: 15233841 NR Description: putative pollen allergen
MATGFFAGHIAAALPSIYKDGSGCGACFQVRCKNPTLCSSKGTTVIVTDLNKTNQTDLVLSSRAFRAMAKPVVGADRDLLKQGIVDIEYRRVPCDYGNKKMNVRVEESSKNPNYLAIKLLYQGGQTEVVAIYIAQVGSSHWSYMTRSHGAVWVTDKVPNGALQFRFVVTAGYDGKMVWSQRVLPANWEAGKSYDAGVQITDIAQEGCDPCDDHIWN

SEQ ID NO: 24746 - protein, 149 aa, Arabidopsis thaliana
  peptide (1)..(149): Ceres Seq. ID no. 12421565
  misc_feature (34)..(117): Pfam Name: Pollen allergen Pfam Description: Pollen allergen
  misc_feature (1)..(148): Homolog of NCBI NO: 34901594 NR Description: P0571D04.11 [Oryza sativa (japonica
  misc_feature (1)..(148): Homolog of NCBI NO: 20502989 NR Description: Putative pollen allergen [Oryza sativa (japonica
  misc_feature (1)..(148): Homolog of NCBI NO: 37536544 NR Description: putative pollen allergen [Oryza sativa (japonica
  misc_feature (1)..(148): Homolog of NCBI NO: 21654743 NR Description: expansin-like protein 1 [Oryza sativa]
  misc_feature (1)..(148): Homolog of NCBI NO: 33111959 NR Description: expansin-like protein [Quercus robur]
  misc_feature (1)..(149): Homolog of NCBI NO: 30692657 NR Description: expansin protein family (EXPL3) [Arabidopsis
  misc_feature (1)..(149): Homolog of NCBI NO: 20138389 NR Description: Expansin-like 3 precursor (At-EXPL3)
  misc_feature (1)..(149): Homolog of NCBI NO: 21555265 NR Description: Expansin-like 1 precursor (At-EXPL1)
  misc_feature (1)..(149): Homolog of NCBI NO: 15231303 NR Description: putative protein
  misc_feature (1)..(149): Homolog of NCBI NO: 15233841 NR Description: putative pollen allergen
MAKPVVGADRDLLKQGIVDIEYRRVPCDYGNKKMNVRVEESSKNPNYLAIKLLYQGGQTEVVAIYIAQVGSSHWSYMTRSHGAVWVTDKVPNGALQFRFVVTAGYDGKMVWSQRVLPANWEAGKSYDAGVQITDIAQEGCDPCDDHIWN

SEQ ID NO: 24747 - DNA, 1149 bp, Arabidopsis thaliana
  misc_feature (1)..(1149): Ceres Seq. ID no. 12324726
  misc_feature: MA Experiment ID: 108595 Result: Up-regulated in Transcription
  misc_feature: MA Experiment 108595 PARAMETER Experiment Name: At_Ler-pi_Ovule_cDNA_P Parameter: Plant Line Value: null
  misc_feature: MA Experiment ID: 20000112 Result: Up-regulated in Transcription
  misc_feature: MA Experiment 20000112 PARAMETER Experiment Name: At_42deg_Heat_cDNA_P Parameter: Temperature (deg C) Value: 42 vs. 22
  misc_feature: MA Experiment 20000112 PARAMETER Experiment Name: At_42deg_Heat_cDNA_P Parameter: Timepoint (hr) Value: 2
  misc_feature: MA Experiment 20000112 PARAMETER Experiment Name: At_42deg_Heat_cDNA_P Parameter: Tissue Value: Aerial
actactaacagatccacaaatttcataaggttcagagcaaatcggagagagagagatggtgacgaaaacggaggagatacagttaaaccaactcgagaatcaagttgagaatggaggaggaggtgtttgggagtatctgtgcctcgttcgtaagctcaaggttcgccgatcagagattgtgctcaagcatggtctctcgatcttgaacgattcgggaaagcgatccgctcttggtccagatgaatggaccctgtatgagcaggtagcaattgcagctatggactgtcaatctctcggtgttgcacagaattgcatcaaggttctaaagaagaaatttccggagagcaaacgtgttggcaagctggaggctctgctgctagaagcaaagggaatgtgggaagaggctgaaaaagcatatacaagccttttggaggataatccacttgatcaagtaattcacaaaagaaaggtggctatggccaaggcacaaggcaaatcttccttagccattgaacatctgaacaagtatcttgaagtattcatggctgatcatgatgcctggagagaacttgcagaaatttatgtttccttgcaaatgtacaagcaagcagctttctgctacgaggagctcatactaactcagcctactcttccattgtaccacttagcatatgccgatgttctctacacaataggtggactagaaaacctcatcgcagcaagaaagtactatgcagcaactatagacttgacaggtggtaaaagcacaagagcacttctcggaatatgcttgtgtggatcagcaatcgcacagatctcaaaaggcaggaacaaagaggacaaggacatggctgcaccagagcttcagtctttggctgcaactgcattggagcgagagtacaagcaaaaagctcccgctaagctcaacctcctcacttctgccttgagaaacttgaaaatcgcttagttcaaagcactagagcccaaacaattttttggtattttggtattgtttaaacttttttacagtcagacttttgttcattccttttcttttacccttataatttttttcttattcacttggctatattgttgaatcactgatacggtttactaaggtgtgtttaatcaaataataaattaaac

SEQ ID NO: 24748 - protein, 303 aa, Arabidopsis thaliana
  peptide (1)..(303): Ceres Seq. ID no. 12324727
  misc_feature (1)..(301): Homolog of NCBI NO: 30690960 NR Description: expressed protein [Arabidopsis thaliana]
  misc_feature (1)..(303): Homolog of NCBI NO: 22330847 NR Description: auxin-regulated protein
  misc_feature (1)..(303): Homolog of NCBI NO: 30679284 NR Description: expressed protein [Arabidopsis thaliana]
  misc_feature (32)..(302): Homolog of NCBI NO: 34866113 NR Description: similar to RIKEN cDNA 4921531G14 [Rattus
  misc_feature (32)..(283): Homolog of NCBI NO: 7661910 NR Description: KIAA0103 gene product [Homo sapiens]
  misc_feature (32)..(283): Homolog of NCBI NO: 14193698 NR Description: KIAA0103 protein [Mus musculus]
  misc_feature (32)..(283): Homolog of NCBI NO: 13385196 NR Description: RIKEN cDNA 4921531G14 [Mus musculus]
  misc_feature (32)..(283): Homolog of NCBI NO: 27370885 NR Description: Similar to KIAA0103 gene product [Xenopus laevis]
  misc_feature (88)..(302): Homolog of NCBI NO: 10799830 NR Description: O-linked GlcNAc transferase like [Nicotiana
  misc_feature (1)..(301): Homolog of NCBI NO: 5732436 NR Description: contains similarity to O-linked GlcNAc
MVTKTEEIQLNQLENQVENGGGGVWEYLCLVRKLKVRRSEIVLKHGLSILNDSGKRSALGPDEWTLYEQVAIAAMDCQSLGVAQNCIKVLKKKFPESKRVGKLEALLLEAKGMWEEAEKAYTSLLEDNPLDQVIHKRKVAMAKAQGKSSLAIEHLNKYLEVFMADHDAWRELAEIYVSLQMYKQAAFCYEELILTQPTLPLYHLAYADVLYTIGGLENLIAARKYYAATIDLTGGKSTRALLGICLCGSAIAQISKGRNKEDKDMAAPELQSLAATALEREYKQKAPAKLNLLTSALRNLKIA

SEQ ID NO: 24749 - protein, 229 aa, Arabidopsis thaliana
  peptide (1)..(229): Ceres Seq. ID no. 12324728
  misc_feature (1)..(228): Homolog of NCBI NO: 34866113 NR Description: similar to RIKEN cDNA 4921531G14 [Rattus
  misc_feature (1)..(209): Homolog of NCBI NO: 7661910 NR Description: KIAA0103 gene product [Homo sapiens]
  misc_feature (1)..(209): Homolog of NCBI NO: 14193698 NR Description: KIAA0103 protein [Mus musculus]
  misc_feature (1)..(209): Homolog of NCBI NO: 13385196 NR Description: RIKEN cDNA 4921531G14 [Mus musculus]
  misc_feature (1)..(209): Homolog of NCBI NO: 27370885 NR Description: Similar to KIAA0103 gene product [Xenopus laevis]
  misc_feature (14)..(228): Homolog of NCBI NO: 10799830 NR Description: O-linked GlcNAc transferase like [Nicotiana
  misc_feature (1)..(227): Homolog of NCBI NO: 5732436 NR Description: contains similarity to O-linked GlcNAc
  misc_feature (1)..(227): Homolog of NCBI NO: 30690960 NR Description: expressed protein [Arabidopsis thaliana]
  misc_feature (1)..(229): Homolog of NCBI NO: 22330847 NR Description: auxin-regulated protein
  misc_feature (1)..(229): Homolog of NCBI NO: 30679284 NR Description: expressed protein [Arabidopsis thaliana]
MDCQSLGVAQNCIKVLKKKFPESKRVGKLEALLLEAKGMWEEAEKAYTSLLEDNPLDQVIHKRKVAMAKAQGKSSLAIEHLNKYLEVFMADHDAWRELAEIYVSLQMYKQAAFCYEELILTQPTLPLYHLAYADVLYTIGGLENLIAARKYYAATIDLTGGKSTRALLGICLCGSAIAQISKGRNKEDKDMAAPELQSLAATALEREYKQKAPAKLNLLTSALRNLKIA

SEQ ID NO: 24750 - protein, 191 aa, Arabidopsis thaliana
  peptide (1)..(191): Ceres Seq. ID no. 12324729
  misc_feature (1)..(190): Homolog of NCBI NO: 34866113 NR Description: similar to RIKEN cDNA 4921531G14 [Rattus
  misc_feature (1)..(171): Homolog of NCBI NO: 7661910 NR Description: KIAA0103 gene product [Homo sapiens]
  misc_feature (1)..(171): Homolog of NCBI NO: 14193698 NR Description: KIAA0103 protein [Mus musculus]
  misc_feature (1)..(171): Homolog of NCBI NO: 13385196 NR Description: RIKEN cDNA 4921531G14 [Mus musculus]
  misc_feature (1)..(171): Homolog of NCBI NO: 27370885 NR Description: Similar to KIAA0103 gene product [Xenopus laevis]
  misc_feature (1)..(190): Homolog of NCBI NO: 10799830 NR Description: O-linked GlcNAc transferase like [Nicotiana
  misc_feature (1)..(189): Homolog of NCBI NO: 5732436 NR Description: contains similarity to O-linked GlcNAc
  misc_feature (1)..(189): Homolog of NCBI NO: 30690960 NR Description: expressed protein [Arabidopsis thaliana]
  misc_feature (1)..(191): Homolog of NCBI NO: 22330847 NR Description: auxin-regulated protein
  misc_feature (1)..(191): Homolog of NCBI NO: 30679284 NR Description: expressed protein [Arabidopsis thaliana]
MWEEAEKAYTSLLEDNPLDQVIHKRKVAMAKAQGKSSLAIEHLNKYLEVFMADHDAWRELAEIYVSLQMYKQAAFCYEELILTQPTLPLYHLAYADVLYTIGGLENLIAARKYYAATIDLTGGKSTRALLGICLCGSAIAQISKGRNKEDKDMAAPELQSLAATALEREYKQKAPAKLNLLTSALRNLKIA

SEQ ID NO: 24751 - DNA, 1172 bp, Arabidopsis thaliana
  misc_feature (1)..(1172): Ceres Seq. ID no. 12717216
  misc_feature: MA Experiment ID: 20000184 Result: Up-regulated in Transcription
  misc_feature: MA Experiment 20000184 PARAMETER Experiment Name: At_Shoots__P Parameter: Age (day) Value: 7
  misc_feature: MA Experiment 20000184 PARAMETER Experiment Name: At_Shoots__P Parameter: Tissue Value: Shoots vs. Whole Plant
  misc_feature: MA Experiment ID: 20000495 Result: Down-regulated in Transcription
  misc_feature: MA Experiment 20000495 PARAMETER Experiment Name: At_Guard_Cells_P Parameter: Harvest Date Value: 8/2/2002
  misc_feature: MA Experiment 20000495 PARAMETER Experiment Name: At_Guard_Cells_P Parameter: Organism Value: A. thaliana
  misc_feature: MA Experiment 20000495 PARAMETER Experiment Name: At_Guard_Cells_P Parameter: Tissue Value: Guard Cells vs. Leaves
aaacaatgccacttctcctccgtcgatttccctctccctccgtcgtctcctccttcttcctccgtcgctcaatggcttcctcaacaatctcctcggatataatcactccatcaaacaccaaaatcggatggatcggaaccggagtcatgggccgatcaatgtgtggacacttaatcaaagccggttacacagtcaccgtcttcaatcgaaccatctccaaagctcaaactctcatcgacatgggtgctaacgtcgccgactcaccaaactcagtcgctgaacaatccgacgtcgttttcaccatcgttggttatccttccgatgtccgtcacgtccttctcgatccaaagtccggagctttatctggtctccgtcaaggaggtgttctcgttgatatgactacttctgagccttctttagcagaggagatagctaaagctgcttcctttaagaattgtttctcaatagacgctcctgtctcaggtggagatttaggagctaagaatgggaagctatctatattcgccggaggtgatgaaaccaccgtgaaacgtttagatccgttgttttcgttaatgggtaaagtcaacttcatgggaacaagtgggaaaggtcaatttgcgaaattggctaatcagataactattgcttcgactatgttaggacttgtggaaggtttgatttatgctcataaagctggacttgatgttaagaagtttcttgaagcgatttctactggtgctgctggttctaagtctatagatttgtatggagataggattctgaagagggattttgatcctggtttttatgtgaatcattttgtgaaagatttagggatttgtttgaatgaatgtcagaggatgggtttggctttgcctggtttagctcttgctcaacagctttacttgtctcttaaggctcatggtgaaggtgatcttggtactcaagctcttctcttggctcttgaacgtctcaacaatgtctctgttcaatcatctgactcttgatttaggttctgttccactttctgataatgcatctgttggagattttatgttgttatgaagtaaagatttgatcttttgtgtacccatttgttggtaaaacatgatttgaagtaaacttttgtgtacgcatatgagattcatacacagtagttttatgtgtac

SEQ ID NO: 24752 - protein, 335 aa, Arabidopsis thaliana; identical to SEQ ID NO: 24401
  peptide (1)..(335): Ceres Seq. ID no. 12717217
  misc_feature (38)..(200): Pfam Name: NAD binding domain of 6-phosphogluconate dehydrogenase Pfam Description: NAD binding domain of 6-phosphogluconate
  misc_feature (40)..(319): Homolog of NCBI NO: 28379084 NR Description: 3-hydroxyisobutyrate dehydrogenase
  misc_feature (40)..(319): Homolog of NCBI NO: 16803045 NR Description: similar to 3-hydroxyisobutyrate dehydrogenase (B.
  misc_feature (34)..(318): Homolog of NCBI NO: 23113025 NR Description: hypothetical protein [Desulfitobacterium
  misc_feature (33)..(322): Homolog of NCBI NO: 23098036 NR Description: 3-hydroxyisobutyrate dehydrogenase
  misc_feature (38)..(318): Homolog of NCBI NO: 15896585 NR Description: Dehydrogenase related to 3-hydroxyisobutyrate
  misc_feature (33)..(329): Homolog of NCBI NO: 30698779 NR Description: dehydrogenase -related [Arabidopsis thaliana]
  misc_feature (33)..(329): Homolog of NCBI NO: 25283629 NR Description: probable dehydrogenase F23N20.17
  misc_feature (33)..(329): Homolog of NCBI NO: 18409781 NR Description: putative dehydrogenase
  misc_feature (23)..(327): Homolog of NCBI NO: 34909392 NR Description: putative dehydrogenase [Oryza sativa (japonica
  misc_feature (2)..(335): Homolog of NCBI NO: 15233455 NR Description: putative protein

SEQ ID NO: 24753 - protein, 334 aa, Arabidopsis thaliana; identical to SEQ ID NO: 24402
  peptide (1)..(334): Ceres Seq. ID no. 12717218
  misc_feature (37)..(199): Pfam Name: NAD binding domain of 6-phosphogluconate dehydrogenase Pfam Description: NAD binding domain of 6-phosphogluconate
  misc_feature (39)..(318): Homolog of NCBI NO: 28379084 NR Description: 3-hydroxyisobutyrate dehydrogenase
  misc_feature (39)..(318): Homolog of NCBI NO: 16803045 NR Description: similar to 3-hydroxyisobutyrate dehydrogenase (B.
  misc_feature (33)..(317): Homolog of NCBI NO: 23113025 NR Description: hypothetical protein [Desulfitobacterium
  misc_feature (32)..(321): Homolog of NCBI NO: 23098036 NR Description: 3-hydroxyisobutyrate dehydrogenase
  misc_feature (37)..(317): Homolog of NCBI NO: 15896585 NR Description: Dehydrogenase related to 3-hydroxyisobutyrate
  misc_feature (32)..(328): Homolog of NCBI NO: 30698779 NR Description: dehydrogenase -related [Arabidopsis thaliana]
  misc_feature (32)..(328): Homolog of NCBI NO: 25283629 NR Description: probable dehydrogenase F23N20.17
  misc_feature (32)..(328): Homolog of NCBI NO: 18409781 NR Description: putative dehydrogenase
  misc_feature (22)..(326): Homolog of NCBI NO: 34909392 NR Description: putative dehydrogenase [Oryza sativa (japonica
  misc_feature (1)..(334): Homolog of NCBI NO: 15233455 NR Description: putative protein

SEQ ID NO: 24754 - protein, 312 aa, Arabidopsis thaliana; identical to SEQ ID NO: 24403
  peptide (1)..(312): Ceres Seq. ID no. 12717219
  misc_feature (15)..(177): Pfam Name: NAD binding domain of 6-phosphogluconate dehydrogenase Pfam Description: NAD binding domain of 6-phosphogluconate
  misc_feature (17)..(296): Homolog of NCBI NO: 28379084 NR Description: 3-hydroxyisobutyrate dehydrogenase
  misc_feature (17)..(296): Homolog of NCBI NO: 16803045 NR Description: similar to 3-hydroxyisobutyrate dehydrogenase (B.
  misc_feature (11)..(295): Homolog of NCBI NO: 23113025 NR Description: hypothetical protein [Desulfitobacterium
  misc_feature (10)..(299): Homolog of NCBI NO: 23098036 NR Description: 3-hydroxyisobutyrate dehydrogenase
  misc_feature (15)..(295): Homolog of NCBI NO: 15896585 NR Description: Dehydrogenase related to 3-hydroxyisobutyrate
  misc_feature (10)..(306): Homolog of NCBI NO: 30698779 NR Description: dehydrogenase -related [Arabidopsis thaliana]
  misc_feature (10)..(306): Homolog of NCBI NO: 25283629 NR Description: probable dehydrogenase F23N20.17
  misc_feature (10)..(306): Homolog of NCBI NO: 18409781 NR Description: putative dehydrogenase
  misc_feature (1)..(304): Homolog of NCBI NO: 34909392 NR Description: putative dehydrogenase [Oryza sativa (japonica
  misc_feature (1)..(312): Homolog of NCBI NO: 15233455 NR Description: putative protein

SEQ ID NO: 24755 - DNA, 1595 bp, Arabidopsis thaliana
  misc_feature (1)..(1595): Ceres Seq. ID no. 12678189
  misc_feature: MA Experiment ID: 108434 Result: Up-regulated in Transcription
  misc_feature: MA Experiment 108434 PARAMETER Experiment Name: At_Root_Tips_cDNA_P Parameter: Tissue Value: Root Tips
  misc_feature: MA Experiment ID: 108461 Result: Down-regulated in Transcription
  misc_feature: MA Experiment 108461 PARAMETER Experiment Name: At_Germinating_Seeds_cDNA_P Parameter: Age (day) Value: 1 vs. 0
  misc_feature: MA Experiment 108461 PARAMETER Experiment Name: At_Germinating_Seeds_cDNA_P Parameter: Tissue Value: Germinating Seeds
  misc_feature: MA Experiment ID: 108462 Result: Down-regulated in Transcription
  misc_feature: MA Experiment 108462 PARAMETER Experiment Name: At_Germinating_Seeds_cDNA_P Parameter: Age (day) Value: 2 vs. 0
  misc_feature: MA Experiment 108462 PARAMETER Experiment Name: At_Germinating_Seeds_cDNA_P Parameter: Tissue Value: Germinating Seeds
  misc_feature: MA Experiment ID: 108463 Result: Down-regulated in Transcription
  misc_feature: MA Experiment 108463 PARAMETER Experiment Name: At_Germinating_Seeds_cDNA_P Parameter: Age (day) Value: 3 vs. 0
  misc_feature: MA Experiment 108463 PARAMETER Experiment Name: At_Germinating_Seeds_cDNA_P Parameter: Tissue Value: Germinating Seeds
  misc_feature: MA Experiment ID: 108464 Result: Down-regulated in Transcription
  misc_feature: MA Experiment 108464 PARAMETER Experiment Name: At_Germinating_Seeds_cDNA_P Parameter: Age (day) Value: 4 vs. 0
  misc_feature: MA Experiment 108464 PARAMETER Experiment Name: At_Germinating_Seeds_cDNA_P Parameter: Tissue Value: Germinating Seeds
  misc_feature: MA Experiment ID: 108573 Result: Up-regulated in Transcription
  misc_feature: MA Experiment 108573 PARAMETER Experiment Name: At_Drought_cDNA_P Parameter: Timepoint (hr) Value: 6
  misc_feature: MA Experiment 108573 PARAMETER Experiment Name: At_Drought_cDNA_P Parameter: Tissue Value: Aerial
  misc_feature: MA Experiment 108573 PARAMETER Experiment Name: At_Drought_cDNA_P Parameter: Treatment Value: Drought vs. No Drought
  misc_feature: MA Experiment ID: 108585 Result: Up-regulated in Transcription
  misc_feature: MA Experiment 108585 PARAMETER Experiment Name: At_5mM_NaNP_cDNA_P Parameter: Timepoint (hr) Value: 6
  misc_feature: MA Experiment 108585 PARAMETER Experiment Name: At_5mM_NaNP_cDNA_P Parameter: Tissue Value: Aerial
  misc_feature: MA Experiment 108585 PARAMETER Experiment Name: At_5mM_NaNP_cDNA_P Parameter: Treatment Value: null
  misc_feature: MA Experiment ID: 20000179 Result: Down-regulated in Transcription
  misc_feature: MA Experiment 20000179 PARAMETER Experiment Name: At_Germinating_Seeds_P Parameter: Age (hr) Value: 6 vs. 0
  misc_feature: MA Experiment 20000179 PARAMETER Experiment Name: At_Germinating_Seeds_P Parameter: Tissue Value: Germinating Seeds
  misc_feature: MA Experiment ID: 20000224 Result: Down-regulated in Transcription
  misc_feature: MA Experiment ID: 20001557 Result: Up-regulated in Transcription
  misc_feature: MA Experiment 20001557 PARAMETER Experiment Name: At_Drought_Soil_Dry_P Parameter: Age (day) Value: 27
  misc_feature: MA Experiment 20001557 PARAMETER Experiment Name: At_Drought_Soil_Dry_P Parameter: Organism Value: A. thaliana
  misc_feature: MA Experiment 20001557 PARAMETER Experiment Name: At_Drought_Soil_Dry_P Parameter: Plant Line Value: WS
  misc_feature: MA Experiment 20001557 PARAMETER Experiment Name: At_Drought_Soil_Dry_P Parameter: Post Timepoint (hr) Value: 3
  misc_feature: MA Experiment 20001557 PARAMETER Experiment Name: At_Drought_Soil_Dry_P Parameter: Post-Treatment Value: Re-Water vs. No Drought
  misc_feature: MA Experiment 20001557 PARAMETER Experiment Name: At_Drought_Soil_Dry_P Parameter: Timepoint (day) Value: 13
  misc_feature: MA Experiment 20001557 PARAMETER Experiment Name: At_Drought_Soil_Dry_P Parameter: Treatment Value: Drought vs. No Drought
acacaaaaaaaaaaaaccatcggacctgaaatctttgtaagctcttcctccttgctcaagcaaacctctttttatatatttgctctctctctctcagatccgattcaagctttccgatttgcgatggacggtggagcggaaggatctcagcagcctcaccttattctagccaacaagctcttcctcctcactcatccagatgttccagacatcgagaaagtccagctcaagtctgaggttttggatttcatcagatcccatggtatggctcctttgtacgaaaccctaattgcctcttcggtgctggatttggatcaaagcttgttagagtctatgcgggccgctaatgaagaggagcttaagaagctcgacgagaagattgcagatgcagaagaaaatttgggtgaaagtgaagttcgtgaagctcatcttgctaaggctctgtatttcatcaggattagtgataaggagaaagctttggagcagctaaaactcactgaagggaaaactgttgctgttggacaaaaaatggacgtggtgttttatacgttacaacttgcttttttctatatggactttgatctggtatcaaagagcattgacaaagcaaaaaaattgtttgaagagggtggtgactgggagaggaagaaccggctaaaggtctatgaaggtttgtactgcatgtccaccagaaattttaagaaggctgccagcttattcctggattctatatcaaccttcacaacatatgaaatttttccatatgagaccttcatattctacaccgtcctgacaagcatcataactttggacagagtttcccttaagcaaaaggtcgttgatgcacctgagatcttaaccgtgcttgggaagattccattcctttctgagtttctgaactccttgtatgagtgccagtacaaggcgtttttctcagcatttgctggaatggcggtgcagataaagtatgaccgttacttgtacccgcatttccggttctacatgagggaagtcagaacagtggtgtactctcagtttttggaatcttacaaaagtgtgacagttgaagcaatggcaaaggcctttggcgtttctgtcgatttcatagaccaggagttgtcgcgcttcattgctgctgggaagcttcactgtaagatagacaaggttgcaggtgttttggagacaaaccgtcctgatgcaaagaatgcactttaccaggcaacaatcaagcaaggggatttcttgctaaaccgaatccagaagctgtctcgtgtgatcgatctgtgagcatgctacatgtttctgtttcactctttcgtcaagctttgcaacttggaaactccgaacggtagaatcttaaggtctgagaaacgatatgaactttggattttgagatgaatggctgtagtttctttcatcaactctagttggtttgtcagtggtgaatttcccaagaacaaagagcaagtttaatctccaatgttcattttattcttcctcgcatatggcttttgaatctgttgttttcatcgcatctatctagtatctaagagaaaacgaccaccatacctcttacaaaataaagcttttgtttc

SEQ ID NO: 24756 - protein, 428 aa, Arabidopsis thaliana
  peptide (1)..(428): Ceres Seq. ID no. 12678190
  misc_feature (293)..(397): Pfam Name: PCI domain Pfam Description: PCI domain
  misc_feature (47)..(428): Homolog of NCBI NO: 39795842 NR Description: Unknown (protein for MGC:76241) [Silurana
  misc_feature (47)..(428): Homolog of NCBI NO: 7661914 NR Description: KIAA0107 gene product [Homo sapiens]
  misc_feature (47)..(428): Homolog of NCBI NO: 38454206 NR Description: Unknown (protein for MGC:72968) [Rattus
  misc_feature (47)..(428): Homolog of NCBI NO: 20978552 NR Description: 26S proteasome non-ATPase regulatory subunit 6
  misc_feature (47)..(428): Homolog of NCBI NO: 21313464 NR Description: RIKEN cDNA 2400006A19 [Mus musculus]
  misc_feature (47)..(428): Homolog of NCBI NO: 29436940 NR Description: Unknown (protein for MGC:56471) [Danio rerio]
  misc_feature (42)..(428): Homolog of NCBI NO: 20978545 NR Description: 26S proteasome non-ATPase regulatory subunit 6
  misc_feature (314)..(428): Homolog of NCBI NO: 7484780 NR Description: 26S proteasome regulatory particle chain RPN7
  misc_feature (42)..(314): Homolog of NCBI NO: 7484780 NR Description: 26S proteasome regulatory particle chain RPN7
  misc_feature (42)..(428): Homolog of NCBI NO: 18416433 NR Description: 26S proteasome regulatory subunit (RPN7), putative
TQKKKTIGPEIFVSSSSLLKQTSFYIFALSLSDPIQAFRFAMDGGAEGSQQPHLILANKLFLLTHPDVPDIEKVQLKSEVLDFIRSHGMAPLYETLIASSVLDLDQSLLESMRAANEEELKKLDEKIADAEENLGESEVREAHLAKALYFIRISDKEKALEQLKLTEGKTVAVGQKMDVVFYTLQLAFFYMDFDLVSKSIDKAKKLFEEGGDWERKNRLKVYEGLYCMSTRNFKKAASLFLDSISTFTTYEIFPYETFIFYTVLTSIITLDRVSLKQKVVDAPEILTVLGKIPFLSEFLNSLYECQYKAFFSAFAGMAVQIKYDRYLYPHFRFYMREVRTVVYSQFLESYKSVTVEAMAKAFGVSVDFIDQELSRFIAAGKLHCKIDKVAGVLETNRPDAKNALYQATIKQGDFLLNRIQKLSRVIDL

SEQ ID NO: 24757 - protein, 387 aa, Arabidopsis thaliana
  peptide (1)..(387): Ceres Seq. ID no. 12678191
  misc_feature (252)..(356): Pfam Name: PCI domain Pfam Description: PCI domain
  misc_feature (273)..(387): Homolog of NCBI NO: 7484780 NR Description: 26S proteasome regulatory particle chain RPN7
  misc_feature (1)..(273): Homolog of NCBI NO: 7484780 NR Description: 26S proteasome regulatory particle chain RPN7
  misc_feature (6)..(387): Homolog of NCBI NO: 7661914 NR Description: KIAA0107 gene product [Homo sapiens]
  misc_feature (6)..(387): Homolog of NCBI NO: 20978552 NR Description: 26S proteasome non-ATPase regulatory subunit 6
  misc_feature (6)..(387): Homolog of NCBI NO: 29436940 NR Description: Unknown (protein for MGC:56471) [Danio rerio]
  misc_feature (1)..(387): Homolog of NCBI NO: 20978545 NR Description: 26S proteasome non-ATPase regulatory subunit 6
  misc_feature (6)..(387): Homolog of NCBI NO: 21313464 NR Description: RIKEN cDNA 2400006A19 [Mus musculus]
  misc_feature (6)..(387): Homolog of NCBI NO: 38454206 NR Description: Unknown (protein for MGC:72968) [Rattus
  misc_feature (6)..(387): Homolog of NCBI NO: 39795842 NR Description: Unknown (protein for MGC:76241) [Silurana
  misc_feature (1)..(387): Homolog of NCBI NO: 18416433 NR Description: 26S proteasome regulatory subunit (RPN7), putative
MDGGAEGSQQPHLILANKLFLLTHPDVPDIEKVQLKSEVLDFIRSHGMAPLYETLIASSVLDLDQSLLESMRAANEEELKKLDEKIADAEENLGESEVREAHLAKALYFIRISDKEKALEQLKLTEGKTVAVGQKMDVVFYTLQLAFFYMDFDLVSKSIDKAKKLFEEGGDWERKNRLKVYEGLYCMSTRNFKKAASLFLDSISTFTTYEIFPYETFIFYTVLTSIITLDRVSLKQKVVDAPEILTVLGKIPFLSEFLNSLYECQYKAFFSAFAGMAVQIKYDRYLYPHFRFYMREVRTVVYSQFLESYKSVTVEAMAKAFGVSVDFIDQELSRFIAAGKLHCKIDKVAGVLETNRPDAKNALYQATIKQGDFLLNRIQKLSRVIDL

SEQ ID NO: 24758 - protein, 340 aa, Arabidopsis thaliana
  peptide (1)..(340): Ceres Seq. ID no. 12678192
  misc_feature (205)..(309): Pfam Name: PCI domain Pfam Description: PCI domain
  misc_feature (1)..(340): Homolog of NCBI NO: 39795842 NR Description: Unknown (protein for MGC:76241) [Silurana
  misc_feature (1)..(340): Homolog of NCBI NO: 7661914 NR Description: KIAA0107 gene product [Homo sapiens]
  misc_feature (1)..(340): Homolog of NCBI NO: 38454206 NR Description: Unknown (protein for MGC:72968) [Rattus
  misc_feature (1)..(340): Homolog of NCBI NO: 20978552 NR Description: 26S proteasome non-ATPase regulatory subunit 6
  misc_feature (1)..(340): Homolog of NCBI NO: 21313464 NR Description: RIKEN cDNA 2400006A19 [Mus musculus]
  misc_feature (1)..(340): Homolog of NCBI NO: 29436940 NR Description: Unknown (protein for MGC:56471) [Danio rerio]
  misc_feature (1)..(340): Homolog of NCBI NO: 20978545 NR Description: 26S proteasome non-ATPase regulatory subunit 6
  misc_feature (226)..(340): Homolog of NCBI NO: 7484780 NR Description: 26S proteasome regulatory particle chain RPN7
  misc_feature (1)..(226): Homolog of NCBI NO: 7484780 NR Description: 26S proteasome regulatory particle chain RPN7
  misc_feature (1)..(340): Homolog of NCBI NO: 18416433 NR Description: 26S proteasome regulatory subunit (RPN7), putative
MAPLYETLIASSVLDLDQSLLESMRAANEEELKKLDEKIADAEENLGESEVREAHLAKALYFIRISDKEKALEQLKLTEGKTVAVGQKMDVVFYTLQLAFFYMDFDLVSKSIDKAKKLFEEGGDWERKNRLKVYEGLYCMSTRNFKKAASLFLDSISTFTTYEIFPYETFIFYTVLTSIITLDRVSLKQKVVDAPEILTVLGKIPFLSEFLNSLYECQYKAFFSAFAGMAVQIKYDRYLYPHFRFYMREVRTVVYSQFLESYKSVTVEAMAKAFGVSVDFIDQELSRFIAAGKLHCKIDKVAGVLETNRPDAKNALYQATIKQGDFLLNRIQKLSRVIDL

SEQ ID NO: 24759 - DNA, 1109 bp, Arabidopsis thaliana
  misc_feature (1)..(1109): Ceres Seq. ID no. 12650562
  misc_feature: MA Experiment ID: 108434 Result: Down-regulated in Transcription
  misc_feature: MA Experiment 108434 PARAMETER Experiment Name: At_Root_Tips_cDNA_P Parameter: Tissue Value: Root Tips
  misc_feature: MA Experiment ID: 108435 Result: Down-regulated in Transcription
  misc_feature: MA Experiment 108435 PARAMETER Experiment Name: At_stm_Mutants_cDNA_P Parameter: Plant Line Value: wt Landsburg vs stm
  misc_feature: MA Experiment 108435 PARAMETER Experiment Name: At_stm_Mutants_cDNA_P Parameter: Tissue Value: Shoot Apical Meristem Region
  misc_feature: MA Experiment ID: 108488 Result: Up-regulated in Transcription
  misc_feature: MA Experiment ID: 108595 Result: Down-regulated in Transcription
  misc_feature: MA Experiment 108595 PARAMETER Experiment Name: At_Ler-pi_Ovule_cDNA_P Parameter: Plant Line Value: null
  misc_feature: MA Experiment ID: 20000069 Result: Down-regulated in Transcription
  misc_feature: MA Experiment 20000069 PARAMETER Experiment Name: At_100uM_ABA_Mutants_cDNA_P Parameter: Plant Line Value: CS23
  misc_feature: MA Experiment 20000069 PARAMETER Experiment Name: At_100uM_ABA_Mutants_cDNA_P Parameter: Timepoint (hr) Value: 6
  misc_feature: MA Experiment 20000069 PARAMETER Experiment Name: At_100uM_ABA_Mutants_cDNA_P Parameter: Tissue Value: Aerial
  misc_feature: MA Experiment 20000069 PARAMETER Experiment Name: At_100uM_ABA_Mutants_cDNA_P Parameter: Treatment Value: 100uM ABA vs. No Treatment
  misc_feature: MA Experiment ID: 20000070 Result: Down-regulated in Transcription
  misc_feature: MA Experiment 20000070 PARAMETER Experiment Name: At_100uM_ABA_Mutants_cDNA_P Parameter: Plant Line Value: CS24
  misc_feature: MA Experiment 20000070 PARAMETER Experiment Name: At_100uM_ABA_Mutants_cDNA_P Parameter: Timepoint (hr) Value: 6
  misc_feature: MA Experiment 20000070 PARAMETER Experiment Name: At_100uM_ABA_Mutants_cDNA_P Parameter: Tissue Value: Aerial
  misc_feature: MA Experiment 20000070 PARAMETER Experiment Name: At_100uM_ABA_Mutants_cDNA_P Parameter: Treatment Value: 100uM ABA vs. No Treatment
  misc_feature: MA Experiment ID: 20000071 Result: Down-regulated in Transcription
  misc_feature: MA Experiment 20000071 PARAMETER Experiment Name: At_100uM_ABA_Mutants_cDNA_P Parameter: Plant Line Value: CS8104
  misc_feature: MA Experiment 20000071 PARAMETER Experiment Name: At_100uM_ABA_Mutants_cDNA_P Parameter: Timepoint (hr) Value: 6
  misc_feature: MA Experiment 20000071 PARAMETER Experiment Name: At_100uM_ABA_Mutants_cDNA_P Parameter: Tissue Value: Aerial
  misc_feature: MA Experiment 20000071 PARAMETER Experiment Name: At_100uM_ABA_Mutants_cDNA_P Parameter: Treatment Value: 100uM ABA vs. No Treatment
  misc_feature: MA Experiment ID: 20000072 Result: Down-regulated in Transcription
  misc_feature: MA Experiment 20000072 PARAMETER Experiment Name: At_100uM_ABA_Mutants_cDNA_P Parameter: Plant Line Value: CS8105
  misc_feature: MA Experiment 20000072 PARAMETER Experiment Name: At_100uM_ABA_Mutants_cDNA_P Parameter: Timepoint (hr) Value: 6
  misc_feature: MA Experiment 20000072 PARAMETER Experiment Name: At_100uM_ABA_Mutants_cDNA_P Parameter: Tissue Value: Aerial
  misc_feature: MA Experiment 20000072 PARAMETER Experiment Name: At_100uM_ABA_Mutants_cDNA_P Parameter: Treatment Value: 100uM ABA vs. No Treatment
  misc_feature: MA Experiment ID: 20000086 Result: Down-regulated in Transcription
  misc_feature: MA Experiment 20000086 PARAMETER Experiment Name: At_100uM_ABA_Mutants_cDNA_P Parameter: Plant Line Value: CS22
  misc_feature: MA Experiment 20000086 PARAMETER Experiment Name: At_100uM_ABA_Mutants_cDNA_P Parameter: Timepoint (hr) Value: 6
  misc_feature: MA Experiment 20000086 PARAMETER Experiment Name: At_100uM_ABA_Mutants_cDNA_P Parameter: Tissue Value: Aerial
  misc_feature: MA Experiment 20000086 PARAMETER Experiment Name: At_100uM_ABA_Mutants_cDNA_P Parameter: Treatment Value: 100uM ABA vs. No Treatment
  misc_feature: MA Experiment ID: 20000087 Result: Down-regulated in Transcription
  misc_feature: MA Experiment 20000087 PARAMETER Experiment Name: At_100uM_ABA_Mutants_cDNA_P Parameter: Plant Line Value: WS
  misc_feature: MA Experiment 20000087 PARAMETER Experiment Name: At_100uM_ABA_Mutants_cDNA_P Parameter: Timepoint (hr) Value: 6
  misc_feature: MA Experiment 20000087 PARAMETER Experiment Name: At_100uM_ABA_Mutants_cDNA_P Parameter: Tissue Value: Aerial
  misc_feature: MA Experiment 20000087 PARAMETER Experiment Name: At_100uM_ABA_Mutants_cDNA_P Parameter: Treatment Value: 100uM ABA vs. No Treatment
  misc_feature: MA Experiment ID: 20000089 Result: Down-regulated in Transcription
  misc_feature: MA Experiment ID: 20000090 Result: Down-regulated in Transcription
  misc_feature: MA Experiment ID: 20000117 Result: Down-regulated in Transcription
  misc_feature: MA Experiment 20000117 PARAMETER Experiment Name: At_100uM_ABA_Mutants_cDNA_P Parameter: Plant Line Value: Columbia
  misc_feature: MA Experiment 20000117 PARAMETER Experiment Name: At_100uM_ABA_Mutants_cDNA_P Parameter: Timepoint (hr) Value: 6
  misc_feature: MA Experiment 20000117 PARAMETER Experiment Name: At_100uM_ABA_Mutants_cDNA_P Parameter: Tissue Value: Aerial
  misc_feature: MA Experiment 20000117 PARAMETER Experiment Name: At_100uM_ABA_Mutants_cDNA_P Parameter: Treatment Value: 100uM ABA vs. No Treatment
  misc_feature: MA Experiment ID: 20001248 Result: Down-regulated in Transcription
  misc_feature: MA Experiment 20001248 PARAMETER Experiment Name: At_Far-red-induction_P Parameter: Age (day) Value: 7
  misc_feature: MA Experiment 20001248 PARAMETER Experiment Name: At_Far-red-induction_P Parameter: Light Value: Far-red vs. White
  misc_feature: MA Experiment 20001248 PARAMETER Experiment Name: At_Far-red-induction_P Parameter: Organism Value: A. thaliana
  misc_feature: MA Experiment 20001248 PARAMETER Experiment Name: At_Far-red-induction_P Parameter: Plant Line Value: Columbia
  misc_feature: MA Experiment 20001248 PARAMETER Experiment Name: At_Far-red-induction_P Parameter: Timepoint (hr) Value: 4
  misc_feature: MA Experiment 20001248 PARAMETER Experiment Name: At_Far-red-induction_P Parameter: Tissue Value: Whole Plant
  misc_feature: MA Experiment ID: 20001906 Result: Down-regulated in Transcription
  misc_feature: MA Experiment 20001906 PARAMETER Experiment Name: At_Drought_Reproduction_P Parameter: Age (day) Value: 35
  misc_feature: MA Experiment 20001906 PARAMETER Experiment Name: At_Drought_Reproduction_P Parameter: Organism Value: A. thaliana
  misc_feature: MA Experiment 20001906 PARAMETER Experiment Name: At_Drought_Reproduction_P Parameter: Plant Line Value: WS
  misc_feature: MA Experiment 20001906 PARAMETER Experiment Name: At_Drought_Reproduction_P Parameter: Timepoint (day) Value: 5
  misc_feature: MA Experiment 20001906 PARAMETER Experiment Name: At_Drought_Reproduction_P Parameter: Tissue Value: Siliques
  misc_feature: MA Experiment 20001906 PARAMETER Experiment Name: At_Drought_Reproduction_P Parameter: Treatment Value: Drought vs. No Drought
gcattaactgatttcacattcttcgataaggattttactctccagagaaagaaaaaaaaaacctcctctgcttttgtgatcctttaaggaaaaagacgaaatggcaacggaatcgtacgaagccgccattaaaggactcaatgatcttctcagtacgaaagcggatctcggaaacgtcgccgccgcgaagatcaaagcgttgacggcggagctaaaggagcttgactcaagcaattcagacgcaattgaacgaatcaagaccggttttactcaattcaaaaccgagaaatatttgaagaatagtactttgttcaatcatcttgccaagactcagaccccaaagtttctggtgtttgcttgctctgattctcgagtttgtccatctcacatcttgaatttccaacctggtgaggcttttgttgtcagaaacatagccaatatggttccaccttttgaccagaagagacactctggagttggcgccgccgttgaatacgcagttgtacatctcaaggtggagaacattttggtgataggccatagctgctgtggtggtattaagggactcatgtccattgaagatgatgctgccccaactcaaagtgacttcattgaaaattgggtgaagataggcgcatcagcgaggaacaagatcaaggaggaacataaagacttgagctacgatgatcaatgcaacaagtgtgagaaggaagctgtgaacgtatcgcttggaaacttgctttcgtacccattcgtgagagctgaggtggtgaagaacacacttgcaataagaggaggtcactacaatttcgtcaaaggaacgtttgatctctgggagctcgatttcaagaccactcctgcttttgccttctcttaagaaagaaagctaccggaacatataaaactcttttgagataaaaaaagacactttgactcatctttcttcattctctcatgttgatgattcctctccaacttctttgatttctttttgttaattcaaaacttcaactttgctgcttctatttcaaaagctcaaacaataaagctgtaaccaacgtttgaaacttctatatttgtctaattgatgtttgaacgaagatttgaac

SEQ ID NO: 24760 - protein, 258 aa, Arabidopsis thaliana; identical to SEQ ID NO: 21610
  peptide (1)..(258): Ceres Seq. ID no. 12650563
  misc_feature (1)..(253): Homolog of NCBI NO: 30685030 NR Description: CARBONIC ANHYDRASE 2 [Arabidopsis thaliana]
  misc_feature (10)..(248): Homolog of NCBI NO: 27652184 NR Description: carbonic anhydrase 2 [Flaveria bidentis]
  misc_feature (1)..(256): Homolog of NCBI NO: 22550386 NR Description: beta-carbonic anhydrase [Nicotiana tabacum]
  misc_feature (1)..(253): Homolog of NCBI NO: 27652186 NR Description: carbonic anhydrase 3 [Flaveria bidentis]
  misc_feature (1)..(256): Homolog of NCBI NO: 7436815 NR Description: carbonate dehydratase (EC 4.2.1.1), chloroplast -
  misc_feature (1)..(256): Homolog of NCBI NO: 115473 NR Description: CARBONIC ANHYDRASE, CHLOROPLAST PRECURSOR
  misc_feature (1)..(256): Homolog of NCBI NO: 3061271 NR Description: NPCA1 [Nicotiana paniculata]
  misc_feature (1)..(258): Homolog of NCBI NO: 15220853 NR Description: putative carbonic anhydrase
  misc_feature (1)..(258): Homolog of NCBI NO: 30698715 NR Description: carbonic anhydrase -related [Arabidopsis
  misc_feature (1)..(258): Homolog of NCBI NO: 15223141 NR Description: carbonic anhydrase, putative

SEQ ID NO: 24761 - protein, 145 aa, Arabidopsis thaliana; identical to SEQ ID NO: 21611
  peptide (1)..(145): Ceres Seq. ID no. 12650564
  misc_feature (1)..(140): Homolog of NCBI NO: 30685030 NR Description: CARBONIC ANHYDRASE 2 [Arabidopsis thaliana]
  misc_feature (1)..(135): Homolog of NCBI NO: 27652184 NR Description: carbonic anhydrase 2 [Flaveria bidentis]
  misc_feature (1)..(143): Homolog of NCBI NO: 22550386 NR Description: beta-carbonic anhydrase [Nicotiana tabacum]
  misc_feature (1)..(140): Homolog of NCBI NO: 27652186 NR Description: carbonic anhydrase 3 [Flaveria bidentis]
  misc_feature (1)..(143): Homolog of NCBI NO: 7436815 NR Description: carbonate dehydratase (EC 4.2.1.1), chloroplast -
  misc_feature (1)..(143): Homolog of NCBI NO: 115473 NR Description: CARBONIC ANHYDRASE, CHLOROPLAST PRECURSOR
  misc_feature (1)..(143): Homolog of NCBI NO: 3061271 NR Description: NPCA1 [Nicotiana paniculata]
  misc_feature (1)..(145): Homolog of NCBI NO: 15220853 NR Description: putative carbonic anhydrase
  misc_feature (1)..(145): Homolog of NCBI NO: 30698715 NR Description: carbonic anhydrase -related [Arabidopsis
  misc_feature (1)..(145): Homolog of NCBI NO: 15223141 NR Description: carbonic anhydrase, putative

SEQ ID NO: 24762 - DNA, 1601 bp, Arabidopsis thaliana
  misc_feature (1)..(1601): Ceres Seq. ID no. 12371791
  misc_feature: MA Experiment ID: 108434 Result: Down-regulated in Transcription
  misc_feature: MA Experiment 108434 PARAMETER Experiment Name: At_Root_Tips_cDNA_P Parameter: Tissue Value: Root Tips
  misc_feature: MA Experiment ID: 108464 Result: Up-regulated in Transcription
  misc_feature: MA Experiment 108464 PARAMETER Experiment Name: At_Germinating_Seeds_cDNA_P Parameter: Age (day) Value: 4 vs. 0
  misc_feature: MA Experiment 108464 PARAMETER Experiment Name: At_Germinating_Seeds_cDNA_P Parameter: Tissue Value: Germinating Seeds
  misc_feature: MA Experiment ID: 108573 Result: Up-regulated in Transcription
  misc_feature: MA Experiment 108573 PARAMETER Experiment Name: At_Drought_cDNA_P Parameter: Timepoint (hr) Value: 6
  misc_feature: MA Experiment 108573 PARAMETER Experiment Name: At_Drought_cDNA_P Parameter: Tissue Value: Aerial
  misc_feature: MA Experiment 108573 PARAMETER Experiment Name: At_Drought_cDNA_P Parameter: Treatment Value: Drought vs. No Drought
  misc_feature: MA Experiment ID: 20000113 Result: Down-regulated in Transcription
  misc_feature: MA Experiment 20000113 PARAMETER Experiment Name: At_42deg_Heat_cDNA_P Parameter: Temperature (deg C) Value: 42 vs. 22
  misc_feature: MA Experiment 20000113 PARAMETER Experiment Name: At_42deg_Heat_cDNA_P Parameter: Timepoint (hr) Value: 8
  misc_feature: MA Experiment 20000113 PARAMETER Experiment Name: At_42deg_Heat_cDNA_P Parameter: Tissue Value: Aerial
  misc_feature: MA Experiment ID: 20000171 Result: Down-regulated in Transcription
  misc_feature: MA Experiment 20000171 PARAMETER Experiment Name: At_42deg_Heat_P Parameter: Age (day) Value: 14
  misc_feature: MA Experiment 20000171 PARAMETER Experiment Name: At_42deg_Heat_P Parameter: Organism Value: A. thaliana
  misc_feature: MA Experiment 20000171 PARAMETER Experiment Name: At_42deg_Heat_P Parameter: Plant Line Value: WS
  misc_feature: MA Experiment 20000171 PARAMETER Experiment Name: At_42deg_Heat_P Parameter: Temperature (deg C) Value: 42 vs. 22
  misc_feature: MA Experiment 20000171 PARAMETER Experiment Name: At_42deg_Heat_P Parameter: Timepoint (hr) Value: 1
  misc_feature: MA Experiment 20000171 PARAMETER Experiment Name: At_42deg_Heat_P Parameter: Tissue Value: Aerial
  misc_feature: MA Experiment ID: 20000173 Result: Down-regulated in Transcription
  misc_feature: MA Experiment 20000173 PARAMETER Experiment Name: At_42deg_Heat_P Parameter: Age (day) Value: 14
  misc_feature: MA Experiment 20000173 PARAMETER Experiment Name: At_42deg_Heat_P Parameter: Organism Value: A. thaliana
  misc_feature: MA Experiment 20000173 PARAMETER Experiment Name: At_42deg_Heat_P Parameter: Plant Line Value: WS
  misc_feature: MA Experiment 20000173 PARAMETER Experiment Name: At_42deg_Heat_P Parameter: Temperature (deg C) Value: 42 vs. 22
  misc_feature: MA Experiment 20000173 PARAMETER Experiment Name: At_42deg_Heat_P Parameter: Timepoint (hr) Value: 6
  misc_feature: MA Experiment 20000173 PARAMETER Experiment Name: At_42deg_Heat_P Parameter: Tissue Value: Aerial
  misc_feature: MA Experiment ID: 20000184 Result: Down-regulated in Transcription
  misc_feature: MA Experiment 20000184 PARAMETER Experiment Name: At_Shoots__P Parameter: Age (day) Value: 7
  misc_feature: MA Experiment 20000184 PARAMETER Experiment Name: At_Shoots__P Parameter: Tissue Value: Shoots vs. Whole Plant
agaaaaattcaaagattgagtcaccaccaccatagtaatatacgcgtatgagttcccagatgtgatctccatccaacgttgtatttctttcgttttggttatcttcttcggttccatcgaattccaacaattctcatcgaggaatttggttacgaatcttttgatctgactaaacctagggagcttgatcacaaggagactgaaaccaatgctaggaggagtctcttcaggttagtagaatgagtagaaaaagaacggaaaatggcagtgaatcaggaccagccacttctcatgttcctgtggatagattcgggtttctcaagcaagaacatgccaattcgcctgagcgttttagcaagtctaaaactacatcatccactgatcatgacagagaggagagaaaggtgagaaaatggaggaagatgattggggttggagggagtgattggaagcattatgttaggagaaaacctaatgttgtcagaaggcgtatacgaaaagggatccctgattgcttacgaggtcttgtttggcagttaatctcaggaagtcgagaccttttgcttatgaatcctggtgtttatgagcaattggtgatttatgaaacatctgcatcagagcttgatatcattcgagacatatcccgtactttcccatcacatgttttctttcagaagagacatggacctgggcaaagatccttgtacaatgtccttaaggcatactcagtttatgacagagatgtcggatatgttcaggggatggggtttatagccggtttgttgcttctctatatgagcgaagaagatgccttctggttattagttgcattacttaaaggagctgttcatgctccaatggaaggattgtatcatgcagggcttccccttgtacagcaatacctttttcagttagaaagcttggtaaaagagctaattccgaagctcggagaacattttactcaagaaatgattaatccgagtatgtatgcaagtcaatggttcatcaccgtcttctcatactcatttcctttccctttggctctacggatatgggatgtgtttctctccgagggtgttaaaatcgtgttcaaagtgggcttagcattgctcaagtattgccaagatgagttggtaaagttaccgtttgagaaactaatacatgctctgaaaactttcccggaagacgcaatgaatccggataccttgcttccattggcttactctatcaaggtatcaaagcgtttggaagaactgacactggagtatcagaagactaatgccaaaccggttcaaccgtaggaaatccggttggcaataacctgaacctgaaccagaagttggattcgaattcgttttctcatcttatcttttcttgttggaatatattcttttttcatcatattgtcaagttgggtgggaatttcttatcagaagctctctgattgtttttagcaatttcgtggaaaagaagaaggcatgctccagctgatgtatagatagagagagagaccagtgttcctagagagatctcactaatgtgaaaagtaaatcatattgtttaaaggtatttttattctttaaggttcatggtaccaaacc

SEQ ID NO: 24763 - protein, 353 aa, Arabidopsis thaliana
  peptide (1)..(353): Ceres Seq. ID no. 12371792
  misc_feature (85)..(301): Pfam Name: TBC domain Pfam Description: TBC domain
  misc_feature (39)..(352): Homolog of NCBI NO: 27777640 NR Description: hypothetical protein MGC29047 [Mus musculus]
  misc_feature (31)..(349): Homolog of NCBI NO: 31207277 NR Description: ENSANGP00000001286 [Anopheles gambiae]
  misc_feature (39)..(352): Homolog of NCBI NO: 19923325 NR Description: ecotropic viral integration site 5; Neuroblastoma
  misc_feature (39)..(352): Homolog of NCBI NO: 3095098 NR Description: truncated EVI5 [Homo sapiens]
  misc_feature (62)..(352): Homolog of NCBI NO: 22531279 NR Description: plant adhesion molecule PAM1 [Arabidopsis
  misc_feature (1)..(352): Homolog of NCBI NO: 15237222 NR Description: plant adhesion molecule 1 (PAM1)
  misc_feature (1)..(299): Homolog of NCBI NO: 6957709 NR Description: putative plant adhesion molecule [Arabidopsis
  misc_feature (299)..(353): Homolog of NCBI NO: 30678579 NR Description: plant adhesion molecule -related [Arabidopsis
  misc_feature (1)..(298): Homolog of NCBI NO: 30678579 NR Description: plant adhesion molecule -related [Arabidopsis
  misc_feature (1)..(353): Homolog of NCBI NO: 18396196 NR Description: putative plant adhesion molecule
MSRKRTENGSESGPATSHVPVDRFGFLKQEHANSPERFSKSKTTSSTDHDREERKVRKWRKMIGVGGSDWKHYVRRKPNVVRRRIRKGIPDCLRGLVWQLISGSRDLLLMNPGVYEQLVIYETSASELDIIRDISRTFPSHVFFQKRHGPGQRSLYNVLKAYSVYDRDVGYVQGMGFIAGLLLLYMSEEDAFWLLVALLKGAVHAPMEGLYHAGLPLVQQYLFQLESLVKELIPKLGEHFTQEMINPSMYASQWFITVFSYSFPFPLALRIWDVFLSEGVKIVFKVGLALLKYCQDELVKLPFEKLIHALKTFPEDAMNPDTLLPLAYSIKVSKRLEELTLEYQKTNAKPVQP

SEQ ID NO: 24764 - protein, 292 aa, Arabidopsis thaliana
  peptide (1)..(292): Ceres Seq. ID no. 12371793
  misc_feature (24)..(240): Pfam Name: TBC domain Pfam Description: TBC domain
  misc_feature (1)..(291): Homolog of NCBI NO: 27777640 NR Description: hypothetical protein MGC29047 [Mus musculus]
  misc_feature (1)..(288): Homolog of NCBI NO: 31207277 NR Description: ENSANGP00000001286 [Anopheles gambiae]
  misc_feature (1)..(291): Homolog of NCBI NO: 19923325 NR Description: ecotropic viral integration site 5; Neuroblastoma
  misc_feature (1)..(291): Homolog of NCBI NO: 3095098 NR Description: truncated EVI5 [Homo sapiens]
  misc_feature (1)..(291): Homolog of NCBI NO: 22531279 NR Description: plant adhesion molecule PAM1 [Arabidopsis
  misc_feature (1)..(291): Homolog of NCBI NO: 15237222 NR Description: plant adhesion molecule 1 (PAM1)
  misc_feature (1)..(238): Homolog of NCBI NO: 6957709 NR Description: putative plant adhesion molecule [Arabidopsis
  misc_feature (238)..(292): Homolog of NCBI NO: 30678579 NR Description: plant adhesion molecule -related [Arabidopsis
  misc_feature (1)..(237): Homolog of NCBI NO: 30678579 NR Description: plant adhesion molecule -related [Arabidopsis
  misc_feature (1)..(292): Homolog of NCBI NO: 18396196 NR Description: putative plant adhesion molecule
MIGVGGSDWKHYVRRKPNVVRRRIRKGIPDCLRGLVWQLISGSRDLLLMNPGVYEQLVIYETSASELDIIRDISRTFPSHVFFQKRHGPGQRSLYNVLKAYSVYDRDVGYVQGMGFIAGLLLLYMSEEDAFWLLVALLKGAVHAPMEGLYHAGLPLVQQYLFQLESLVKELIPKLGEHFTQEMINPSMYASQWFITVFSYSFPFPLALRIWDVFLSEGVKIVFKVGLALLKYCQDELVKLPFEKLIHALKTFPEDAMNPDTLLPLAYSIKVSKRLEELTLEYQKTNAKPVQP

SEQ ID NO: 24765 - protein, 244 aa, Arabidopsis thaliana
  peptide (1)..(244): Ceres Seq. ID no. 12371794
  misc_feature (1)..(192): Pfam Name: TBC domain Pfam Description: TBC domain
  misc_feature (1)..(243): Homolog of NCBI NO: 27777640 NR Description: hypothetical protein MGC29047 [Mus musculus]
  misc_feature (1)..(240): Homolog of NCBI NO: 31207277 NR Description: ENSANGP00000001286 [Anopheles gambiae]
  misc_feature (1)..(243): Homolog of NCBI NO: 19923325 NR Description: ecotropic viral integration site 5; Neuroblastoma
  misc_feature (1)..(243): Homolog of NCBI NO: 3095098 NR Description: truncated EVI5 [Homo sapiens]
  misc_feature (1)..(243): Homolog of NCBI NO: 22531279 NR Description: plant adhesion molecule PAM1 [Arabidopsis
  misc_feature (1)..(243): Homolog of NCBI NO: 15237222 NR Description: plant adhesion molecule 1 (PAM1)
  misc_feature (1)..(190): Homolog of NCBI NO: 6957709 NR Description: putative plant adhesion molecule [Arabidopsis
  misc_feature (190)..(244): Homolog of NCBI NO: 30678579 NR Description: plant adhesion molecule -related [Arabidopsis
  misc_feature (1)..(189): Homolog of NCBI NO: 30678579 NR Description: plant adhesion molecule -related [Arabidopsis
  misc_feature (1)..(244): Homolog of NCBI NO: 18396196 NR Description: putative plant adhesion molecule
MNPGVYEQLVIYETSASELDIIRDISRTFPSHVFFQKRHGPGQRSLYNVLKAYSVYDRDVGYVQGMGFIAGLLLLYMSEEDAFWLLVALLKGAVHAPMEGLYHAGLPLVQQYLFQLESLVKELIPKLGEHFTQEMINPSMYASQWFITVFSYSFPFPLALRIWDVFLSEGVKIVFKVGLALLKYCQDELVKLPFEKLIHALKTFPEDAMNPDTLLPLAYSIKVSKRLEELTLEYQKTNAKPVQP

SEQ ID NO: 24766 - DNA, 1267 bp, Arabidopsis thaliana
  misc_feature (1)..(1267): Ceres Seq. ID no. 13487838
  misc_feature: MA Experiment ID: 108434 Result: Down-regulated in Transcription
  misc_feature: MA Experiment 108434 PARAMETER Experiment Name: At_Root_Tips_cDNA_P Parameter: Tissue Value: Root Tips
  misc_feature: MA Experiment ID: 108569 Result: Up-regulated in Transcription
  misc_feature: MA Experiment 108569 PARAMETER Experiment Name: At_0.001%_MeJA__cDNA_P Parameter: Timepoint (hr) Value: 6
  misc_feature: MA Experiment 108569 PARAMETER Experiment Name: At_0.001%_MeJA__cDNA_P Parameter: Tissue Value: Aerial
  misc_feature: MA Experiment 108569 PARAMETER Experiment Name: At_0.001%_MeJA__cDNA_P Parameter: Treatment Value: 0.001% MeJA vs. No Treatment
  misc_feature: MA Experiment ID: 108573 Result: Up-regulated in Transcription
  misc_feature: MA Experiment 108573 PARAMETER Experiment Name: At_Drought_cDNA_P Parameter: Timepoint (hr) Value: 6
  misc_feature: MA Experiment 108573 PARAMETER Experiment Name: At_Drought_cDNA_P Parameter: Tissue Value: Aerial
  misc_feature: MA Experiment 108573 PARAMETER Experiment Name: At_Drought_cDNA_P Parameter: Treatment Value: Drought vs. No Drought
  misc_feature: MA Experiment ID: 108574 Result: Up-regulated in Transcription
  misc_feature: MA Experiment 108574 PARAMETER Experiment Name: At_Wounding__cDNA_P Parameter: Timepoint (hr) Value: 1
  misc_feature: MA Experiment 108574 PARAMETER Experiment Name: At_Wounding__cDNA_P Parameter: Tissue Value: Aerial
  misc_feature: MA Experiment 108574 PARAMETER Experiment Name: At_Wounding__cDNA_P Parameter: Treatment Value: Wounding vs. No Wounding
  misc_feature: MA Experiment ID: 108585 Result: Up-regulated in Transcription
  misc_feature: MA Experiment 108585 PARAMETER Experiment Name: At_5mM_NaNP_cDNA_P Parameter: Timepoint (hr) Value: 6
  misc_feature: MA Experiment 108585 PARAMETER Experiment Name: At_5mM_NaNP_cDNA_P Parameter: Tissue Value: Aerial
  misc_feature: MA Experiment 108585 PARAMETER Experiment Name: At_5mM_NaNP_cDNA_P Parameter: Treatment Value: null
  misc_feature: MA Experiment ID: 108667 Result: Up-regulated in Transcription
  misc_feature: MA Experiment 108667 PARAMETER Experiment Name: At_2mM_SA_cDNA_P Parameter: Plant Line Value: WS
  misc_feature: MA Experiment 108667 PARAMETER Experiment Name: At_2mM_SA_cDNA_P Parameter: Timepoint (hr) Value: 1
  misc_feature: MA Experiment 108667 PARAMETER Experiment Name: At_2mM_SA_cDNA_P Parameter: Treatment Value: 2mM SA vs. No Treatment
  misc_feature: MA Experiment ID: 108668 Result: Up-regulated in Transcription
  misc_feature: MA Experiment 108668 PARAMETER Experiment Name: At_2mM_SA_cDNA_P Parameter: Plant Line Value: WS
  misc_feature: MA Experiment 108668 PARAMETER Experiment Name: At_2mM_SA_cDNA_P Parameter: Timepoint (hr) Value: 6
  misc_feature: MA Experiment 108668 PARAMETER Experiment Name: At_2mM_SA_cDNA_P Parameter: Treatment Value: 2mM SA vs. No Treatment
  misc_feature: MA Experiment ID: 20000088 Result: Up-regulated in Transcription
  misc_feature: MA Experiment 20000088 PARAMETER Experiment Name: At_100uM_ABA_Mutants_cDNA_P Parameter: Plant Line Value: Landsberg
  misc_feature: MA Experiment 20000088 PARAMETER Experiment Name: At_100uM_ABA_Mutants_cDNA_P Parameter: Timepoint (hr) Value: 6
  misc_feature: MA Experiment 20000088 PARAMETER Experiment Name: At_100uM_ABA_Mutants_cDNA_P Parameter: Tissue Value: Aerial
  misc_feature: MA Experiment 20000088 PARAMETER Experiment Name: At_100uM_ABA_Mutants_cDNA_P Parameter: Treatment Value: 100uM ABA vs. No Treatment
  misc_feature: MA Experiment ID: 20000117 Result: Up-regulated in Transcription
  misc_feature: MA Experiment 20000117 PARAMETER Experiment Name: At_100uM_ABA_Mutants_cDNA_P Parameter: Plant Line Value: Columbia
  misc_feature: MA Experiment 20000117 PARAMETER Experiment Name: At_100uM_ABA_Mutants_cDNA_P Parameter: Timepoint (hr) Value: 6
  misc_feature: MA Experiment 20000117 PARAMETER Experiment Name: At_100uM_ABA_Mutants_cDNA_P Parameter: Tissue Value: Aerial
  misc_feature: MA Experiment 20000117 PARAMETER Experiment Name: At_100uM_ABA_Mutants_cDNA_P Parameter: Treatment Value: 100uM ABA vs. No Treatment
  misc_feature: MA Experiment ID: 20000144 Result: Down-regulated in Transcription
  misc_feature: MA Experiment 20000144 PARAMETER Experiment Name: At_42deg_Heat_cDNA_P Parameter: Temperature (deg C) Value: 42 vs. 22
  misc_feature: MA Experiment 20000144 PARAMETER Experiment Name: At_42deg_Heat_cDNA_P Parameter: Timepoint (hr) Value: 1
  misc_feature: MA Experiment 20000144 PARAMETER Experiment Name: At_42deg_Heat_cDNA_P Parameter: Tissue Value: Aerial
  misc_feature: MA Experiment ID: 20000171 Result: Down-regulated in Transcription
  misc_feature: MA Experiment 20000171 PARAMETER Experiment Name: At_42deg_Heat_P Parameter: Age (day) Value: 14
  misc_feature: MA Experiment 20000171 PARAMETER Experiment Name: At_42deg_Heat_P Parameter: Organism Value: A. thaliana
  misc_feature: MA Experiment 20000171 PARAMETER Experiment Name: At_42deg_Heat_P Parameter: Plant Line Value: WS
  misc_feature: MA Experiment 20000171 PARAMETER Experiment Name: At_42deg_Heat_P Parameter: Temperature (deg C) Value: 42 vs. 22
  misc_feature: MA Experiment 20000171 PARAMETER Experiment Name: At_42deg_Heat_P Parameter: Timepoint (hr) Value: 1
  misc_feature: MA Experiment 20000171 PARAMETER Experiment Name: At_42deg_Heat_P Parameter: Tissue Value: Aerial
  misc_feature: MA Experiment ID: 20000173 Result: Down-regulated in Transcription
  misc_feature: MA Experiment 20000173 PARAMETER Experiment Name: At_42deg_Heat_P Parameter: Age (day) Value: 14
  misc_feature: MA Experiment 20000173 PARAMETER Experiment Name: At_42deg_Heat_P Parameter: Organism Value: A. thaliana
  misc_feature: MA Experiment 20000173 PARAMETER Experiment Name: At_42deg_Heat_P Parameter: Plant Line Value: WS
  misc_feature: MA Experiment 20000173 PARAMETER Experiment Name: At_42deg_Heat_P Parameter: Temperature (deg C) Value: 42 vs. 22
  misc_feature: MA Experiment 20000173 PARAMETER Experiment Name: At_42deg_Heat_P Parameter: Timepoint (hr) Value: 6
  misc_feature: MA Experiment 20000173 PARAMETER Experiment Name: At_42deg_Heat_P Parameter: Tissue Value: Aerial
  misc_feature: MA Experiment ID: 20000182 Result: Up-regulated in Transcription
  misc_feature: MA Experiment 20000182 PARAMETER Experiment Name: At_2mM_SA_P Parameter: Age (day) Value: 14
  misc_feature: MA Experiment 20000182 PARAMETER Experiment Name: At_2mM_SA_P Parameter: Organism Value: A. thaliana
  misc_feature: MA Experiment 20000182 PARAMETER Experiment Name: At_2mM_SA_P Parameter: Plant Line Value: WS
  misc_feature: MA Experiment 20000182 PARAMETER Experiment Name: At_2mM_SA_P Parameter: Timepoint (hr) Value: 6
  misc_feature: MA Experiment 20000182 PARAMETER Experiment Name: At_2mM_SA_P Parameter: Tissue Value: Aerial
  misc_feature: MA Experiment 20000182 PARAMETER Experiment Name: At_2mM_SA_P Parameter: Treatment Value: 2mM SA vs. No Treatment
  misc_feature: MA Experiment ID: 20000184 Result: Down-regulated in Transcription
  misc_feature: MA Experiment 20000184 PARAMETER Experiment Name: At_Shoots__P Parameter: Age (day) Value: 7
  misc_feature: MA Experiment 20000184 PARAMETER Experiment Name: At_Shoots__P Parameter: Tissue Value: Shoots vs. Whole Plant
  misc_feature: MA Experiment ID: 20000185 Result: Down-regulated in Transcription
  misc_feature: MA Experiment 20000185 PARAMETER Experiment Name: At_Roots__P Parameter: Age (day) Value: 7 vs. 21
  misc_feature: MA Experiment 20000185 PARAMETER Experiment Name: At_Roots__P Parameter: Organism Value: A. thaliana
  misc_feature: MA Experiment 20000185 PARAMETER Experiment Name: At_Roots__P Parameter: Tissue Value: Roots vs. Whole Plant
  misc_feature: MA Experiment ID: 20000224 Result: Up-regulated in Transcription
  misc_feature: MA Experiment ID: 20000234 Result: Down-regulated in Transcription
  misc_feature: MA Experiment 20000234 PARAMETER Experiment Name: At_Siliques_P Parameter: Age (day) Value: 21
  misc_feature: MA Experiment 20000234 PARAMETER Experiment Name: At_Siliques_P Parameter: Organism Value: A. thaliana
  misc_feature: MA Experiment 20000234 PARAMETER Experiment Name: At_Siliques_P Parameter: Plant Line Value: WS
  misc_feature: MA Experiment 20000234 PARAMETER Experiment Name: At_Siliques_P Parameter: Tissue Value: Less Than 5mm Siliques vs. Whole Plant
  misc_feature: MA Experiment ID: 20000235 Result: Down-regulated in Transcription
  misc_feature: MA Experiment 20000235 PARAMETER Experiment Name: At_Siliques_P Parameter: Age (day) Value: 21
  misc_feature: MA Experiment 20000235 PARAMETER Experiment Name: At_Siliques_P Parameter: Organism Value: A. thaliana
  misc_feature: MA Experiment 20000235 PARAMETER Experiment Name: At_Siliques_P Parameter: Plant Line Value: WS
  misc_feature: MA Experiment 20000235 PARAMETER Experiment Name: At_Siliques_P Parameter: Tissue Value: 5-10mm Siliques vs. Whole Plant
  misc_feature: MA Experiment ID: 20000264 Result: Down-regulated in Transcription
  misc_feature: MA Experiment 20000264 PARAMETER Experiment Name: At_Open_Flower_P Parameter: Age (day) Value: 21
  misc_feature: MA Experiment 20000264 PARAMETER Experiment Name: At_Open_Flower_P Parameter: Plant Line Value: WS
  misc_feature: MA Experiment 20000264 PARAMETER Experiment Name: At_Open_Flower_P Parameter: Tissue Value: Open Flower vs. Whole Plant
  misc_feature: MA Experiment ID: 20000438 Result: Down-regulated in Transcription
  misc_feature: MA Experiment 20000438 PARAMETER Experiment Name: At_Shoots__P Parameter: Age (day) Value: 14
  misc_feature: MA Experiment 20000438 PARAMETER Experiment Name: At_Shoots__P Parameter: Tissue Value: Shoots vs. Whole Plant
  misc_feature: MA Experiment ID: 20000439 Result: Down-regulated in Transcription
  misc_feature: MA Experiment 20000439 PARAMETER Experiment Name: At_Roots__P Parameter: Age (day) Value: 14 vs. 21
  misc_feature: MA Experiment 20000439 PARAMETER Experiment Name: At_Roots__P Parameter: Organism Value: A. thaliana
  misc_feature: MA Experiment 20000439 PARAMETER Experiment Name: At_Roots__P Parameter: Tissue Value: Roots vs. Whole Plant
  misc_feature: MA Experiment ID: 20000527 Result: Down-regulated in Transcription
  misc_feature: MA Experiment 20000527 PARAMETER Experiment Name: At_10percent_PEG_P Parameter: Age (day) Value: 20
  misc_feature: MA Experiment 20000527 PARAMETER Experiment Name: At_10percent_PEG_P Parameter: Organism Value: A. thaliana
  misc_feature: MA Experiment 20000527 PARAMETER Experiment Name: At_10percent_PEG_P Parameter: Plant Line Value: WS
  misc_feature: MA Experiment 20000527 PARAMETER Experiment Name: At_10percent_PEG_P Parameter: Timepoint (day) Value: 20
  misc_feature: MA Experiment 20000527 PARAMETER Experiment Name: At_10percent_PEG_P Parameter: Tissue Value: Whole Plant
  misc_feature: MA Experiment 20000527 PARAMETER Experiment Name: At_10percent_PEG_P Parameter: Treatment Value: 10percent PEG vs. No Treatment
  misc_feature: MA Experiment ID: 20000573 Result: Up-regulated in Transcription
  misc_feature: MA Experiment 20000573 PARAMETER Experiment Name: At_100uM_ABA_Mutants__P Parameter: Organism Value: A. thaliana
  misc_feature: MA Experiment 20000573 PARAMETER Experiment Name: At_100uM_ABA_Mutants__P Parameter: Plant Line Value: CS22 vs. Ler wt
  misc_feature: MA Experiment 20000573 PARAMETER Experiment Name: At_100uM_ABA_Mutants__P Parameter: Timepoint (hr) Value: N/A
  misc_feature: MA Experiment 20000573 PARAMETER Experiment Name: At_100uM_ABA_Mutants__P Parameter: Tissue Value: Whole Plant
  misc_feature: MA Experiment 20000573 PARAMETER Experiment Name: At_100uM_ABA_Mutants__P Parameter: Treatment Value: None
  misc_feature: MA Experiment ID: 20000574 Result: Up-regulated in Transcription
  misc_feature: MA Experiment 20000574 PARAMETER Experiment Name: At_100uM_ABA_Mutants__P Parameter: Organism Value: A. thaliana
  misc_feature: MA Experiment 20000574 PARAMETER Experiment Name: At_100uM_ABA_Mutants__P Parameter: Plant Line Value: CS23 vs. Ler wt
  misc_feature: MA Experiment 20000574 PARAMETER Experiment Name: At_100uM_ABA_Mutants__P Parameter: Timepoint (hr) Value: N/A
  misc_feature: MA Experiment 20000574 PARAMETER Experiment Name: At_100uM_ABA_Mutants__P Parameter: Tissue Value: Whole Plant
  misc_feature: MA Experiment 20000574 PARAMETER Experiment Name: At_100uM_ABA_Mutants__P Parameter: Treatment Value: None
  misc_feature: MA Experiment ID: 20000709 Result: Up-regulated in Transcription
  misc_feature: MA Experiment 20000709 PARAMETER Experiment Name: At_15mM_NH4NO3_L-to-H_P Parameter: Age (hr) Value: 14
  misc_feature: MA Experiment 20000709 PARAMETER Experiment Name: At_15mM_NH4NO3_L-to-H_P Parameter: Organism Value: A. thaliana
  misc_feature: MA Experiment 20000709 PARAMETER Experiment Name: At_15mM_NH4NO3_L-to-H_P Parameter: Plant Line Value: WS
  misc_feature: MA Experiment 20000709 PARAMETER Experiment Name: At_15mM_NH4NO3_L-to-H_P Parameter: Timepoint (hr) Value: 4
  misc_feature: MA Experiment 20000709 PARAMETER Experiment Name: At_15mM_NH4NO3_L-to-H_P Parameter: Tissue Value: Aerial
  misc_feature: MA Experiment 20000709 PARAMETER Experiment Name: At_15mM_NH4NO3_L-to-H_P Parameter: Treatment Value: 15mM NH4NO3 vs. 30mM Mannitol
  misc_feature: MA Experiment ID: 20000794 Result: Down-regulated in Transcription
  misc_feature: MA Experiment 20000794 PARAMETER Experiment Name: At_Petals_P Parameter: Age (day) Value: 23-25 days
  misc_feature: MA Experiment 20000794 PARAMETER Experiment Name: At_Petals_P Parameter: Plant Line Value: WS
  misc_feature: MA Experiment 20000794 PARAMETER Experiment Name: At_Petals_P Parameter: Tissue Value: Petals vs. Whole plant
  misc_feature: MA Experiment ID: 20001248 Result: Down-regulated in Transcription
  misc_feature: MA Experiment 20001248 PARAMETER Experiment Name: At_Far-red-induction_P Parameter: Age (day) Value: 7
  misc_feature: MA Experiment 20001248 PARAMETER Experiment Name: At_Far-red-induction_P Parameter: Light Value: Far-red vs. White
  misc_feature: MA Experiment 20001248 PARAMETER Experiment Name: At_Far-red-induction_P Parameter: Organism Value: A. thaliana
  misc_feature: MA Experiment 20001248 PARAMETER Experiment Name: At_Far-red-induction_P Parameter: Plant Line Value: Columbia
  misc_feature: MA Experiment 20001248 PARAMETER Experiment Name: At_Far-red-induction_P Parameter: Timepoint (hr) Value: 4
  misc_feature: MA Experiment 20001248 PARAMETER Experiment Name: At_Far-red-induction_P Parameter: Tissue Value: Whole Plant
  misc_feature: MA Experiment ID: 20001450 Result: Down-regulated in Transcription
  misc_feature: MA Experiment 20001450 PARAMETER Experiment Name: At_Far-red-induction_P Parameter: Age (day) Value: 7
  misc_feature: MA Experiment 20001450 PARAMETER Experiment Name: At_Far-red-induction_P Parameter: Light Value: Far-red vs. White
  misc_feature: MA Experiment 20001450 PARAMETER Experiment Name: At_Far-red-induction_P Parameter: Organism Value: A. thaliana
  misc_feature: MA Experiment 20001450 PARAMETER Experiment Name: At_Far-red-induction_P Parameter: Plant Line Value: Columbia
  misc_feature: MA Experiment 20001450 PARAMETER Experiment Name: At_Far-red-induction_P Parameter: Timepoint (hr) Value: 8
  misc_feature: MA Experiment 20001450 PARAMETER Experiment Name: At_Far-red-induction_P Parameter: Tissue Value: Whole Plant
  misc_feature: MA Experiment ID: 20001451 Result: Down-regulated in Transcription
  misc_feature: MA Experiment 20001451 PARAMETER Experiment Name: At_Far-red-induction_P Parameter: Age (day) Value: 7
  misc_feature: MA Experiment 20001451 PARAMETER Experiment Name: At_Far-red-induction_P Parameter: Light Value: Far-red vs. White
  misc_feature: MA Experiment 20001451 PARAMETER Experiment Name: At_Far-red-induction_P Parameter: Organism Value: A. thaliana
  misc_feature: MA Experiment 20001451 PARAMETER Experiment Name: At_Far-red-induction_P Parameter: Plant Line Value: Columbia
  misc_feature: MA Experiment 20001451 PARAMETER Experiment Name: At_Far-red-induction_P Parameter: Timepoint (hr) Value: 24
  misc_feature: MA Experiment 20001451 PARAMETER Experiment Name: At_Far-red-induction_P Parameter: Tissue Value: Whole Plant
  misc_feature: MA Experiment ID: 20001558 Result: Down-regulated in Transcription
  misc_feature: MA Experiment 20001558 PARAMETER Experiment Name: At_Drought_Soil_Dry_P Parameter: Age (day) Value: 27
  misc_feature: MA Experiment 20001558 PARAMETER Experiment Name: At_Drought_Soil_Dry_P Parameter: Organism Value: A. thaliana
  misc_feature: MA Experiment 20001558 PARAMETER Experiment Name: At_Drought_Soil_Dry_P Parameter: Plant Line Value: WS
  misc_feature: MA Experiment 20001558 PARAMETER Experiment Name: At_Drought_Soil_Dry_P Parameter: Post Timepoint (hr) Value: 6
  misc_feature: MA Experiment 20001558 PARAMETER Experiment Name: At_Drought_Soil_Dry_P Parameter: Post-Treatment Value: Re-Water vs. No Drought
  misc_feature: MA Experiment 20001558 PARAMETER Experiment Name: At_Drought_Soil_Dry_P Parameter: Timepoint (day) Value: 13
  misc_feature: MA Experiment 20001558 PARAMETER Experiment Name: At_Drought_Soil_Dry_P Parameter: Treatment Value: Drought vs. No Drought
  misc_feature: MA Experiment ID: 20001904 Result: Down-regulated in Transcription
  misc_feature: MA Experiment 20001904 PARAMETER Experiment Name: At_Drought_Reproduction_P Parameter: Age (day) Value: 37
  misc_feature: MA Experiment 20001904 PARAMETER Experiment Name: At_Drought_Reproduction_P Parameter: Organism Value: A. thaliana
  misc_feature: MA Experiment 20001904 PARAMETER Experiment Name: At_Drought_Reproduction_P Parameter: Plant Line Value: WS
  misc_feature: MA Experiment 20001904 PARAMETER Experiment Name: At_Drought_Reproduction_P Parameter: Timepoint (day) Value: 7
  misc_feature: MA Experiment 20001904 PARAMETER Experiment Name: At_Drought_Reproduction_P Parameter: Tissue Value: Rosettes
  misc_feature: MA Experiment 20001904 PARAMETER Experiment Name: At_Drought_Reproduction_P Parameter: Treatment Value: Drought vs. No Drought
  misc_feature: MA Experiment ID: 20001905 Result: Down-regulated in Transcription
  misc_feature: MA Experiment 20001905 PARAMETER Experiment Name: At_Drought_Reproduction_P Parameter: Age (day) Value: 40
  misc_feature: MA Experiment 20001905 PARAMETER Experiment Name: At_Drought_Reproduction_P Parameter: Organism Value: A. thaliana
  misc_feature: MA Experiment 20001905 PARAMETER Experiment Name: At_Drought_Reproduction_P Parameter: Plant Line Value: WS
  misc_feature: MA Experiment 20001905 PARAMETER Experiment Name: At_Drought_Reproduction_P Parameter: Timepoint (day) Value: 10
  misc_feature: MA Experiment 20001905 PARAMETER Experiment Name: At_Drought_Reproduction_P Parameter: Tissue Value: Rosettes
  misc_feature: MA Experiment 20001905 PARAMETER Experiment Name: At_Drought_Reproduction_P Parameter: Treatment Value: Drought vs. No Drought
aaattggcatgttcaccatttttccacaaactcaaatttgctccaatgcctgtacttttctcctctcgttctctcatactctccattattgtccccttacttatatctatcgctctctacaaactcgacacattcgaccccgctattgttccttccgatgcattcacatcctctgctacttcactcccgccgcttataaacgacgaatttctcaccggagctgagtttatcggtgtcggtcttctcaatatacccgaagatatcgcctaccataaggaatctaatctcatctacactggttgtgttgatggatgggtgaaacgagtcaaggtcgccgactcggttaatgactcagtcgttgaggattgggtcaatactggtggtagaccgctcggaatcgcgttcggaatccacggcgaagtcattgtcgcagacgtacacaagggactgttgaatataagcggtgacggaaagaagacggaattgttgacggacgaagcggacggtgtgaagtttaagctgacggatgcagttaccgttgcagataacggcgttttgtatttcacagatgcttcttacaagtacactctcaatcaattgagtttagacatgttagaagggaaaccttttggacgactcttgagctttgatcccaccacacgtgttacaaaagtacttctcaaagacctctacttcgctaatggcatcaccatctctcctgatcaaactcatctcatcttctgtgaaactccaatgaaaaggtgcagcaagtattacatcagtgaggagcgtgtggaggtattcactcaaagcttaccaggttatccagataacattcgttacgatggagatggacattactggattgcattgccttcgggagtcacgacattgtggaatatctcgttgaaataccctttcttgaggaaactcacagcaatggtggctaagtacggcgtggatcttatgtttatggagaatgcaggcgttttacaggtggatttggatggaaatcccatcgcgtactaccatgatccaaaactctctcacatagccacatgtgacaagattgggaaatatctctattgtggaagtctctcgcaatcacatatcctccgacttgatctcctgaaatatcctgcacagaacaagaaactttgaaatattatgttttcacaaataaggaaagtttccattttaggaaggagcattcactgtcacaaaaaatgtaaactcatttcctgagaatgaatgatgattgtatctc

SEQ ID NO: 24767 - protein, 386 aa, Arabidopsis thaliana
  peptide (1)..(386): Ceres Seq. ID no. 13487839
  misc_feature (23)..(371): Pfam Name: Strictosidine synthase Pfam Description: Strictosidine synthase
  misc_feature (23)..(376): Homolog of NCBI NO: 23059369 NR Description: hypothetical protein [Pseudomonas fluorescens
  misc_feature (85)..(380): Homolog of NCBI NO: 40063117 NR Description: strictosidine synthase family protein [uncultured
  misc_feature (25)..(378): Homolog of NCBI NO: 23237921 NR Description: contains ESTs
  misc_feature (29)..(374): Homolog of NCBI NO: 15596490 NR Description: hypothetical protein [Pseudomonas aeruginosa
  misc_feature (21)..(382): Homolog of NCBI NO: 37536558 NR Description: mucin-like protein [Oryza sativa (japonica
  misc_feature (16)..(384): Homolog of NCBI NO: 15230477 NR Description: strictosidine synthase-related [Arabidopsis
  misc_feature (16)..(386): Homolog of NCBI NO: 11358518 NR Description: mucin-like protein - Arabidopsis thaliana
  misc_feature (16)..(386): Homolog of NCBI NO: 15230488 NR Description: strictosidine synthase-related [Arabidopsis
  misc_feature (16)..(386): Homolog of NCBI NO: 18409339 NR Description: strictosidine synthase-related [Arabidopsis
  misc_feature (16)..(386): Homolog of NCBI NO: 15230490 NR Description: strictosidine synthase-related [Arabidopsis
KLACSPFFHKLKFAPMPVLFSSRSLILSIIVPLLISIALYKLDTFDPAIVPSDAFTSSATSLPPLINDEFLTGAEFIGVGLLNIPEDIAYHKESNLIYTGCVDGWVKRVKVADSVNDSVVEDWVNTGGRPLGIAFGIHGEVIVADVHKGLLNISGDGKKTELLTDEADGVKFKLTDAVTVADNGVLYFTDASYKYTLNQLSLDMLEGKPFGRLLSFDPTTRVTKVLLKDLYFANGITISPDQTHLIFCETPMKRCSKYYISEERVEVFTQSLPGYPDNIRYDGDGHYWIALPSGVTTLWNISLKYPFLRKLTAMVAKYGVDLMFMENAGVLQVDLDGNPIAYYHDPKLSHIATCDKIGKYLYCGSLSQSHILRLDLLKYPAQNKKL

SEQ ID NO: 24768 - protein, 371 aa, Arabidopsis thaliana
  peptide (1)..(371): Ceres Seq. ID no. 13487840
  misc_feature (8)..(356): Pfam Name: Strictosidine synthase Pfam Description: Strictosidine synthase
  misc_feature (1)..(371): Homolog of NCBI NO: 15230488 NR Description: strictosidine synthase-related [Arabidopsis
  misc_feature (1)..(371): Homolog of NCBI NO: 18409339 NR Description: strictosidine synthase-related [Arabidopsis
  misc_feature (70)..(365): Homolog of NCBI NO: 40063117 NR Description: strictosidine synthase family protein [uncultured
  misc_feature (14)..(359): Homolog of NCBI NO: 15596490 NR Description: hypothetical protein [Pseudomonas aeruginosa
  misc_feature (1)..(369): Homolog of NCBI NO: 15230477 NR Description: strictosidine synthase-related [Arabidopsis
  misc_feature (1)..(371): Homolog of NCBI NO: 11358518 NR Description: mucin-like protein - Arabidopsis thaliana
  misc_feature (6)..(367): Homolog of NCBI NO: 37536558 NR Description: mucin-like protein [Oryza sativa (japonica
  misc_feature (10)..(363): Homolog of NCBI NO: 23237921 NR Description: contains ESTs
  misc_feature (8)..(361): Homolog of NCBI NO: 23059369 NR Description: hypothetical protein [Pseudomonas fluorescens
  misc_feature (1)..(371): Homolog of NCBI NO: 15230490 NR Description: strictosidine synthase-related [Arabidopsis
MPVLFSSRSLILSIIVPLLISIALYKLDTFDPAIVPSDAFTSSATSLPPLINDEFLTGAEFIGVGLLNIPEDIAYHKESNLIYTGCVDGWVKRVKVADSVNDSVVEDWVNTGGRPLGIAFGIHGEVIVADVHKGLLNISGDGKKTELLTDEADGVKFKLTDAVTVADNGVLYFTDASYKYTLNQLSLDMLEGKPFGRLLSFDPTTRVTKVLLKDLYFANGITISPDQTHLIFCETPMKRCSKYYISEERVEVFTQSLPGYPDNIRYDGDGHYWIALPSGVTTLWNISLKYPFLRKLTAMVAKYGVDLMFMENAGVLQVDLDGNPIAYYHDPKLSHIATCDKIGKYLYCGSLSQSHILRLDLLKYPAQNKKL

SEQ ID NO: 24769 - DNA, 1352 bp, Arabidopsis thaliana
  misc_feature (1)..(1352): Ceres Seq. ID no. 13495889
  misc_feature: MA Experiment ID: 20000086 Result: Up-regulated in Transcription
  misc_feature: MA Experiment 20000086 PARAMETER Experiment Name: At_100uM_ABA_Mutants_cDNA_P Parameter: Plant Line Value: CS22
  misc_feature: MA Experiment 20000086 PARAMETER Experiment Name: At_100uM_ABA_Mutants_cDNA_P Parameter: Timepoint (hr) Value: 6
  misc_feature: MA Experiment 20000086 PARAMETER Experiment Name: At_100uM_ABA_Mutants_cDNA_P Parameter: Tissue Value: Aerial
  misc_feature: MA Experiment 20000086 PARAMETER Experiment Name: At_100uM_ABA_Mutants_cDNA_P Parameter: Treatment Value: 100uM ABA vs. No Treatment
  misc_feature: MA Experiment ID: 20000306 Result: Up-regulated in Transcription
  misc_feature: MA Experiment 20000306 PARAMETER Experiment Name: At_Germinating_Seeds_Sub_P Parameter: Age (hr) Value: 6 vs. 0
  misc_feature: MA Experiment 20000306 PARAMETER Experiment Name: At_Germinating_Seeds_Sub_P Parameter: Organism Value: A. thaliana
  misc_feature: MA Experiment 20000306 PARAMETER Experiment Name: At_Germinating_Seeds_Sub_P Parameter: Plant Line Value: WS
  misc_feature: MA Experiment 20000306 PARAMETER Experiment Name: At_Germinating_Seeds_Sub_P Parameter: Tissue Value: Germinating Seeds
  misc_feature: MA Experiment ID: 20000307 Result: Up-regulated in Transcription
  misc_feature: MA Experiment 20000307 PARAMETER Experiment Name: At_Germinating_Seeds_Sub_P Parameter: Age (hr) Value: 24 vs. 0
  misc_feature: MA Experiment 20000307 PARAMETER Experiment Name: At_Germinating_Seeds_Sub_P Parameter: Organism Value: A. thaliana
  misc_feature: MA Experiment 20000307 PARAMETER Experiment Name: At_Germinating_Seeds_Sub_P Parameter: Plant Line Value: WS
  misc_feature: MA Experiment 20000307 PARAMETER Experiment Name: At_Germinating_Seeds_Sub_P Parameter: Tissue Value: Germinating Seeds
  misc_feature: MA Experiment ID: 20000327 Result: Up-regulated in Transcription
  misc_feature: MA Experiment 20000327 PARAMETER Experiment Name: At_42deg_Heat_Sub_P Parameter: Age (day) Value: 14
  misc_feature: MA Experiment 20000327 PARAMETER Experiment Name: At_42deg_Heat_Sub_P Parameter: Organism Value: A. thaliana
  misc_feature: MA Experiment 20000327 PARAMETER Experiment Name: At_42deg_Heat_Sub_P Parameter: Plant Line Value: WS
  misc_feature: MA Experiment 20000327 PARAMETER Experiment Name: At_42deg_Heat_Sub_P Parameter: Temperature (deg C) Value: 42 vs. 22
  misc_feature: MA Experiment 20000327 PARAMETER Experiment Name: At_42deg_Heat_Sub_P Parameter: Timepoint (hr) Value: 1
  misc_feature: MA Experiment 20000327 PARAMETER Experiment Name: At_42deg_Heat_Sub_P Parameter: Tissue Value: Aerial
  misc_feature: MA Experiment ID: 20000328 Result: Up-regulated in Transcription
  misc_feature: MA Experiment 20000328 PARAMETER Experiment Name: At_42deg_Heat_Sub_P Parameter: Age (day) Value: 14
  misc_feature: MA Experiment 20000328 PARAMETER Experiment Name: At_42deg_Heat_Sub_P Parameter: Organism Value: A. thaliana
  misc_feature: MA Experiment 20000328 PARAMETER Experiment Name: At_42deg_Heat_Sub_P Parameter: Plant Line Value: WS
  misc_feature: MA Experiment 20000328 PARAMETER Experiment Name: At_42deg_Heat_Sub_P Parameter: Temperature (deg C) Value: 42 vs. 22
  misc_feature: MA Experiment 20000328 PARAMETER Experiment Name: At_42deg_Heat_Sub_P Parameter: Timepoint (hr) Value: 6
  misc_feature: MA Experiment 20000328 PARAMETER Experiment Name: At_42deg_Heat_Sub_P Parameter: Tissue Value: Aerial
  misc_feature: MA Experiment ID: 20000329 Result: Down-regulated in Transcription
  misc_feature: MA Experiment 20000329 PARAMETER Experiment Name: At_4deg_Cold_Sub_P Parameter: Age (day) Value: 14
  misc_feature: MA Experiment 20000329 PARAMETER Experiment Name: At_4deg_Cold_Sub_P Parameter: Organism Value: A. thaliana
  misc_feature: MA Experiment 20000329 PARAMETER Experiment Name: At_4deg_Cold_Sub_P Parameter: Plant Line Value: WS
  misc_feature: MA Experiment 20000329 PARAMETER Experiment Name: At_4deg_Cold_Sub_P Parameter: Temperature (deg C) Value: 4 vs. 22
  misc_feature: MA Experiment 20000329 PARAMETER Experiment Name: At_4deg_Cold_Sub_P Parameter: Timepoint (hr) Value: 6
  misc_feature: MA Experiment 20000329 PARAMETER Experiment Name: At_4deg_Cold_Sub_P Parameter: Tissue Value: Aerial
  misc_feature: MA Experiment ID: 20000348 Result: Up-regulated in Transcription
  misc_feature: MA Experiment 20000348 PARAMETER Experiment Name: At_100uM_ABA_Sub_P Parameter: Age (day) Value: 14
  misc_feature: MA Experiment 20000348 PARAMETER Experiment Name: At_100uM_ABA_Sub_P Parameter: Organism Value: A. thaliana
  misc_feature: MA Experiment 20000348 PARAMETER Experiment Name: At_100uM_ABA_Sub_P Parameter: Plant Line Value: WS
  misc_feature: MA Experiment 20000348 PARAMETER Experiment Name: At_100uM_ABA_Sub_P Parameter: Timepoint (hr) Value: 1
  misc_feature: MA Experiment 20000348 PARAMETER Experiment Name: At_100uM_ABA_Sub_P Parameter: Tissue Value: Aerial
  misc_feature: MA Experiment 20000348 PARAMETER Experiment Name: At_100uM_ABA_Sub_P Parameter: Treatment Value: 100uM ABA vs. No Treatment
  misc_feature: MA Experiment ID: 20000355 Result: Down-regulated in Transcription
  misc_feature: MA Experiment 20000355 PARAMETER Experiment Name: At_Siliques_Sub_P Parameter: Age (day) Value: 21
  misc_feature: MA Experiment 20000355 PARAMETER Experiment Name: At_Siliques_Sub_P Parameter: Organism Value: A. thaliana
  misc_feature: MA Experiment 20000355 PARAMETER Experiment Name: At_Siliques_Sub_P Parameter: Plant Line Value: WS
  misc_feature: MA Experiment 20000355 PARAMETER Experiment Name: At_Siliques_Sub_P Parameter: Tissue Value: Less Than 5mm Siliques vs. Whole Plant
  misc_feature: MA Experiment ID: 20000440 Result: Down-regulated in Transcription
  misc_feature: MA Experiment 20000440 PARAMETER Experiment Name: At_Closed-Flower__Sub_P Parameter: Tissue Value: Closed Flower vs. Whole Plant
  misc_feature: MA Experiment ID: 20001807 Result: Up-regulated in Transcription
  misc_feature: MA Experiment 20001807 PARAMETER Experiment Name: At_50mM_NH4NO3_L-to-H_Sub_P Parameter: Timepoint (hr) Value: 6
  misc_feature: MA Experiment 20001807 PARAMETER Experiment Name: At_50mM_NH4NO3_L-to-H_Sub_P Parameter: Tissue Value: Leaf
  misc_feature: MA Experiment 20001807 PARAMETER Experiment Name: At_50mM_NH4NO3_L-to-H_Sub_P Parameter: Treatment Value: 50mM NH4NO3 vs 100mM Mannitol
aaaatatccaattttttcattgaaaatacaaactttcattccaaaaaaaaacctcaatacacaaaaaaccaaaaaaacatataacgttggcaaaaatactaaaaacattttttaaaagataaagcaataaaaaagtatacaaacaaattaacaagaaggagagctctcactataaaacagagcacatgttcttctcactaaccactcaacagagaagcaaaagaaaaaaaagctattgtttgaaagaagaagaagttaactatggcaaaggatgtggaagccgttcccggagaaggatttcagacaagagactatcaagatccgccaccagctccgtttattgatggagcggagctaaagaagtggtctttctacagagcagttatcgccgagttcgtagccactctcctcttcttatacatcaccgttttgacagtcatcggttacaagattcagtccgatactgatgccggtggcgtagattgcggcggagttggaatcctcggtatcgcttgggcctttggtggtatgatcttcatcctcgtctactgcaccgccggtatctctggtggtcacattaacccagcggtgacatttgggctattcttggcacgtaaagtgtcgttacctagggccctattgtacataatcgctcagtgtttgggtgcgatttgtggagttggttttgtcaaagccttccaaagctcttactacacccgttacggaggtggagccaactctctagccgatggctacagcacagggaccggtttagccgcagagatcattggtactttcgttcttgtctacactgtcttctctgccactgaccccaaacgtagtgctagagactcccacgttccggtgttggcgccacttccaatcggatttgccgtgttcatggtacatttggctaccattcccattaccggaaccggaattaacccggcaaggagtttcggagctgccgtaatctacaacaagagcaagccatgggatgaccactggatattttgggttggaccattcattggagctgcgatagctgcattctaccaccaattcgttctgagagcttcaggttctaagtctctcggatcattcagaagtgctgccaacgtctaaacacaccaaaccagatttctcaagaataaatgaagttgtaatctctctgtacaaaatctaaatcagtcactttgcagttttcatttccctttcttatatttgtgttgtccacttgctcttttgtgaattttccttcggtgtaattgttttttctttcgcttttaatcgagtgattggaattataatcaatgaaatcaaagaggttcttattgccttgtgtttacatt

SEQ ID NO: 24770 - protein, 287 aa, Arabidopsis thaliana
  peptide (1)..(287): Ceres Seq. ID no. 15222965
  misc_feature (31)..(266): Pfam Name: Major intrinsic protein Pfam Description: Major intrinsic protein
  misc_feature (1)..(285): Homolog of NCBI NO: 5081423 NR Description: plasma membrane intrinsic protein 2 [Brassica
  misc_feature (1)..(285): Homolog of NCBI NO: 7209560 NR Description: Plasma membrane aquaporin 2b [Raphanus sativus]
  misc_feature (1)..(287): Homolog of NCBI NO: 21537097 NR Description: aquaporin (plasma membrane intrinsic protein 2C)
  misc_feature (1)..(287): Homolog of NCBI NO: 15228096 NR Description: plasma membrane intrinsic protein 2C [Arabidopsis
  misc_feature (1)..(287): Homolog of NCBI NO: 629543 NR Description: plasma membrane intrinsic protein 2b -
  misc_feature (1)..(287): Homolog of NCBI NO: 21554356 NR Description: aquaporin (plasma membrane intrinsic protein 2B)
  misc_feature (1)..(287): Homolog of NCBI NO: 15228095 NR Description: plasma membrane intrinsic protein 2B, putative
  misc_feature (1)..(287): Homolog of NCBI NO: 3551133 NR Description: Plasma membrane aquaporin (PAQ2) [Raphanus
  misc_feature (1)..(287): Homolog of NCBI NO: 5081421 NR Description: plasma membrane intrinsic protein 1 [Brassica
  misc_feature (1)..(287): Homolog of NCBI NO: 15231810 NR Description: plasma membrane intrinsic protein 2A [Arabidopsis
MAKDVEAVPGEGFQTRDYQDPPPAPFIDGAELKKWSFYRAVIAEFVATLLFLYITVLTVIGYKIQSDTDAGGVDCGGVGILGIAWAFGGMIFILVYCTAGISGGHINPAVTFGLFLARKVSLPRALLYIIAQCLGAICGVGFVKAFQSSYYTRYGGGANSLADGYSTGTGLAAEIIGTFVLVYTVFSATDPKRSARDSHVPVLAPLPIGFAVFMVHLATIPITGTGINPARSFGAAVIYNKSKPWDDHWIFWVGPFIGAAIAAFYHQFVLRASGSKSLGSFRSAANV

SEQ ID NO: 24771 - protein, 198 aa, Arabidopsis thaliana
  peptide (1)..(198): Ceres Seq. ID no. 15222966
  misc_feature (1)..(177): Pfam Name: Major intrinsic protein Pfam Description: Major intrinsic protein
  misc_feature (1)..(196): Homolog of NCBI NO: 5081423 NR Description: plasma membrane intrinsic protein 2 [Brassica
  misc_feature (1)..(196): Homolog of NCBI NO: 7209560 NR Description: Plasma membrane aquaporin 2b [Raphanus sativus]
  misc_feature (1)..(198): Homolog of NCBI NO: 21537097 NR Description: aquaporin (plasma membrane intrinsic protein 2C)
  misc_feature (1)..(198): Homolog of NCBI NO: 15228096 NR Description: plasma membrane intrinsic protein 2C [Arabidopsis
  misc_feature (1)..(198): Homolog of NCBI NO: 629543 NR Description: plasma membrane intrinsic protein 2b -
  misc_feature (1)..(198): Homolog of NCBI NO: 21554356 NR Description: aquaporin (plasma membrane intrinsic protein 2B)
  misc_feature (1)..(198): Homolog of NCBI NO: 15228095 NR Description: plasma membrane intrinsic protein 2B, putative
  misc_feature (1)..(198): Homolog of NCBI NO: 3551133 NR Description: Plasma membrane aquaporin (PAQ2) [Raphanus
  misc_feature (1)..(198): Homolog of NCBI NO: 5081421 NR Description: plasma membrane intrinsic protein 1 [Brassica
  misc_feature (1)..(198): Homolog of NCBI NO: 15231810 NR Description: plasma membrane intrinsic protein 2A [Arabidopsis
MIFILVYCTAGISGGHINPAVTFGLFLARKVSLPRALLYIIAQCLGAICGVGFVKAFQSSYYTRYGGGANSLADGYSTGTGLAAEIIGTFVLVYTVFSATDPKRSARDSHVPVLAPLPIGFAVFMVHLATIPITGTGINPARSFGAAVIYNKSKPWDDHWIFWVGPFIGAAIAAFYHQFVLRASGSKSLGSFRSAANV

SEQ ID NO: 24772 - DNA, 1203 bp, Arabidopsis thaliana
  misc_feature (1)..(1203): Ceres Seq. ID no. 12394770
  misc_feature: MA Experiment ID: 108434 Result: Up-regulated in Transcription
  misc_feature: MA Experiment 108434 PARAMETER Experiment Name: At_Root_Tips_cDNA_P Parameter: Tissue Value: Root Tips
  misc_feature: MA Experiment ID: 108435 Result: Up-regulated in Transcription
  misc_feature: MA Experiment 108435 PARAMETER Experiment Name: At_stm_Mutants_cDNA_P Parameter: Plant Line Value: wt Landsburg vs stm
  misc_feature: MA Experiment 108435 PARAMETER Experiment Name: At_stm_Mutants_cDNA_P Parameter: Tissue Value: Shoot Apical Meristem Region
  misc_feature: MA Experiment ID: 108462 Result: Down-regulated in Transcription
  misc_feature: MA Experiment 108462 PARAMETER Experiment Name: At_Germinating_Seeds_cDNA_P Parameter: Age (day) Value: 2 vs. 0
  misc_feature: MA Experiment 108462 PARAMETER Experiment Name: At_Germinating_Seeds_cDNA_P Parameter: Tissue Value: Germinating Seeds
  misc_feature: MA Experiment ID: 20000184 Result: Up-regulated in Transcription
  misc_feature: MA Experiment 20000184 PARAMETER Experiment Name: At_Shoots__P Parameter: Age (day) Value: 7
  misc_feature: MA Experiment 20000184 PARAMETER Experiment Name: At_Shoots__P Parameter: Tissue Value: Shoots vs. Whole Plant
  misc_feature: MA Experiment ID: 20000234 Result: Up-regulated in Transcription
  misc_feature: MA Experiment 20000234 PARAMETER Experiment Name: At_Siliques_P Parameter: Age (day) Value: 21
  misc_feature: MA Experiment 20000234 PARAMETER Experiment Name: At_Siliques_P Parameter: Organism Value: A. thaliana
  misc_feature: MA Experiment 20000234 PARAMETER Experiment Name: At_Siliques_P Parameter: Plant Line Value: WS
  misc_feature: MA Experiment 20000234 PARAMETER Experiment Name: At_Siliques_P Parameter: Tissue Value: Less Than 5mm Siliques vs. Whole Plant
  misc_feature: MA Experiment ID: 20000264 Result: Up-regulated in Transcription
  misc_feature: MA Experiment 20000264 PARAMETER Experiment Name: At_Open_Flower_P Parameter: Age (day) Value: 21
  misc_feature: MA Experiment 20000264 PARAMETER Experiment Name: At_Open_Flower_P Parameter: Plant Line Value: WS
  misc_feature: MA Experiment 20000264 PARAMETER Experiment Name: At_Open_Flower_P Parameter: Tissue Value: Open Flower vs. Whole Plant
  misc_feature: MA Experiment ID: 20000265 Result: Up-regulated in Transcription
  misc_feature: MA Experiment 20000265 PARAMETER Experiment Name: At_Open_Flower_P Parameter: Age (day) Value: 21
  misc_feature: MA Experiment 20000265 PARAMETER Experiment Name: At_Open_Flower_P Parameter: Plant Line Value: WS
  misc_feature: MA Experiment 20000265 PARAMETER Experiment Name: At_Open_Flower_P Parameter: Tissue Value: Closed Flower vs. Whole Plant
  misc_feature: MA Experiment ID: 20000436 Result: Down-regulated in Transcription
  misc_feature: MA Experiment 20000436 PARAMETER Experiment Name: At_Drought_P Parameter: Age (day) Value: 7
  misc_feature: MA Experiment 20000436 PARAMETER Experiment Name: At_Drought_P Parameter: Organism Value: A. thaliana
  misc_feature: MA Experiment 20000436 PARAMETER Experiment Name: At_Drought_P Parameter: Plant Line Value: WS
  misc_feature: MA Experiment 20000436 PARAMETER Experiment Name: At_Drought_P Parameter: Timepoint (hr) Value: 12
  misc_feature: MA Experiment 20000436 PARAMETER Experiment Name: At_Drought_P Parameter: Tissue Value: Whole Plant
  misc_feature: MA Experiment 20000436 PARAMETER Experiment Name: At_Drought_P Parameter: Treatment Value: Drought vs. No Drought
  misc_feature: MA Experiment ID: 20000437 Result: Down-regulated in Transcription
  misc_feature: MA Experiment 20000437 PARAMETER Experiment Name: At_Drought_P Parameter: Age (day) Value: 8
  misc_feature: MA Experiment 20000437 PARAMETER Experiment Name: At_Drought_P Parameter: Organism Value: A. thaliana
  misc_feature: MA Experiment 20000437 PARAMETER Experiment Name: At_Drought_P Parameter: Plant Line Value: WS
  misc_feature: MA Experiment 20000437 PARAMETER Experiment Name: At_Drought_P Parameter: Timepoint (hr) Value: 24
  misc_feature: MA Experiment 20000437 PARAMETER Experiment Name: At_Drought_P Parameter: Tissue Value: Whole Plant
  misc_feature: MA Experiment 20000437 PARAMETER Experiment Name: At_Drought_P Parameter: Treatment Value: Drought vs. No Drought
  misc_feature: MA Experiment ID: 20000453 Result: Down-regulated in Transcription
  misc_feature: MA Experiment 20000453 PARAMETER Experiment Name: At_100uM_ABA_P Parameter: Age (day) Value: 15
  misc_feature: MA Experiment 20000453 PARAMETER Experiment Name: At_100uM_ABA_P Parameter: Organism Value: A. thaliana
  misc_feature: MA Experiment 20000453 PARAMETER Experiment Name: At_100uM_ABA_P Parameter: Plant Line Value: WS
  misc_feature: MA Experiment 20000453 PARAMETER Experiment Name: At_100uM_ABA_P Parameter: Timepoint (hr) Value: 24
  misc_feature: MA Experiment 20000453 PARAMETER Experiment Name: At_100uM_ABA_P Parameter: Tissue Value: Aerial
  misc_feature: MA Experiment 20000453 PARAMETER Experiment Name: At_100uM_ABA_P Parameter: Treatment Value: 100uM ABA vs. No Treatment
  misc_feature: MA Experiment ID: 20000794 Result: Down-regulated in Transcription
  misc_feature: MA Experiment 20000794 PARAMETER Experiment Name: At_Petals_P Parameter: Age (day) Value: 23-25 days
  misc_feature: MA Experiment 20000794 PARAMETER Experiment Name: At_Petals_P Parameter: Plant Line Value: WS
  misc_feature: MA Experiment 20000794 PARAMETER Experiment Name: At_Petals_P Parameter: Tissue Value: Petals vs. Whole plant
  misc_feature: MA Experiment ID: 20001451 Result: Down-regulated in Transcription
  misc_feature: MA Experiment 20001451 PARAMETER Experiment Name: At_Far-red-induction_P Parameter: Age (day) Value: 7
  misc_feature: MA Experiment 20001451 PARAMETER Experiment Name: At_Far-red-induction_P Parameter: Light Value: Far-red vs. White
  misc_feature: MA Experiment 20001451 PARAMETER Experiment Name: At_Far-red-induction_P Parameter: Organism Value: A. thaliana
  misc_feature: MA Experiment 20001451 PARAMETER Experiment Name: At_Far-red-induction_P Parameter: Plant Line Value: Columbia
  misc_feature: MA Experiment 20001451 PARAMETER Experiment Name: At_Far-red-induction_P Parameter: Timepoint (hr) Value: 24
  misc_feature: MA Experiment 20001451 PARAMETER Experiment Name: At_Far-red-induction_P Parameter: Tissue Value: Whole Plant
  misc_feature: MA Experiment ID: 20001458 Result: Up-regulated in Transcription
  misc_feature: MA Experiment 20001458 PARAMETER Experiment Name: At_50mM_NH4NO3_L-to-H_P Parameter: Age (day) Value: Undefined
  misc_feature: MA Experiment 20001458 PARAMETER Experiment Name: At_50mM_NH4NO3_L-to-H_P Parameter: Organism Value: Undefined
  misc_feature: MA Experiment 20001458 PARAMETER Experiment Name: At_50mM_NH4NO3_L-to-H_P Parameter: Plant Line Value: Undefined
  misc_feature: MA Experiment 20001458 PARAMETER Experiment Name: At_50mM_NH4NO3_L-to-H_P Parameter: Timepoint (hr) Value: 2
  misc_feature: MA Experiment 20001458 PARAMETER Experiment Name: At_50mM_NH4NO3_L-to-H_P Parameter: Tissue Value: Siliques
  misc_feature: MA Experiment 20001458 PARAMETER Experiment Name: At_50mM_NH4NO3_L-to-H_P Parameter: Treatment Value: 50mM NH4NO3 vs. 100mM Manitol
  misc_feature: MA Experiment ID: 20001557 Result: Up-regulated in Transcription
  misc_feature: MA Experiment 20001557 PARAMETER Experiment Name: At_Drought_Soil_Dry_P Parameter: Age (day) Value: 27
  misc_feature: MA Experiment 20001557 PARAMETER Experiment Name: At_Drought_Soil_Dry_P Parameter: Organism Value: A. thaliana
  misc_feature: MA Experiment 20001557 PARAMETER Experiment Name: At_Drought_Soil_Dry_P Parameter: Plant Line Value: WS
  misc_feature: MA Experiment 20001557 PARAMETER Experiment Name: At_Drought_Soil_Dry_P Parameter: Post Timepoint (hr) Value: 3
  misc_feature: MA Experiment 20001557 PARAMETER Experiment Name: At_Drought_Soil_Dry_P Parameter: Post-Treatment Value: Re-Water vs. No Drought
  misc_feature: MA Experiment 20001557 PARAMETER Experiment Name: At_Drought_Soil_Dry_P Parameter: Timepoint (day) Value: 13
  misc_feature: MA Experiment 20001557 PARAMETER Experiment Name: At_Drought_Soil_Dry_P Parameter: Treatment Value: Drought vs. No Drought
  misc_feature: MA Experiment ID: 20001558 Result: Up-regulated in Transcription
  misc_feature: MA Experiment 20001558 PARAMETER Experiment Name: At_Drought_Soil_Dry_P Parameter: Age (day) Value: 27
  misc_feature: MA Experiment 20001558 PARAMETER Experiment Name: At_Drought_Soil_Dry_P Parameter: Organism Value: A. thaliana
  misc_feature: MA Experiment 20001558 PARAMETER Experiment Name: At_Drought_Soil_Dry_P Parameter: Plant Line Value: WS
  misc_feature: MA Experiment 20001558 PARAMETER Experiment Name: At_Drought_Soil_Dry_P Parameter: Post Timepoint (hr) Value: 6
  misc_feature: MA Experiment 20001558 PARAMETER Experiment Name: At_Drought_Soil_Dry_P Parameter: Post-Treatment Value: Re-Water vs. No Drought
  misc_feature: MA Experiment 20001558 PARAMETER Experiment Name: At_Drought_Soil_Dry_P Parameter: Timepoint (day) Value: 13
  misc_feature: MA Experiment 20001558 PARAMETER Experiment Name: At_Drought_Soil_Dry_P Parameter: Treatment Value: Drought vs. No Drought
  misc_feature: MA Experiment ID: 20001560 Result: Up-regulated in Transcription
  misc_feature: MA Experiment 20001560 PARAMETER Experiment Name: At_Drought_Soil_Dry_P Parameter: Age (day) Value: 28
  misc_feature: MA Experiment 20001560 PARAMETER Experiment Name: At_Drought_Soil_Dry_P Parameter: Organism Value: A. thaliana
  misc_feature: MA Experiment 20001560 PARAMETER Experiment Name: At_Drought_Soil_Dry_P Parameter: Plant Line Value: WS
  misc_feature: MA Experiment 20001560 PARAMETER Experiment Name: At_Drought_Soil_Dry_P Parameter: Post Timepoint (hr) Value: None
  misc_feature: MA Experiment 20001560 PARAMETER Experiment Name: At_Drought_Soil_Dry_P Parameter: Post-Treatment Value: None
  misc_feature: MA Experiment 20001560 PARAMETER Experiment Name: At_Drought_Soil_Dry_P Parameter: Timepoint (day) Value: 14
  misc_feature: MA Experiment 20001560 PARAMETER Experiment Name: At_Drought_Soil_Dry_P Parameter: Treatment Value: Drought vs. No Drought
  misc_feature: MA Experiment ID: 20001757 Result: Up-regulated in Transcription
  misc_feature: MA Experiment 20001757 PARAMETER Experiment Name: At_50mM_NH4NO3_L-to-H_P Parameter: Timepoint (hr) Value: 6
  misc_feature: MA Experiment 20001757 PARAMETER Experiment Name: At_50mM_NH4NO3_L-to-H_P Parameter: Tissue Value: Leaf
  misc_feature: MA Experiment 20001757 PARAMETER Experiment Name: At_50mM_NH4NO3_L-to-H_P Parameter: Treatment Value: 50mM NH4NO3 vs 100mM Mannitol
  misc_feature: MA Experiment ID: 20001911 Result: Down-regulated in Transcription
  misc_feature: MA Experiment 20001911 PARAMETER Experiment Name: At_Drought_Reproduction_P Parameter: Age (day) Value: 40
  misc_feature: MA Experiment 20001911 PARAMETER Experiment Name: At_Drought_Reproduction_P Parameter: Organism Value: A. thaliana
  misc_feature: MA Experiment 20001911 PARAMETER Experiment Name: At_Drought_Reproduction_P Parameter: Plant Line Value: WS
  misc_feature: MA Experiment 20001911 PARAMETER Experiment Name: At_Drought_Reproduction_P Parameter: Timepoint (day) Value: 10
  misc_feature: MA Experiment 20001911 PARAMETER Experiment Name: At_Drought_Reproduction_P Parameter: Tissue Value: Flowers
  misc_feature: MA Experiment 20001911 PARAMETER Experiment Name: At_Drought_Reproduction_P Parameter: Treatment Value: Drought vs. No Drought
tttttgccctctcccatttttgtcgccgaaaccctaaatctcgacctcaaaccctgaaccatggctgaaggactcgtgttgaaaggcacaatgtgtgcccacactgatatggtcaccgccattgctacaccggtcgataactccgacgtgattgtaacttcgtcgcgtgacaaatcaatcatcctctggaaactcacaaaggaagacaagtcatacggtgttgctcagcggaggatgactggtcactctcacttcgttcaagacgttgttctctcctccgatggacaattcgctctctccggatcttgggacggtgagcttcgtctctgggatctcgctaccggagaatctactcgtcgtttcgttggtcacacgaaagatgttctctctgttgctttctctaccgataaccgtcagatcgtctctgcttctcgtgatcgtacgattaagctttggaacacgcttggtgagtgtaagtataccatctctgaagctgatggtcacaaggaatgggttagttgtgttaggtttagtcctaatactcttgtgccaactattgtatctgcttcttgggataaaactgtgaaggtctggaatcttcagaattgtaagcttaggaacactcttgctggtcactctggttacttgaacactgtggctgtgtcacctgatggttcgttgtgtgccagtggtggcaaagatggtgtgatcttgctttgggatttggctgaagggaagaagttgtattctcttgaagctggctctattattcattcactttgcttcagtcccaataggtactggttgtgtgcagcaacagagaatagcattaggatttgggatctcgagagtaagtctgttgttgaggatttgaaggttgatcttaaggctgaggctgaaaagactgatggttctactggaatcggaaacaagaccaaggtgatctactgcacaagcttgaactggagtgcagatggaaacactttgttcagtggatacactcatggagttatcagggtttggggtattggtcgttactagagagacaagaagtttctttattctctccaaatttttccatcgactctaaagtcttctcttctgaattagtgttttgaggatttattttttgttcttttctattttcagaatccacaaatgtgatattttgatacattgattttgtttcatatttgttttctc

SEQ ID NO: 24773 - protein, 326 aa, Arabidopsis thaliana
  peptide (1)..(326): Ceres Seq. ID no. 12394771
  misc_feature (1)..(326): Homolog of NCBI NO: 3023857 NR Description: GUANINE NUCLEOTIDE-BINDING PROTEIN BETA
  misc_feature (1)..(326): Homolog of NCBI NO: 2289095 NR Description: WD-40 repeat protein [Arabidopsis thaliana]
  misc_feature (1)..(326): Homolog of NCBI NO: 15220941 NR Description: G-protein beta family
  misc_feature (1)..(326): Homolog of NCBI NO: 15229589 NR Description: protein kinase C-receptor/G-protein, putative
  misc_feature (1)..(326): Homolog of NCBI NO: 15221916 NR Description: guanine nucleotide-binding protein, putative
  misc_feature (1)..(326): Homolog of NCBI NO: 21593440 NR Description: guanine nucleotide-binding protein, putative
MAEGLVLKGTMCAHTDMVTAIATPVDNSDVIVTSSRDKSIILWKLTKEDKSYGVAQRRMTGHSHFVQDVVLSSDGQFALSGSWDGELRLWDLATGESTRRFVGHTKDVLSVAFSTDNRQIVSASRDRTIKLWNTLGECKYTISEADGHKEWVSCVRFSPNTLVPTIVSASWDKTVKVWNLQNCKLRNTLAGHSGYLNTVAVSPDGSLCASGGKDGVILLWDLAEGKKLYSLEAGSIIHSLCFSPNRYWLCAATENSIRIWDLESKSVVEDLKVDLKAEAEKTDGSTGIGNKTKVIYCTSLNWSADGNTLFSGYTHGVIRVWGIGRY

SEQ ID NO: 24774 - protein, 316 aa, Arabidopsis thaliana
  peptide (1)..(316): Ceres Seq. ID no. 12394772
  misc_feature (1)..(316): Homolog of NCBI NO: 3023857 NR Description: GUANINE NUCLEOTIDE-BINDING PROTEIN BETA
  misc_feature (1)..(316): Homolog of NCBI NO: 2289095 NR Description: WD-40 repeat protein [Arabidopsis thaliana]
  misc_feature (1)..(316): Homolog of NCBI NO: 15220941 NR Description: G-protein beta family
  misc_feature (1)..(316): Homolog of NCBI NO: 15229589 NR Description: protein kinase C-receptor/G-protein, putative
  misc_feature (1)..(316): Homolog of NCBI NO: 15221916 NR Description: guanine nucleotide-binding protein, putative
  misc_feature (1)..(316): Homolog of NCBI NO: 21593440 NR Description: guanine nucleotide-binding protein, putative
MCAHTDMVTAIATPVDNSDVIVTSSRDKSIILWKLTKEDKSYGVAQRRMTGHSHFVQDVVLSSDGQFALSGSWDGELRLWDLATGESTRRFVGHTKDVLSVAFSTDNRQIVSASRDRTIKLWNTLGECKYTISEADGHKEWVSCVRFSPNTLVPTIVSASWDKTVKVWNLQNCKLRNTLAGHSGYLNTVAVSPDGSLCASGGKDGVILLWDLAEGKKLYSLEAGSIIHSLCFSPNRYWLCAATENSIRIWDLESKSVVEDLKVDLKAEAEKTDGSTGIGNKTKVIYCTSLNWSADGNTLFSGYTHGVIRVWGIGRY

SEQ ID NO: 24775 - protein, 310 aa, Arabidopsis thaliana
  peptide (1)..(310): Ceres Seq. ID no. 12394773
  misc_feature (1)..(310): Homolog of NCBI NO: 3023857 NR Description: GUANINE NUCLEOTIDE-BINDING PROTEIN BETA
  misc_feature (1)..(310): Homolog of NCBI NO: 2289095 NR Description: WD-40 repeat protein [Arabidopsis thaliana]
  misc_feature (1)..(310): Homolog of NCBI NO: 15220941 NR Description: G-protein beta family
  misc_feature (1)..(310): Homolog of NCBI NO: 15229589 NR Description: protein kinase C-receptor/G-protein, putative
  misc_feature (1)..(310): Homolog of NCBI NO: 15221916 NR Description: guanine nucleotide-binding protein, putative
  misc_feature (1)..(310): Homolog of NCBI NO: 21593440 NR Description: guanine nucleotide-binding protein, putative
MVTAIATPVDNSDVIVTSSRDKSIILWKLTKEDKSYGVAQRRMTGHSHFVQDVVLSSDGQFALSGSWDGELRLWDLATGESTRRFVGHTKDVLSVAFSTDNRQIVSASRDRTIKLWNTLGECKYTISEADGHKEWVSCVRFSPNTLVPTIVSASWDKTVKVWNLQNCKLRNTLAGHSGYLNTVAVSPDGSLCASGGKDGVILLWDLAEGKKLYSLEAGSIIHSLCFSPNRYWLCAATENSIRIWDLESKSVVEDLKVDLKAEAEKTDGSTGIGNKTKVIYCTSLNWSADGNTLFSGYTHGVIRVWGIGRY

SEQ ID NO: 24776 - DNA, 873 bp, Arabidopsis thaliana; identical to SEQ ID NO: 22479
  misc_feature (1)..(873): Ceres Seq. ID no. 13493860
  misc_feature: MA Experiment ID: 108462 Result: Up-regulated in Transcription
  misc_feature: MA Experiment 108462 PARAMETER Experiment Name: At_Germinating_Seeds_cDNA_P Parameter: Age (day) Value: 2 vs. 0
  misc_feature: MA Experiment 108462 PARAMETER Experiment Name: At_Germinating_Seeds_cDNA_P Parameter: Tissue Value: Germinating Seeds
  misc_feature: MA Experiment ID: 108464 Result: Up-regulated in Transcription
  misc_feature: MA Experiment 108464 PARAMETER Experiment Name: At_Germinating_Seeds_cDNA_P Parameter: Age (day) Value: 4 vs. 0
  misc_feature: MA Experiment 108464 PARAMETER Experiment Name: At_Germinating_Seeds_cDNA_P Parameter: Tissue Value: Germinating Seeds
  misc_feature: MA Experiment ID: 20000070 Result: Up-regulated in Transcription
  misc_feature: MA Experiment 20000070 PARAMETER Experiment Name: At_100uM_ABA_Mutants_cDNA_P Parameter: Plant Line Value: CS24
  misc_feature: MA Experiment 20000070 PARAMETER Experiment Name: At_100uM_ABA_Mutants_cDNA_P Parameter: Timepoint (hr) Value: 6
  misc_feature: MA Experiment 20000070 PARAMETER Experiment Name: At_100uM_ABA_Mutants_cDNA_P Parameter: Tissue Value: Aerial
  misc_feature: MA Experiment 20000070 PARAMETER Experiment Name: At_100uM_ABA_Mutants_cDNA_P Parameter: Treatment Value: 100uM ABA vs. No Treatment
  misc_feature: MA Experiment ID: 20000088 Result: Up-regulated in Transcription
  misc_feature: MA Experiment 20000088 PARAMETER Experiment Name: At_100uM_ABA_Mutants_cDNA_P Parameter: Plant Line Value: Landsberg
  misc_feature: MA Experiment 20000088 PARAMETER Experiment Name: At_100uM_ABA_Mutants_cDNA_P Parameter: Timepoint (hr) Value: 6
  misc_feature: MA Experiment 20000088 PARAMETER Experiment Name: At_100uM_ABA_Mutants_cDNA_P Parameter: Tissue Value: Aerial
  misc_feature: MA Experiment 20000088 PARAMETER Experiment Name: At_100uM_ABA_Mutants_cDNA_P Parameter: Treatment Value: 100uM ABA vs. No Treatment
  misc_feature: MA Experiment ID: 20000090 Result: Up-regulated in Transcription
  misc_feature: MA Experiment ID: 20000173 Result: Down-regulated in Transcription
  misc_feature: MA Experiment 20000173 PARAMETER Experiment Name: At_42deg_Heat_P Parameter: Age (day) Value: 14
  misc_feature: MA Experiment 20000173 PARAMETER Experiment Name: At_42deg_Heat_P Parameter: Organism Value: A. thaliana
  misc_feature: MA Experiment 20000173 PARAMETER Experiment Name: At_42deg_Heat_P Parameter: Plant Line Value: WS
  misc_feature: MA Experiment 20000173 PARAMETER Experiment Name: At_42deg_Heat_P Parameter: Temperature (deg C) Value: 42 vs. 22
  misc_feature: MA Experiment 20000173 PARAMETER Experiment Name: At_42deg_Heat_P Parameter: Timepoint (hr) Value: 6
  misc_feature: MA Experiment 20000173 PARAMETER Experiment Name: At_42deg_Heat_P Parameter: Tissue Value: Aerial
  misc_feature: MA Experiment ID: 20000180 Result: Up-regulated in Transcription
  misc_feature: MA Experiment 20000180 PARAMETER Experiment Name: At_Germinating_Seeds_P Parameter: Age (hr) Value: 24 vs. 0
  misc_feature: MA Experiment 20000180 PARAMETER Experiment Name: At_Germinating_Seeds_P Parameter: Tissue Value: Germinating Seeds
  misc_feature: MA Experiment ID: 20000184 Result: Down-regulated in Transcription
  misc_feature: MA Experiment 20000184 PARAMETER Experiment Name: At_Shoots__P Parameter: Age (day) Value: 7
  misc_feature: MA Experiment 20000184 PARAMETER Experiment Name: At_Shoots__P Parameter: Tissue Value: Shoots vs. Whole Plant
  misc_feature: MA Experiment ID: 20000214 Result: Up-regulated in Transcription
  misc_feature: MA Experiment 20000214 PARAMETER Experiment Name: At_4deg_Cold_P Parameter: Timepoint (hr) Value: 6
  misc_feature: MA Experiment ID: 20000234 Result: Down-regulated in Transcription
  misc_feature: MA Experiment 20000234 PARAMETER Experiment Name: At_Siliques_P Parameter: Age (day) Value: 21
  misc_feature: MA Experiment 20000234 PARAMETER Experiment Name: At_Siliques_P Parameter: Organism Value: A. thaliana
  misc_feature: MA Experiment 20000234 PARAMETER Experiment Name: At_Siliques_P Parameter: Plant Line Value: WS
  misc_feature: MA Experiment 20000234 PARAMETER Experiment Name: At_Siliques_P Parameter: Tissue Value: Less Than 5mm Siliques vs. Whole Plant
  misc_feature: MA Experiment ID: 20000264 Result: Down-regulated in Transcription
  misc_feature: MA Experiment 20000264 PARAMETER Experiment Name: At_Open_Flower_P Parameter: Age (day) Value: 21
  misc_feature: MA Experiment 20000264 PARAMETER Experiment Name: At_Open_Flower_P Parameter: Plant Line Value: WS
  misc_feature: MA Experiment 20000264 PARAMETER Experiment Name: At_Open_Flower_P Parameter: Tissue Value: Open Flower vs. Whole Plant
  misc_feature: MA Experiment ID: 20000265 Result: Down-regulated in Transcription
  misc_feature: MA Experiment 20000265 PARAMETER Experiment Name: At_Open_Flower_P Parameter: Age (day) Value: 21
  misc_feature: MA Experiment 20000265 PARAMETER Experiment Name: At_Open_Flower_P Parameter: Plant Line Value: WS
  misc_feature: MA Experiment 20000265 PARAMETER Experiment Name: At_Open_Flower_P Parameter: Tissue Value: Closed Flower vs. Whole Plant
  misc_feature: MA Experiment ID: 20000286 Result: Down-regulated in Transcription
  misc_feature: MA Experiment 20000286 PARAMETER Experiment Name: At_Open_Flower_P Parameter: Age (day) Value: 21
  misc_feature: MA Experiment 20000286 PARAMETER Experiment Name: At_Open_Flower_P Parameter: Plant Line Value: WS
  misc_feature: MA Experiment 20000286 PARAMETER Experiment Name: At_Open_Flower_P Parameter: Tissue Value: Half Open vs. Whole Plant
  misc_feature: MA Experiment ID: 20000438 Result: Down-regulated in Transcription
  misc_feature: MA Experiment 20000438 PARAMETER Experiment Name: At_Shoots__P Parameter: Age (day) Value: 14
  misc_feature: MA Experiment 20000438 PARAMETER Experiment Name: At_Shoots__P Parameter: Tissue Value: Shoots vs. Whole Plant
  misc_feature: MA Experiment ID: 20001450 Result: Down-regulated in Transcription
  misc_feature: MA Experiment 20001450 PARAMETER Experiment Name: At_Far-red-induction_P Parameter: Age (day) Value: 7
  misc_feature: MA Experiment 20001450 PARAMETER Experiment Name: At_Far-red-induction_P Parameter: Light Value: Far-red vs. White
  misc_feature: MA Experiment 20001450 PARAMETER Experiment Name: At_Far-red-induction_P Parameter: Organism Value: A. thaliana
  misc_feature: MA Experiment 20001450 PARAMETER Experiment Name: At_Far-red-induction_P Parameter: Plant Line Value: Columbia
  misc_feature: MA Experiment 20001450 PARAMETER Experiment Name: At_Far-red-induction_P Parameter: Timepoint (hr) Value: 8
  misc_feature: MA Experiment 20001450 PARAMETER Experiment Name: At_Far-red-induction_P Parameter: Tissue Value: Whole Plant
  misc_feature: MA Experiment ID: 20001451 Result: Down-regulated in Transcription
  misc_feature: MA Experiment 20001451 PARAMETER Experiment Name: At_Far-red-induction_P Parameter: Age (day) Value: 7
  misc_feature: MA Experiment 20001451 PARAMETER Experiment Name: At_Far-red-induction_P Parameter: Light Value: Far-red vs. White
  misc_feature: MA Experiment 20001451 PARAMETER Experiment Name: At_Far-red-induction_P Parameter: Organism Value: A. thaliana
  misc_feature: MA Experiment 20001451 PARAMETER Experiment Name: At_Far-red-induction_P Parameter: Plant Line Value: Columbia
  misc_feature: MA Experiment 20001451 PARAMETER Experiment Name: At_Far-red-induction_P Parameter: Timepoint (hr) Value: 24
  misc_feature: MA Experiment 20001451 PARAMETER Experiment Name: At_Far-red-induction_P Parameter: Tissue Value: Whole Plant

SEQ ID NO: 24777 - protein, 215 aa, Arabidopsis thaliana; identical to SEQ ID NO: 22480
  peptide (1)..(215): Ceres Seq. ID no. 13493861
  misc_feature (3)..(75): Pfam Name: Glutathione S-transferase, N-terminal domain Pfam Description: Glutathione S-transferase, N-terminal domain
  misc_feature (3)..(75): Pfam Name: Glutathione S-transferase, N-terminal domain Pfam Description: Glutathione S-transferase, N-terminal domain
  misc_feature (1)..(214): Homolog of NCBI NO: 2462929 NR Description: glutathione transferase [Arabidopsis thaliana]
  misc_feature (1)..(214): Homolog of NCBI NO: 15224581 NR Description: glutathione transferase, putative [Arabidopsis
  misc_feature (1)..(214): Homolog of NCBI NO: 15224581 NR Description: glutathione transferase, putative [Arabidopsis
  misc_feature (1)..(215): Homolog of NCBI NO: 15224582 NR Description: glutathione transferase, putative [Arabidopsis
  misc_feature (1)..(214): Homolog of NCBI NO: 2462929 NR Description: glutathione transferase [Arabidopsis thaliana]
  misc_feature (1)..(215): Homolog of NCBI NO: 15224582 NR Description: glutathione transferase, putative [Arabidopsis

SEQ ID NO: 24778 - protein, 181 aa, Arabidopsis thaliana; identical to SEQ ID NO: 22481
  peptide (1)..(181): Ceres Seq. ID no. 13493862
  misc_feature (1)..(180): Homolog of NCBI NO: 2462929 NR Description: glutathione transferase [Arabidopsis thaliana]
  misc_feature (1)..(180): Homolog of NCBI NO: 15224581 NR Description: glutathione transferase, putative [Arabidopsis
  misc_feature (1)..(181): Homolog of NCBI NO: 15224582 NR Description: glutathione transferase, putative [Arabidopsis
  misc_feature (1)..(180): Homolog of NCBI NO: 2462929 NR Description: glutathione transferase [Arabidopsis thaliana]
  misc_feature (1)..(180): Homolog of NCBI NO: 15224581 NR Description: glutathione transferase, putative [Arabidopsis
  misc_feature (1)..(181): Homolog of NCBI NO: 15224582 NR Description: glutathione transferase, putative [Arabidopsis

SEQ ID NO: 24779 - protein, 146 aa, Arabidopsis thaliana; identical to SEQ ID NO: 22482
  peptide (1)..(146): Ceres Seq. ID no. 13493863
  misc_feature (1)..(145): Homolog of NCBI NO: 2462929 NR Description: glutathione transferase [Arabidopsis thaliana]
  misc_feature (1)..(145): Homolog of NCBI NO: 15224581 NR Description: glutathione transferase, putative [Arabidopsis
  misc_feature (1)..(146): Homolog of NCBI NO: 15224582 NR Description: glutathione transferase, putative [Arabidopsis
  misc_feature (1)..(145): Homolog of NCBI NO: 2462929 NR Description: glutathione transferase [Arabidopsis thaliana]
  misc_feature (1)..(145): Homolog of NCBI NO: 15224581 NR Description: glutathione transferase, putative [Arabidopsis
  misc_feature (1)..(146): Homolog of NCBI NO: 15224582 NR Description: glutathione transferase, putative [Arabidopsis

SEQ ID NO: 24780 - DNA, 1516 bp, Arabidopsis thaliana
  misc_feature (1)..(1516): Ceres Seq. ID no. 12335216
  misc_feature: MA Experiment ID: 20000069 Result: Down-regulated in Transcription
  misc_feature: MA Experiment 20000069 PARAMETER Experiment Name: At_100uM_ABA_Mutants_cDNA_P Parameter: Plant Line Value: CS23
  misc_feature: MA Experiment 20000069 PARAMETER Experiment Name: At_100uM_ABA_Mutants_cDNA_P Parameter: Timepoint (hr) Value: 6
  misc_feature: MA Experiment 20000069 PARAMETER Experiment Name: At_100uM_ABA_Mutants_cDNA_P Parameter: Tissue Value: Aerial
  misc_feature: MA Experiment 20000069 PARAMETER Experiment Name: At_100uM_ABA_Mutants_cDNA_P Parameter: Treatment Value: 100uM ABA vs. No Treatment
  misc_feature: MA Experiment ID: 20000113 Result: Up-regulated in Transcription
  misc_feature: MA Experiment 20000113 PARAMETER Experiment Name: At_42deg_Heat_cDNA_P Parameter: Temperature (deg C) Value: 42 vs. 22
  misc_feature: MA Experiment 20000113 PARAMETER Experiment Name: At_42deg_Heat_cDNA_P Parameter: Timepoint (hr) Value: 8
  misc_feature: MA Experiment 20000113 PARAMETER Experiment Name: At_42deg_Heat_cDNA_P Parameter: Tissue Value: Aerial
  misc_feature: MA Experiment ID: 20000117 Result: Down-regulated in Transcription
  misc_feature: MA Experiment 20000117 PARAMETER Experiment Name: At_100uM_ABA_Mutants_cDNA_P Parameter: Plant Line Value: Columbia
  misc_feature: MA Experiment 20000117 PARAMETER Experiment Name: At_100uM_ABA_Mutants_cDNA_P Parameter: Timepoint (hr) Value: 6
  misc_feature: MA Experiment 20000117 PARAMETER Experiment Name: At_100uM_ABA_Mutants_cDNA_P Parameter: Tissue Value: Aerial
  misc_feature: MA Experiment 20000117 PARAMETER Experiment Name: At_100uM_ABA_Mutants_cDNA_P Parameter: Treatment Value: 100uM ABA vs. No Treatment
  misc_feature: MA Experiment ID: 20000171 Result: Up-regulated in Transcription
  misc_feature: MA Experiment 20000171 PARAMETER Experiment Name: At_42deg_Heat_P Parameter: Age (day) Value: 14
  misc_feature: MA Experiment 20000171 PARAMETER Experiment Name: At_42deg_Heat_P Parameter: Organism Value: A. thaliana
  misc_feature: MA Experiment 20000171 PARAMETER Experiment Name: At_42deg_Heat_P Parameter: Plant Line Value: WS
  misc_feature: MA Experiment 20000171 PARAMETER Experiment Name: At_42deg_Heat_P Parameter: Temperature (deg C) Value: 42 vs. 22
  misc_feature: MA Experiment 20000171 PARAMETER Experiment Name: At_42deg_Heat_P Parameter: Timepoint (hr) Value: 1
  misc_feature: MA Experiment 20000171 PARAMETER Experiment Name: At_42deg_Heat_P Parameter: Tissue Value: Aerial
  misc_feature: MA Experiment ID: 20000437 Result: Up-regulated in Transcription
  misc_feature: MA Experiment 20000437 PARAMETER Experiment Name: At_Drought_P Parameter: Age (day) Value: 8
  misc_feature: MA Experiment 20000437 PARAMETER Experiment Name: At_Drought_P Parameter: Organism Value: A. thaliana
  misc_feature: MA Experiment 20000437 PARAMETER Experiment Name: At_Drought_P Parameter: Plant Line Value: WS
  misc_feature: MA Experiment 20000437 PARAMETER Experiment Name: At_Drought_P Parameter: Timepoint (hr) Value: 24
  misc_feature: MA Experiment 20000437 PARAMETER Experiment Name: At_Drought_P Parameter: Tissue Value: Whole Plant
  misc_feature: MA Experiment 20000437 PARAMETER Experiment Name: At_Drought_P Parameter: Treatment Value: Drought vs. No Drought
  misc_feature: MA Experiment ID: 20000495 Result: Up-regulated in Transcription
  misc_feature: MA Experiment 20000495 PARAMETER Experiment Name: At_Guard_Cells_P Parameter: Harvest Date Value: 8/2/2002
  misc_feature: MA Experiment 20000495 PARAMETER Experiment Name: At_Guard_Cells_P Parameter: Organism Value: A. thaliana
  misc_feature: MA Experiment 20000495 PARAMETER Experiment Name: At_Guard_Cells_P Parameter: Tissue Value: Guard Cells vs. Leaves
  misc_feature: MA Experiment ID: 20001557 Result: Up-regulated in Transcription
  misc_feature: MA Experiment 20001557 PARAMETER Experiment Name: At_Drought_Soil_Dry_P Parameter: Age (day) Value: 27
  misc_feature: MA Experiment 20001557 PARAMETER Experiment Name: At_Drought_Soil_Dry_P Parameter: Organism Value: A. thaliana
  misc_feature: MA Experiment 20001557 PARAMETER Experiment Name: At_Drought_Soil_Dry_P Parameter: Plant Line Value: WS
  misc_feature: MA Experiment 20001557 PARAMETER Experiment Name: At_Drought_Soil_Dry_P Parameter: Post Timepoint (hr) Value: 3
  misc_feature: MA Experiment 20001557 PARAMETER Experiment Name: At_Drought_Soil_Dry_P Parameter: Post-Treatment Value: Re-Water vs. No Drought
  misc_feature: MA Experiment 20001557 PARAMETER Experiment Name: At_Drought_Soil_Dry_P Parameter: Timepoint (day) Value: 13
  misc_feature: MA Experiment 20001557 PARAMETER Experiment Name: At_Drought_Soil_Dry_P Parameter: Treatment Value: Drought vs. No Drought
aacttctagaaaaatcgccagaagtgacgaaattgaaaatctcagatttctcttaatcggcgacggagtaacgaaacaaggagaagaagaagaagaagaaaatgacgactcgaatcgctcctggtgttggagctaatcttctcggccaacactccgctgagaggaaccaagacgccactgtttacgtcggtggtctcgatgctcagctttctgaagaattgctttgggaattgttcgttcaagctggacctgttgttaatgtctatgtaccgaaagatagagtgacaaatcttcatcagaactatggattcattgaatatcgtagtgaggaagatgctgattatgcgattaaggttcttaacatgattaagctccacgggaagcctatacgtgttaacaaggcatctcaagataagaagagcctggatgttggtgctaaccttttcattggaaaccttgaccctgatgtggatgagaagctcttgtatgatactttcagtgcatttggtgtgattgcttctaatcctaagataatgagagatcccgatactggaaactcacgaggttttggtttcatcagctatgactcctttgaagcatctgatgctgctattgagtcaatgactggacaatatctcagtaatcgtcaaatcacagtctcttacgcatacaagaaagacaccaaaggagagcgccatggtactccagcagagaggcttttggcagccacaaatccaactgcccagaaaagcagaccccatacgctattcgcaatgggccctccatccagtgctcctcaagttaatggtctaccacgtccgtttgctaacggcagcatgcaacctgtcccgattcccgctccccgtcaaccaccaccacctcctccacaagtatatcaaactcagccaccatcctggccatctcagccacaacaacacagcatggtcccaccacccatgcaattccgtccacctcagggtatgcctccgccaccacctcctcagtttctaaatcaccaacaaggtttcggtggtccgaggccgccgccaccacctcaagccatgggaatgcaccaacatggaggatggccaccgcaacacatgcagcagcaaggtggaccaccacaacaacaacaaccaccataccaacaccatcacatgtctatgcctccaccaccaccacaccaaggttgataataatcatcgcctcagtttcggaccaattcaactatatgtaaaccctttctttactggcaagtaatcccgaggattttccgttttagattcaatgaaacctaatagggagagagagaaagagaaagagagagggtgagagagagatcacaattaatattctatattgtcttgtctgcagagaatctcttatcttcggtttagagagagagagagcgtagaaattagtgccaatgtgtgtctggtttttagtgatgttatttcttgtttgtgttgcagaatctctgatgccgtgtgctttaatatttaccaaaactgtgctg

SEQ ID NO: 24781 - protein, 363 aa, Arabidopsis thaliana
  peptide (1)..(363): Ceres Seq. ID no. 12335217
  misc_feature (27)..(98): Pfam Name: RNA recognition motif. (a.k.a. RRM, RBD, or RNP domain) Pfam Description: RNA recognition motif. (a.k.a. RRM, RBD, or RNP
  misc_feature (19)..(361): Homolog of NCBI NO: 38512254 NR Description: Spx-prov protein [Silurana tropicalis]
  misc_feature (19)..(360): Homolog of NCBI NO: 28374170 NR Description: Similar to splicing factor 3b, subunit 4, 49kD
  misc_feature (19)..(363): Homolog of NCBI NO: 24119253 NR Description: splicing factor 3b, subunit 4 [Danio rerio]
  misc_feature (19)..(363): Homolog of NCBI NO: 34193906 NR Description: Splicing factor 3b, subunit 4 [Danio rerio]
  misc_feature (54)..(339): Homolog of NCBI NO: 25411571 NR Description: probable spliceosome associated protein
  misc_feature (54)..(339): Homolog of NCBI NO: 22325678 NR Description: pre-mRNA splicing factor SF3b, putative; protein
  misc_feature (1)..(360): Homolog of NCBI NO: 37535012 NR Description: putative spliceosomal protein
  misc_feature (1)..(363): Homolog of NCBI NO: 21593441 NR Description: putative spliceosome associated protein
  misc_feature (1)..(363): Homolog of NCBI NO: 14334958 NR Description: putative spliceosome associated protein
  misc_feature (1)..(363): Homolog of NCBI NO: 15224186 NR Description: pre-mRNA splicing factor SF3b, putative
MTTRIAPGVGANLLGQHSAERNQDATVYVGGLDAQLSEELLWELFVQAGPVVNVYVPKDRVTNLHQNYGFIEYRSEEDADYAIKVLNMIKLHGKPIRVNKASQDKKSLDVGANLFIGNLDPDVDEKLLYDTFSAFGVIASNPKIMRDPDTGNSRGFGFISYDSFEASDAAIESMTGQYLSNRQITVSYAYKKDTKGERHGTPAERLLAATNPTAQKSRPHTLFAMGPPSSAPQVNGLPRPFANGSMQPVPIPAPRQPPPPPPQVYQTQPPSWPSQPQQHSMVPPPMQFRPPQGMPPPPPPQFLNHQQGFGGPRPPPPPQAMGMHQHGGWPPQHMQQQGGPPQQQQPPYQHHHMSMPPPPPHQG

SEQ ID NO: 24782 - protein, 276 aa, Arabidopsis thaliana
  peptide (1)..(276): Ceres Seq. ID no. 12335218
  misc_feature (165)..(274): Pfam Name: Extensin-like region Pfam Description: Extensin-like region
  misc_feature (1)..(274): Homolog of NCBI NO: 38512254 NR Description: Spx-prov protein [Silurana tropicalis]
  misc_feature (1)..(273): Homolog of NCBI NO: 28374170 NR Description: Similar to splicing factor 3b, subunit 4, 49kD
  misc_feature (1)..(276): Homolog of NCBI NO: 24119253 NR Description: splicing factor 3b, subunit 4 [Danio rerio]
  misc_feature (1)..(276): Homolog of NCBI NO: 34193906 NR Description: Splicing factor 3b, subunit 4 [Danio rerio]
  misc_feature (1)..(252): Homolog of NCBI NO: 25411571 NR Description: probable spliceosome associated protein
  misc_feature (1)..(252): Homolog of NCBI NO: 22325678 NR Description: pre-mRNA splicing factor SF3b, putative; protein
  misc_feature (1)..(273): Homolog of NCBI NO: 37535012 NR Description: putative spliceosomal protein
  misc_feature (1)..(276): Homolog of NCBI NO: 21593441 NR Description: putative spliceosome associated protein
  misc_feature (1)..(276): Homolog of NCBI NO: 14334958 NR Description: putative spliceosome associated protein
  misc_feature (1)..(276): Homolog of NCBI NO: 15224186 NR Description: pre-mRNA splicing factor SF3b, putative
MIKLHGKPIRVNKASQDKKSLDVGANLFIGNLDPDVDEKLLYDTFSAFGVIASNPKIMRDPDTGNSRGFGFISYDSFEASDAAIESMTGQYLSNRQITVSYAYKKDTKGERHGTPAERLLAATNPTAQKSRPHTLFAMGPPSSAPQVNGLPRPFANGSMQPVPIPAPRQPPPPPPQVYQTQPPSWPSQPQQHSMVPPPMQFRPPQGMPPPPPPQFLNHQQGFGGPRPPPPPQAMGMHQHGGWPPQHMQQQGGPPQQQQPPYQHHHMSMPPPPPHQG

SEQ ID NO: 24783 - protein, 219 aa, Arabidopsis thaliana
  peptide (1)..(219): Ceres Seq. ID no. 12335219
  misc_feature (108)..(217): Pfam Name: Extensin-like region Pfam Description: Extensin-like region
  misc_feature (1)..(219): Homolog of NCBI NO: 34193906 NR Description: Splicing factor 3b, subunit 4 [Danio rerio]
  misc_feature (1)..(195): Homolog of NCBI NO: 25411571 NR Description: probable spliceosome associated protein
  misc_feature (1)..(195): Homolog of NCBI NO: 22325678 NR Description: pre-mRNA splicing factor SF3b, putative; protein
  misc_feature (1)..(216): Homolog of NCBI NO: 37535012 NR Description: putative spliceosomal protein
  misc_feature (1)..(216): Homolog of NCBI NO: 28374170 NR Description: Similar to splicing factor 3b, subunit 4, 49kD
  misc_feature (1)..(219): Homolog of NCBI NO: 24119253 NR Description: splicing factor 3b, subunit 4 [Danio rerio]
  misc_feature (1)..(217): Homolog of NCBI NO: 38512254 NR Description: Spx-prov protein [Silurana tropicalis]
  misc_feature (1)..(219): Homolog of NCBI NO: 21593441 NR Description: putative spliceosome associated protein
  misc_feature (1)..(219): Homolog of NCBI NO: 14334958 NR Description: putative spliceosome associated protein
  misc_feature (1)..(219): Homolog of NCBI NO: 15224186 NR Description: pre-mRNA splicing factor SF3b, putative
MRDPDTGNSRGFGFISYDSFEASDAAIESMTGQYLSNRQITVSYAYKKDTKGERHGTPAERLLAATNPTAQKSRPHTLFAMGPPSSAPQVNGLPRPFANGSMQPVPIPAPRQPPPPPPQVYQTQPPSWPSQPQQHSMVPPPMQFRPPQGMPPPPPPQFLNHQQGFGGPRPPPPPQAMGMHQHGGWPPQHMQQQGGPPQQQQPPYQHHHMSMPPPPPHQG

SEQ ID NO: 24784 - DNA, 1234 bp, Arabidopsis thaliana
  misc_feature (1)..(1234): Ceres Seq. ID no. 12336108
  misc_feature: MA Experiment ID: 108434 Result: Up-regulated in Transcription
  misc_feature: MA Experiment 108434 PARAMETER Experiment Name: At_Root_Tips_cDNA_P Parameter: Tissue Value: Root Tips
  misc_feature: MA Experiment ID: 108461 Result: Up-regulated in Transcription
  misc_feature: MA Experiment 108461 PARAMETER Experiment Name: At_Germinating_Seeds_cDNA_P Parameter: Age (day) Value: 1 vs. 0
  misc_feature: MA Experiment 108461 PARAMETER Experiment Name: At_Germinating_Seeds_cDNA_P Parameter: Tissue Value: Germinating Seeds
  misc_feature: MA Experiment ID: 108462 Result: Up-regulated in Transcription
  misc_feature: MA Experiment 108462 PARAMETER Experiment Name: At_Germinating_Seeds_cDNA_P Parameter: Age (day) Value: 2 vs. 0
  misc_feature: MA Experiment 108462 PARAMETER Experiment Name: At_Germinating_Seeds_cDNA_P Parameter: Tissue Value: Germinating Seeds
  misc_feature: MA Experiment ID: 108595 Result: Down-regulated in Transcription
  misc_feature: MA Experiment 108595 PARAMETER Experiment Name: At_Ler-pi_Ovule_cDNA_P Parameter: Plant Line Value: null
  misc_feature: MA Experiment ID: 20000180 Result: Up-regulated in Transcription
  misc_feature: MA Experiment 20000180 PARAMETER Experiment Name: At_Germinating_Seeds_P Parameter: Age (hr) Value: 24 vs. 0
  misc_feature: MA Experiment 20000180 PARAMETER Experiment Name: At_Germinating_Seeds_P Parameter: Tissue Value: Germinating Seeds
  misc_feature: MA Experiment ID: 20000184 Result: Up-regulated in Transcription
  misc_feature: MA Experiment 20000184 PARAMETER Experiment Name: At_Shoots__P Parameter: Age (day) Value: 7
  misc_feature: MA Experiment 20000184 PARAMETER Experiment Name: At_Shoots__P Parameter: Tissue Value: Shoots vs. Whole Plant
  misc_feature: MA Experiment ID: 20000234 Result: Up-regulated in Transcription
  misc_feature: MA Experiment 20000234 PARAMETER Experiment Name: At_Siliques_P Parameter: Age (day) Value: 21
  misc_feature: MA Experiment 20000234 PARAMETER Experiment Name: At_Siliques_P Parameter: Organism Value: A. thaliana
  misc_feature: MA Experiment 20000234 PARAMETER Experiment Name: At_Siliques_P Parameter: Plant Line Value: WS
  misc_feature: MA Experiment 20000234 PARAMETER Experiment Name: At_Siliques_P Parameter: Tissue Value: Less Than 5mm Siliques vs. Whole Plant
  misc_feature: MA Experiment ID: 20000286 Result: Up-regulated in Transcription
  misc_feature: MA Experiment 20000286 PARAMETER Experiment Name: At_Open_Flower_P Parameter: Age (day) Value: 21
  misc_feature: MA Experiment 20000286 PARAMETER Experiment Name: At_Open_Flower_P Parameter: Plant Line Value: WS
  misc_feature: MA Experiment 20000286 PARAMETER Experiment Name: At_Open_Flower_P Parameter: Tissue Value: Half Open vs. Whole Plant
  misc_feature: MA Experiment ID: 20000438 Result: Up-regulated in Transcription
  misc_feature: MA Experiment 20000438 PARAMETER Experiment Name: At_Shoots__P Parameter: Age (day) Value: 14
  misc_feature: MA Experiment 20000438 PARAMETER Experiment Name: At_Shoots__P Parameter: Tissue Value: Shoots vs. Whole Plant
  misc_feature: MA Experiment ID: 20001560 Result: Up-regulated in Transcription
  misc_feature: MA Experiment 20001560 PARAMETER Experiment Name: At_Drought_Soil_Dry_P Parameter: Age (day) Value: 28
  misc_feature: MA Experiment 20001560 PARAMETER Experiment Name: At_Drought_Soil_Dry_P Parameter: Organism Value: A. thaliana
  misc_feature: MA Experiment 20001560 PARAMETER Experiment Name: At_Drought_Soil_Dry_P Parameter: Plant Line Value: WS
  misc_feature: MA Experiment 20001560 PARAMETER Experiment Name: At_Drought_Soil_Dry_P Parameter: Post Timepoint (hr) Value: None
  misc_feature: MA Experiment 20001560 PARAMETER Experiment Name: At_Drought_Soil_Dry_P Parameter: Post-Treatment Value: None
  misc_feature: MA Experiment 20001560 PARAMETER Experiment Name: At_Drought_Soil_Dry_P Parameter: Timepoint (day) Value: 14
  misc_feature: MA Experiment 20001560 PARAMETER Experiment Name: At_Drought_Soil_Dry_P Parameter: Treatment Value: Drought vs. No Drought
  misc_feature: MA Experiment ID: 20001911 Result: Down-regulated in Transcription
  misc_feature: MA Experiment 20001911 PARAMETER Experiment Name: At_Drought_Reproduction_P Parameter: Age (day) Value: 40
  misc_feature: MA Experiment 20001911 PARAMETER Experiment Name: At_Drought_Reproduction_P Parameter: Organism Value: A. thaliana
  misc_feature: MA Experiment 20001911 PARAMETER Experiment Name: At_Drought_Reproduction_P Parameter: Plant Line Value: WS
  misc_feature: MA Experiment 20001911 PARAMETER Experiment Name: At_Drought_Reproduction_P Parameter: Timepoint (day) Value: 10
  misc_feature: MA Experiment 20001911 PARAMETER Experiment Name: At_Drought_Reproduction_P Parameter: Tissue Value: Flowers
  misc_feature: MA Experiment 20001911 PARAMETER Experiment Name: At_Drought_Reproduction_P Parameter: Treatment Value: Drought vs. No Drought
gacatcttctctctctctttctgaagtgaactgttgttgttgtgctctttggtttcatcgagagagaacctaaacccgatctgaaccaataacaataagaagacgaatggcgtcttcgtcgttctcagtcacatctccagctgctgctgcttccgtctatgcagtcactcaaacctcctcgcacttcccaatccaaaaccgctctcgcagagtttctttccgtctctctgctaagcccaagcttcgctttctctccaagcctagtcgcagtagctaccctgtggtgaaagcacaatctaacaaggttagtactggtgcatcatcaaatgctgccaaagttgatgggccatcatcagctgaaggaaaggagaaaaactcattgaaggagtcgtctgcttcttctcctgaattagctacagaagagtctatttctgagttccttacccaagtaacaactcttgtcaagcttgtggattcaagagacattgttgagttgcagttgaaacaactcgactgtgaactagtcattcgaaaaaaagaagccttacctcaacctcaagctcctgcatcttatgttatgatgcagcaaccaaatcaaccatcttatgcccagcaaatggctcctcctgctgcacctgctgctgccgcaccagccccttctacgccagcctctctgcctccaccatccccacctactccagccaaatcgtcacttcctactgttaaaagccccatggctggcacattctaccgtagtcctgcacctggtgaaccaccctttattaaggttggagacaaagtgcagaaggggcaagttctatgcattgttgaagccatgaagttaatgaatgaaatagagtctgaccataccggaaccgtagtcgatattgtcgcagaagacggcaagcctgtcagcctcgacactcctctgtttgtggttcaacccgtagaatcggcaccatgagaaatggagaaaagaagctctactaaattcattctctgtgctttggtaatacaaaatttgctgagacttctaaaaacgtttccccttcgctgtcactgttaaagtctgttaggtttgttagtttggtgaggaagaattgagttttctttagtttctctattcgttaaaaaaaaaaagatgagacatttttttccataagctctgtttttatttctttcctatatacacgaactcttcttgttctgttctatttgcaaattatccaatttc

SEQ ID NO: 24785 - protein, 285 aa, Arabidopsis thaliana
  peptide (1)..(285): Ceres Seq. ID no. 12336109
  misc_feature (204)..(278): Pfam Name: Biotin-requiring enzyme Pfam Description: Biotin-requiring enzyme
  misc_feature (3)..(280): Homolog of NCBI NO: 29169309 NR Description: biotin carboxylase carrier protein [Lycopersicon
  misc_feature (84)..(280): Homolog of NCBI NO: 2129784 NR Description: biotin carboxyl carrier protein (clone BP1) -
  misc_feature (1)..(275): Homolog of NCBI NO: 1916613 NR Description: acetyl-CoA carboxylase
  misc_feature (1)..(280): Homolog of NCBI NO: 15237339 NR Description: biotin carboxyl carrier protein 1 (BCCP1)
  misc_feature (1)..(285): Homolog of NCBI NO: 1588550 NR Description: Ac-CoA carboxylase
  misc_feature (1)..(285): Homolog of NCBI NO: 1066348 NR Description: acetyl-CoA carboxylase biotin-containing subunit
MASSSFSVTSPAAAASVYAVTQTSSHFPIQNRSRRVSFRLSAKPKLRFLSKPSRSSYPVVKAQSNKVSTGASSNAAKVDGPSSAEGKEKNSLKESSASSPELATEESISEFLTQVTTLVKLVDSRDIVELQLKQLDCELVIRKKEALPQPQAPASYVMMQQPNQPSYAQQMAPPAAPAAAAPAPSTPASLPPPSPPTPAKSSLPTVKSPMAGTFYRSPAPGEPPFIKVGDKVQKGQVLCIVEAMKLMNEIESDHTGTVVDIVAEDGKPVSLDTPLFVVQPVESAP

SEQ ID NO: 24786 - DNA, 1410 bp, Arabidopsis thaliana
  misc_feature (1)..(1410): Ceres Seq. ID no. 13500138
  misc_feature: MA Experiment ID: 108435 Result: Up-regulated in Transcription
  misc_feature: MA Experiment 108435 PARAMETER Experiment Name: At_stm_Mutants_cDNA_P Parameter: Plant Line Value: wt Landsburg vs stm
  misc_feature: MA Experiment 108435 PARAMETER Experiment Name: At_stm_Mutants_cDNA_P Parameter: Tissue Value: Shoot Apical Meristem Region
  misc_feature: MA Experiment ID: 108461 Result: Up-regulated in Transcription
  misc_feature: MA Experiment 108461 PARAMETER Experiment Name: At_Germinating_Seeds_cDNA_P Parameter: Age (day) Value: 1 vs. 0
  misc_feature: MA Experiment 108461 PARAMETER Experiment Name: At_Germinating_Seeds_cDNA_P Parameter: Tissue Value: Germinating Seeds
  misc_feature: MA Experiment ID: 108462 Result: Up-regulated in Transcription
  misc_feature: MA Experiment 108462 PARAMETER Experiment Name: At_Germinating_Seeds_cDNA_P Parameter: Age (day) Value: 2 vs. 0
  misc_feature: MA Experiment 108462 PARAMETER Experiment Name: At_Germinating_Seeds_cDNA_P Parameter: Tissue Value: Germinating Seeds
  misc_feature: MA Experiment ID: 108464 Result: Up-regulated in Transcription
  misc_feature: MA Experiment 108464 PARAMETER Experiment Name: At_Germinating_Seeds_cDNA_P Parameter: Age (day) Value: 4 vs. 0
  misc_feature: MA Experiment 108464 PARAMETER Experiment Name: At_Germinating_Seeds_cDNA_P Parameter: Tissue Value: Germinating Seeds
  misc_feature: MA Experiment ID: 108573 Result: Up-regulated in Transcription
  misc_feature: MA Experiment 108573 PARAMETER Experiment Name: At_Drought_cDNA_P Parameter: Timepoint (hr) Value: 6
  misc_feature: MA Experiment 108573 PARAMETER Experiment Name: At_Drought_cDNA_P Parameter: Tissue Value: Aerial
  misc_feature: MA Experiment 108573 PARAMETER Experiment Name: At_Drought_cDNA_P Parameter: Treatment Value: Drought vs. No Drought
  misc_feature: MA Experiment ID: 108577 Result: Down-regulated in Transcription
  misc_feature: MA Experiment 108577 PARAMETER Experiment Name: At_42deg_Heat_cDNA_P Parameter: Temperature (deg C) Value: 42 vs. 22
  misc_feature: MA Experiment 108577 PARAMETER Experiment Name: At_42deg_Heat_cDNA_P Parameter: Timepoint (hr) Value: 6
  misc_feature: MA Experiment 108577 PARAMETER Experiment Name: At_42deg_Heat_cDNA_P Parameter: Tissue Value: Aerial
  misc_feature: MA Experiment ID: 108579 Result: Up-regulated in Transcription
  misc_feature: MA Experiment 108579 PARAMETER Experiment Name: At_4deg_Cold_cDNA_P Parameter: Temperature (deg C) Value: 4 vs. 22
  misc_feature: MA Experiment 108579 PARAMETER Experiment Name: At_4deg_Cold_cDNA_P Parameter: Timepoint (hr) Value: 6
  misc_feature: MA Experiment 108579 PARAMETER Experiment Name: At_4deg_Cold_cDNA_P Parameter: Tissue Value: Aerial
  misc_feature: MA Experiment ID: 108585 Result: Up-regulated in Transcription
  misc_feature: MA Experiment 108585 PARAMETER Experiment Name: At_5mM_NaNP_cDNA_P Parameter: Timepoint (hr) Value: 6
  misc_feature: MA Experiment 108585 PARAMETER Experiment Name: At_5mM_NaNP_cDNA_P Parameter: Tissue Value: Aerial
  misc_feature: MA Experiment 108585 PARAMETER Experiment Name: At_5mM_NaNP_cDNA_P Parameter: Treatment Value: null
  misc_feature: MA Experiment ID: 108595 Result: Down-regulated in Transcription
  misc_feature: MA Experiment 108595 PARAMETER Experiment Name: At_Ler-pi_Ovule_cDNA_P Parameter: Plant Line Value: null
  misc_feature: MA Experiment ID: 108605 Result: Up-regulated in Transcription
  misc_feature: MA Experiment 108605 PARAMETER Experiment Name: At_100uM_ABA_cDNA_P Parameter: Timepoint (hr) Value: 6
  misc_feature: MA Experiment 108605 PARAMETER Experiment Name: At_100uM_ABA_cDNA_P Parameter: Tissue Value: Aerial
  misc_feature: MA Experiment 108605 PARAMETER Experiment Name: At_100uM_ABA_cDNA_P Parameter: Treatment Value: 100uM ABA vs. No Treatment
  misc_feature: MA Experiment ID: 108607 Result: Up-regulated in Transcription
  misc_feature: MA Experiment 108607 PARAMETER Experiment Name: At_100uM_ABA_cDNA_P Parameter: Timepoint (hr) Value: 4
  misc_feature: MA Experiment 108607 PARAMETER Experiment Name: At_100uM_ABA_cDNA_P Parameter: Tissue Value: Aerial
  misc_feature: MA Experiment 108607 PARAMETER Experiment Name: At_100uM_ABA_cDNA_P Parameter: Treatment Value: 100uM ABA vs. No Treatment
  misc_feature: MA Experiment ID: 20000030 Result: Down-regulated in Transcription
  misc_feature: MA Experiment 20000030 PARAMETER Experiment Name: At_CS6630_Roots_cDNA_P Parameter: Plant Line Value: CS6630 vs. WS
  misc_feature: MA Experiment 20000030 PARAMETER Experiment Name: At_CS6630_Roots_cDNA_P Parameter: Tissue Value: Roots
  misc_feature: MA Experiment ID: 20000068 Result: Up-regulated in Transcription
  misc_feature: MA Experiment ID: 20000111 Result: Down-regulated in Transcription
  misc_feature: MA Experiment 20000111 PARAMETER Experiment Name: At_42deg_Heat_cDNA_P Parameter: Temperature (deg C) Value: 42 vs. 22
  misc_feature: MA Experiment 20000111 PARAMETER Experiment Name: At_42deg_Heat_cDNA_P Parameter: Timepoint (hr) Value: 6
  misc_feature: MA Experiment 20000111 PARAMETER Experiment Name: At_42deg_Heat_cDNA_P Parameter: Tissue Value: Aerial
  misc_feature: MA Experiment ID: 20000112 Result: Down-regulated in Transcription
  misc_feature: MA Experiment 20000112 PARAMETER Experiment Name: At_42deg_Heat_cDNA_P Parameter: Temperature (deg C) Value: 42 vs. 22
  misc_feature: MA Experiment 20000112 PARAMETER Experiment Name: At_42deg_Heat_cDNA_P Parameter: Timepoint (hr) Value: 2
  misc_feature: MA Experiment 20000112 PARAMETER Experiment Name: At_42deg_Heat_cDNA_P Parameter: Tissue Value: Aerial
  misc_feature: MA Experiment ID: 20000113 Result: Down-regulated in Transcription
  misc_feature: MA Experiment 20000113 PARAMETER Experiment Name: At_42deg_Heat_cDNA_P Parameter: Temperature (deg C) Value: 42 vs. 22
  misc_feature: MA Experiment 20000113 PARAMETER Experiment Name: At_42deg_Heat_cDNA_P Parameter: Timepoint (hr) Value: 8
  misc_feature: MA Experiment 20000113 PARAMETER Experiment Name: At_42deg_Heat_cDNA_P Parameter: Tissue Value: Aerial
  misc_feature: MA Experiment ID: 20000144 Result: Down-regulated in Transcription
  misc_feature: MA Experiment 20000144 PARAMETER Experiment Name: At_42deg_Heat_cDNA_P Parameter: Temperature (deg C) Value: 42 vs. 22
  misc_feature: MA Experiment 20000144 PARAMETER Experiment Name: At_42deg_Heat_cDNA_P Parameter: Timepoint (hr) Value: 1
  misc_feature: MA Experiment 20000144 PARAMETER Experiment Name: At_42deg_Heat_cDNA_P Parameter: Tissue Value: Aerial
  misc_feature: MA Experiment ID: 20000169 Result: Up-regulated in Transcription
  misc_feature: MA Experiment 20000169 PARAMETER Experiment Name: At_100uM_ABA_P Parameter: Age (day) Value: 14
  misc_feature: MA Experiment 20000169 PARAMETER Experiment Name: At_100uM_ABA_P Parameter: Organism Value: A. thaliana
  misc_feature: MA Experiment 20000169 PARAMETER Experiment Name: At_100uM_ABA_P Parameter: Plant Line Value: WS
  misc_feature: MA Experiment 20000169 PARAMETER Experiment Name: At_100uM_ABA_P Parameter: Timepoint (hr) Value: 6
  misc_feature: MA Experiment 20000169 PARAMETER Experiment Name: At_100uM_ABA_P Parameter: Tissue Value: Aerial
  misc_feature: MA Experiment 20000169 PARAMETER Experiment Name: At_100uM_ABA_P Parameter: Treatment Value: 100uM ABA vs. No Treatment
  misc_feature: MA Experiment ID: 20000171 Result: Down-regulated in Transcription
  misc_feature: MA Experiment 20000171 PARAMETER Experiment Name: At_42deg_Heat_P Parameter: Age (day) Value: 14
  misc_feature: MA Experiment 20000171 PARAMETER Experiment Name: At_42deg_Heat_P Parameter: Organism Value: A. thaliana
  misc_feature: MA Experiment 20000171 PARAMETER Experiment Name: At_42deg_Heat_P Parameter: Plant Line Value: WS
  misc_feature: MA Experiment 20000171 PARAMETER Experiment Name: At_42deg_Heat_P Parameter: Temperature (deg C) Value: 42 vs. 22
  misc_feature: MA Experiment 20000171 PARAMETER Experiment Name: At_42deg_Heat_P Parameter: Timepoint (hr) Value: 1
  misc_feature: MA Experiment 20000171 PARAMETER Experiment Name: At_42deg_Heat_P Parameter: Tissue Value: Aerial
  misc_feature: MA Experiment ID: 20000173 Result: Down-regulated in Transcription
  misc_feature: MA Experiment 20000173 PARAMETER Experiment Name: At_42deg_Heat_P Parameter: Age (day) Value: 14
  misc_feature: MA Experiment 20000173 PARAMETER Experiment Name: At_42deg_Heat_P Parameter: Organism Value: A. thaliana
  misc_feature: MA Experiment 20000173 PARAMETER Experiment Name: At_42deg_Heat_P Parameter: Plant Line Value: WS
  misc_feature: MA Experiment 20000173 PARAMETER Experiment Name: At_42deg_Heat_P Parameter: Temperature (deg C) Value: 42 vs. 22
  misc_feature: MA Experiment 20000173 PARAMETER Experiment Name: At_42deg_Heat_P Parameter: Timepoint (hr) Value: 6
  misc_feature: MA Experiment 20000173 PARAMETER Experiment Name: At_42deg_Heat_P Parameter: Tissue Value: Aerial
  misc_feature: MA Experiment ID: 20000213 Result: Up-regulated in Transcription
  misc_feature: MA Experiment 20000213 PARAMETER Experiment Name: At_4deg_Cold_P Parameter: Timepoint (hr) Value: 2
  misc_feature: MA Experiment ID: 20000224 Result: Down-regulated in Transcription
  misc_feature: MA Experiment ID: 20000227 Result: Up-regulated in Transcription
  misc_feature: MA Experiment 20000227 PARAMETER Experiment Name: At_Root-Tips-vs-Tops_P Parameter: Tissue Value: Root Tips vs. Root Tops
  misc_feature: MA Experiment ID: 20000234 Result: Down-regulated in Transcription
  misc_feature: MA Experiment 20000234 PARAMETER Experiment Name: At_Siliques_P Parameter: Age (day) Value: 21
  misc_feature: MA Experiment 20000234 PARAMETER Experiment Name: At_Siliques_P Parameter: Organism Value: A. thaliana
  misc_feature: MA Experiment 20000234 PARAMETER Experiment Name: At_Siliques_P Parameter: Plant Line Value: WS
  misc_feature: MA Experiment 20000234 PARAMETER Experiment Name: At_Siliques_P Parameter: Tissue Value: Less Than 5mm Siliques vs. Whole Plant
  misc_feature: MA Experiment ID: 20000235 Result: Down-regulated in Transcription
  misc_feature: MA Experiment 20000235 PARAMETER Experiment Name: At_Siliques_P Parameter: Age (day) Value: 21
  misc_feature: MA Experiment 20000235 PARAMETER Experiment Name: At_Siliques_P Parameter: Organism Value: A. thaliana
  misc_feature: MA Experiment 20000235 PARAMETER Experiment Name: At_Siliques_P Parameter: Plant Line Value: WS
  misc_feature: MA Experiment 20000235 PARAMETER Experiment Name: At_Siliques_P Parameter: Tissue Value: 5-10mm Siliques vs. Whole Plant
  misc_feature: MA Experiment ID: 20001247 Result: Up-regulated in Transcription
  misc_feature: MA Experiment 20001247 PARAMETER Experiment Name: At_Far-red-induction_P Parameter: Age (day) Value: 7
  misc_feature: MA Experiment 20001247 PARAMETER Experiment Name: At_Far-red-induction_P Parameter: Light Value: Far-red vs. White
  misc_feature: MA Experiment 20001247 PARAMETER Experiment Name: At_Far-red-induction_P Parameter: Organism Value: A. thaliana
  misc_feature: MA Experiment 20001247 PARAMETER Experiment Name: At_Far-red-induction_P Parameter: Plant Line Value: Columbia
  misc_feature: MA Experiment 20001247 PARAMETER Experiment Name: At_Far-red-induction_P Parameter: Timepoint (hr) Value: 1
  misc_feature: MA Experiment 20001247 PARAMETER Experiment Name: At_Far-red-induction_P Parameter: Tissue Value: Whole Plant
  misc_feature: MA Experiment ID: 20001906 Result: Down-regulated in Transcription
  misc_feature: MA Experiment 20001906 PARAMETER Experiment Name: At_Drought_Reproduction_P Parameter: Age (day) Value: 35
  misc_feature: MA Experiment 20001906 PARAMETER Experiment Name: At_Drought_Reproduction_P Parameter: Organism Value: A. thaliana
  misc_feature: MA Experiment 20001906 PARAMETER Experiment Name: At_Drought_Reproduction_P Parameter: Plant Line Value: WS
  misc_feature: MA Experiment 20001906 PARAMETER Experiment Name: At_Drought_Reproduction_P Parameter: Timepoint (day) Value: 5
  misc_feature: MA Experiment 20001906 PARAMETER Experiment Name: At_Drought_Reproduction_P Parameter: Tissue Value: Siliques
  misc_feature: MA Experiment 20001906 PARAMETER Experiment Name: At_Drought_Reproduction_P Parameter: Treatment Value: Drought vs. No Drought
  misc_feature: MA Experiment ID: 20001907 Result: Down-regulated in Transcription
  misc_feature: MA Experiment 20001907 PARAMETER Experiment Name: At_Drought_Reproduction_P Parameter: Age (day) Value: 37
  misc_feature: MA Experiment 20001907 PARAMETER Experiment Name: At_Drought_Reproduction_P Parameter: Organism Value: A. thaliana
  misc_feature: MA Experiment 20001907 PARAMETER Experiment Name: At_Drought_Reproduction_P Parameter: Plant Line Value: WS
  misc_feature: MA Experiment 20001907 PARAMETER Experiment Name: At_Drought_Reproduction_P Parameter: Timepoint (day) Value: 7
  misc_feature: MA Experiment 20001907 PARAMETER Experiment Name: At_Drought_Reproduction_P Parameter: Tissue Value: Siliques
  misc_feature: MA Experiment 20001907 PARAMETER Experiment Name: At_Drought_Reproduction_P Parameter: Treatment Value: Drought vs. No Drought
  misc_feature: MA Experiment ID: 20001908 Result: Down-regulated in Transcription
  misc_feature: MA Experiment 20001908 PARAMETER Experiment Name: At_Drought_Reproduction_P Parameter: Age (day) Value: 40
  misc_feature: MA Experiment 20001908 PARAMETER Experiment Name: At_Drought_Reproduction_P Parameter: Organism Value: A. thaliana
  misc_feature: MA Experiment 20001908 PARAMETER Experiment Name: At_Drought_Reproduction_P Parameter: Plant Line Value: WS
  misc_feature: MA Experiment 20001908 PARAMETER Experiment Name: At_Drought_Reproduction_P Parameter: Timepoint (day) Value: 10
  misc_feature: MA Experiment 20001908 PARAMETER Experiment Name: At_Drought_Reproduction_P Parameter: Tissue Value: Siliques
  misc_feature: MA Experiment 20001908 PARAMETER Experiment Name: At_Drought_Reproduction_P Parameter: Treatment Value: Drought vs. No Drought
  misc_feature: MA Experiment ID: 20001911 Result: Down-regulated in Transcription
  misc_feature: MA Experiment 20001911 PARAMETER Experiment Name: At_Drought_Reproduction_P Parameter: Age (day) Value: 40
  misc_feature: MA Experiment 20001911 PARAMETER Experiment Name: At_Drought_Reproduction_P Parameter: Organism Value: A. thaliana
  misc_feature: MA Experiment 20001911 PARAMETER Experiment Name: At_Drought_Reproduction_P Parameter: Plant Line Value: WS
  misc_feature: MA Experiment 20001911 PARAMETER Experiment Name: At_Drought_Reproduction_P Parameter: Timepoint (day) Value: 10
  misc_feature: MA Experiment 20001911 PARAMETER Experiment Name: At_Drought_Reproduction_P Parameter: Tissue Value: Flowers
  misc_feature: MA Experiment 20001911 PARAMETER Experiment Name: At_Drought_Reproduction_P Parameter: Treatment Value: Drought vs. No Drought
gaacttgtaaaccttactctcgaagagtcctctgttactcatttttacattgtaaaaaaaaacttcttttcttctctacgtgaataagaatctgaagagtcattttctcaagaatgacgtggctaaaacaaatgtggtcaagcattttagtgctagccgtggtggtgatcggagccagagctgtgcccatcacgtatcttgaatctgcagtggctaaaggagctgtgtgtttggatggtagcgcgccagcataccatttcgataagggatcgggctcaggagtgaacaattggatcgttcatatggaaggaggaggatggtgcactgatatagctacatgcgttcaacgtaaaagtacaatgaagggttcttctaagcttatgaacaaagactttggtttctccggtatcttgggtggcaagcaaagcaccaatccagacttttacaattggaatagaatcaaagttcggtattgcgatggttcatctttcaccggtgatatagaagctgttgatccgacgcacaagctgttctttcgcggtgctagggtttggcgtgcggtgatcgatgatcttatggctaagggaatgagcaacgctcaaaacgctatactctccggttgttcagctggagcattggctgcgattctacattgcgaccagttcaagtccactctccctaaaacggctaaggtcaaatgtgtttctgacgctggttacttcatccacggtaaggatatcactggaggatcttacatccaatcctactacgccaaagtcgtagcgacccacggatctgcaaagagtctacctgcttcttgcacctcaagtatgaagcctgatttgtgtttcttccctcaatacgttgctaagaccttacaaacaccgcttttcgtcatcaatgccgccttcgattcttggcagatcaagaatgtattggcaccaacctctgttgataaaagcaaagcatggaagacttgtaagcttgatcttaagaagtgtacggccgctcagcttcaaaccgttcaaggatatagagaccaagtgttggctgcgttggcgcctgttcgatccgcgacgacgaacggattgttcttggactcgtgccatgctcattgccaaggtggaagcgctgccacttggtccggcgacaaaggtcccacagtcgcgaatacgaaaatggctaaggcggttggagattggttctttgagaggagtacgtttcagaacgtagattgttcatcgcttaattgcaaccctacttgccctgcagtatctactgaagactaaaatttattcattgatgtcttaaaatttattcatctttggaatattgttcttgaaatttaaaagtaaaataatataattgatacaatttcattcgaataaataaaatcctttgcccttctgc

SEQ ID NO: 24787 - protein, 391 aa, Arabidopsis thaliana
  peptide (1)..(391): Ceres Seq. ID no. 13500139
  misc_feature (10)..(373): Pfam Name: Pectinacetylesterase Pfam Description: Pectinacetylesterase
  misc_feature (24)..(384): Homolog of NCBI NO: 30696158 NR Description: pectinacetylesterase, putative [Arabidopsis
  misc_feature (24)..(384): Homolog of NCBI NO: 25347293 NR Description: probable pectinacetylesterase precursor T8L23.6
  misc_feature (126)..(391): Homolog of NCBI NO: 7488140 NR Description: probable pectin acetylesterase (EC 3.1.1.-) -
  misc_feature (4)..(384): Homolog of NCBI NO: 22328797 NR Description: pectinacetylesterase family [Arabidopsis thaliana]
  misc_feature (3)..(384): Homolog of NCBI NO: 38344147 NR Description: OSJNBa0041A02.14 [Oryza sativa (japonica
  misc_feature (5)..(384): Homolog of NCBI NO: 7488883 NR Description: pectin acetylesterase (EC 3.1.1.-) precursor -
  misc_feature (4)..(391): Homolog of NCBI NO: 18415308 NR Description: pectinacetylesterase, putative [Arabidopsis
  misc_feature (1)..(305): Homolog of NCBI NO: 30694729 NR Description: pectinacetylesterase, putative [Arabidopsis
  misc_feature (1)..(391): Homolog of NCBI NO: 21593445 NR Description: pectin acetylesterase [Arabidopsis thaliana]
  misc_feature (1)..(391): Homolog of NCBI NO: 15242357 NR Description: pectinacetylesterase, putative [Arabidopsis
MTWLKQMWSSILVLAVVVIGARAVPITYLESAVAKGAVCLDGSAPAYHFDKGSGSGVNNWIVHMEGGGWCTDIATCVQRKSTMKGSSKLMNKDFGFSGILGGKQSTNPDFYNWNRIKVRYCDGSSFTGDIEAVDPTHKLFFRGARVWRAVIDDLMAKGMSNAQNAILSGCSAGALAAILHCDQFKSTLPKTAKVKCVSDAGYFIHGKDITGGSYIQSYYAKVVATHGSAKSLPASCTSSMKPDLCFFPQYVAKTLQTPLFVINAAFDSWQIKNVLAPTSVDKSKAWKTCKLDLKKCTAAQLQTVQGYRDQVLAALAPVRSATTNGLFLDSCHAHCQGGSAATWSGDKGPTVANTKMAKAVGDWFFERSTFQNVDCSSLNCNPTCPAVSTED

SEQ ID NO: 24788 - protein, 385 aa, Arabidopsis thaliana
  peptide (1)..(385): Ceres Seq. ID no. 13500140
  misc_feature (4)..(367): Pfam Name: Pectinacetylesterase Pfam Description: Pectinacetylesterase
  misc_feature (18)..(378): Homolog of NCBI NO: 30696158 NR Description: pectinacetylesterase, putative [Arabidopsis
  misc_feature (18)..(378): Homolog of NCBI NO: 25347293 NR Description: probable pectinacetylesterase precursor T8L23.6
  misc_feature (120)..(385): Homolog of NCBI NO: 7488140 NR Description: probable pectin acetylesterase (EC 3.1.1.-) -
  misc_feature (1)..(378): Homolog of NCBI NO: 22328797 NR Description: pectinacetylesterase family [Arabidopsis thaliana]
  misc_feature (1)..(378): Homolog of NCBI NO: 38344147 NR Description: OSJNBa0041A02.14 [Oryza sativa (japonica
  misc_feature (1)..(378): Homolog of NCBI NO: 7488883 NR Description: pectin acetylesterase (EC 3.1.1.-) precursor -
  misc_feature (1)..(385): Homolog of NCBI NO: 18415308 NR Description: pectinacetylesterase, putative [Arabidopsis
  misc_feature (1)..(299): Homolog of NCBI NO: 30694729 NR Description: pectinacetylesterase, putative [Arabidopsis
  misc_feature (1)..(385): Homolog of NCBI NO: 21593445 NR Description: pectin acetylesterase [Arabidopsis thaliana]
  misc_feature (1)..(385): Homolog of NCBI NO: 15242357 NR Description: pectinacetylesterase, putative [Arabidopsis
MWSSILVLAVVVIGARAVPITYLESAVAKGAVCLDGSAPAYHFDKGSGSGVNNWIVHMEGGGWCTDIATCVQRKSTMKGSSKLMNKDFGFSGILGGKQSTNPDFYNWNRIKVRYCDGSSFTGDIEAVDPTHKLFFRGARVWRAVIDDLMAKGMSNAQNAILSGCSAGALAAILHCDQFKSTLPKTAKVKCVSDAGYFIHGKDITGGSYIQSYYAKVVATHGSAKSLPASCTSSMKPDLCFFPQYVAKTLQTPLFVINAAFDSWQIKNVLAPTSVDKSKAWKTCKLDLKKCTAAQLQTVQGYRDQVLAALAPVRSATTNGLFLDSCHAHCQGGSAATWSGDKGPTVANTKMAKAVGDWFFERSTFQNVDCSSLNCNPTCPAVSTED

SEQ ID NO: 24789 - protein, 328 aa, Arabidopsis thaliana
  peptide (1)..(328): Ceres Seq. ID no. 13500141
  misc_feature (1)..(310): Pfam Name: Pectinacetylesterase Pfam Description: Pectinacetylesterase
  misc_feature (1)..(321): Homolog of NCBI NO: 30696158 NR Description: pectinacetylesterase, putative [Arabidopsis
  misc_feature (1)..(321): Homolog of NCBI NO: 25347293 NR Description: probable pectinacetylesterase precursor T8L23.6
  misc_feature (63)..(328): Homolog of NCBI NO: 7488140 NR Description: probable pectin acetylesterase (EC 3.1.1.-) -
  misc_feature (1)..(321): Homolog of NCBI NO: 22328797 NR Description: pectinacetylesterase family [Arabidopsis thaliana]
  misc_feature (1)..(321): Homolog of NCBI NO: 38344147 NR Description: OSJNBa0041A02.14 [Oryza sativa (japonica
  misc_feature (1)..(321): Homolog of NCBI NO: 7488883 NR Description: pectin acetylesterase (EC 3.1.1.-) precursor -
  misc_feature (1)..(328): Homolog of NCBI NO: 18415308 NR Description: pectinacetylesterase, putative [Arabidopsis
  misc_feature (1)..(242): Homolog of NCBI NO: 30694729 NR Description: pectinacetylesterase, putative [Arabidopsis
  misc_feature (1)..(328): Homolog of NCBI NO: 21593445 NR Description: pectin acetylesterase [Arabidopsis thaliana]
  misc_feature (1)..(328): Homolog of NCBI NO: 15242357 NR Description: pectinacetylesterase, putative [Arabidopsis
MEGGGWCTDIATCVQRKSTMKGSSKLMNKDFGFSGILGGKQSTNPDFYNWNRIKVRYCDGSSFTGDIEAVDPTHKLFFRGARVWRAVIDDLMAKGMSNAQNAILSGCSAGALAAILHCDQFKSTLPKTAKVKCVSDAGYFIHGKDITGGSYIQSYYAKVVATHGSAKSLPASCTSSMKPDLCFFPQYVAKTLQTPLFVINAAFDSWQIKNVLAPTSVDKSKAWKTCKLDLKKCTAAQLQTVQGYRDQVLAALAPVRSATTNGLFLDSCHAHCQGGSAATWSGDKGPTVANTKMAKAVGDWFFERSTFQNVDCSSLNCNPTCPAVSTED

SEQ ID NO: 24790 - DNA, 1112 bp, Arabidopsis thaliana
  misc_feature (1)..(1112): Ceres Seq. ID no. 12329914
  misc_feature: MA Experiment ID: 20000184 Result: Down-regulated in Transcription
  misc_feature: MA Experiment 20000184 PARAMETER Experiment Name: At_Shoots__P Parameter: Age (day) Value: 7
  misc_feature: MA Experiment 20000184 PARAMETER Experiment Name: At_Shoots__P Parameter: Tissue Value: Shoots vs. Whole Plant
  misc_feature: MA Experiment ID: 20000234 Result: Down-regulated in Transcription
  misc_feature: MA Experiment 20000234 PARAMETER Experiment Name: At_Siliques_P Parameter: Age (day) Value: 21
  misc_feature: MA Experiment 20000234 PARAMETER Experiment Name: At_Siliques_P Parameter: Organism Value: A. thaliana
  misc_feature: MA Experiment 20000234 PARAMETER Experiment Name: At_Siliques_P Parameter: Plant Line Value: WS
  misc_feature: MA Experiment 20000234 PARAMETER Experiment Name: At_Siliques_P Parameter: Tissue Value: Less Than 5mm Siliques vs. Whole Plant
  misc_feature: MA Experiment ID: 20000235 Result: Down-regulated in Transcription
  misc_feature: MA Experiment 20000235 PARAMETER Experiment Name: At_Siliques_P Parameter: Age (day) Value: 21
  misc_feature: MA Experiment 20000235 PARAMETER Experiment Name: At_Siliques_P Parameter: Organism Value: A. thaliana
  misc_feature: MA Experiment 20000235 PARAMETER Experiment Name: At_Siliques_P Parameter: Plant Line Value: WS
  misc_feature: MA Experiment 20000235 PARAMETER Experiment Name: At_Siliques_P Parameter: Tissue Value: 5-10mm Siliques vs. Whole Plant
  misc_feature: MA Experiment ID: 20000441 Result: Up-regulated in Transcription
  misc_feature: MA Experiment 20000441 PARAMETER Experiment Name: At_1uM_BR-BRZ__P Parameter: Tissue Value: Shoot Apices
  misc_feature: MA Experiment 20000441 PARAMETER Experiment Name: At_1uM_BR-BRZ__P Parameter: Treatment Value: 1uM BR vs. No Treatment
  misc_feature: MA Experiment ID: 20000794 Result: Up-regulated in Transcription
  misc_feature: MA Experiment 20000794 PARAMETER Experiment Name: At_Petals_P Parameter: Age (day) Value: 23-25 days
  misc_feature: MA Experiment 20000794 PARAMETER Experiment Name: At_Petals_P Parameter: Plant Line Value: WS
  misc_feature: MA Experiment 20000794 PARAMETER Experiment Name: At_Petals_P Parameter: Tissue Value: Petals vs. Whole plant
  misc_feature: MA Experiment ID: 20001248 Result: Up-regulated in Transcription
  misc_feature: MA Experiment 20001248 PARAMETER Experiment Name: At_Far-red-induction_P Parameter: Age (day) Value: 7
  misc_feature: MA Experiment 20001248 PARAMETER Experiment Name: At_Far-red-induction_P Parameter: Light Value: Far-red vs. White
  misc_feature: MA Experiment 20001248 PARAMETER Experiment Name: At_Far-red-induction_P Parameter: Organism Value: A. thaliana
  misc_feature: MA Experiment 20001248 PARAMETER Experiment Name: At_Far-red-induction_P Parameter: Plant Line Value: Columbia
  misc_feature: MA Experiment 20001248 PARAMETER Experiment Name: At_Far-red-induction_P Parameter: Timepoint (hr) Value: 4
  misc_feature: MA Experiment 20001248 PARAMETER Experiment Name: At_Far-red-induction_P Parameter: Tissue Value: Whole Plant
  misc_feature: MA Experiment ID: 20001450 Result: Up-regulated in Transcription
  misc_feature: MA Experiment 20001450 PARAMETER Experiment Name: At_Far-red-induction_P Parameter: Age (day) Value: 7
  misc_feature: MA Experiment 20001450 PARAMETER Experiment Name: At_Far-red-induction_P Parameter: Light Value: Far-red vs. White
  misc_feature: MA Experiment 20001450 PARAMETER Experiment Name: At_Far-red-induction_P Parameter: Organism Value: A. thaliana
  misc_feature: MA Experiment 20001450 PARAMETER Experiment Name: At_Far-red-induction_P Parameter: Plant Line Value: Columbia
  misc_feature: MA Experiment 20001450 PARAMETER Experiment Name: At_Far-red-induction_P Parameter: Timepoint (hr) Value: 8
  misc_feature: MA Experiment 20001450 PARAMETER Experiment Name: At_Far-red-induction_P Parameter: Tissue Value: Whole Plant
  misc_feature: MA Experiment ID: 20001556 Result: Down-regulated in Transcription
  misc_feature: MA Experiment 20001556 PARAMETER Experiment Name: At_Drought_Soil_Dry_P Parameter: Age (day) Value: 26
  misc_feature: MA Experiment 20001556 PARAMETER Experiment Name: At_Drought_Soil_Dry_P Parameter: Organism Value: A. thaliana
  misc_feature: MA Experiment 20001556 PARAMETER Experiment Name: At_Drought_Soil_Dry_P Parameter: Plant Line Value: WS
  misc_feature: MA Experiment 20001556 PARAMETER Experiment Name: At_Drought_Soil_Dry_P Parameter: Post Timepoint (hr) Value: None
  misc_feature: MA Experiment 20001556 PARAMETER Experiment Name: At_Drought_Soil_Dry_P Parameter: Post-Treatment Value: None
  misc_feature: MA Experiment 20001556 PARAMETER Experiment Name: At_Drought_Soil_Dry_P Parameter: Timepoint (day) Value: 12
  misc_feature: MA Experiment 20001556 PARAMETER Experiment Name: At_Drought_Soil_Dry_P Parameter: Treatment Value: Drought vs. No Drought
  misc_feature: MA Experiment ID: 20001557 Result: Down-regulated in Transcription
  misc_feature: MA Experiment 20001557 PARAMETER Experiment Name: At_Drought_Soil_Dry_P Parameter: Age (day) Value: 27
  misc_feature: MA Experiment 20001557 PARAMETER Experiment Name: At_Drought_Soil_Dry_P Parameter: Organism Value: A. thaliana
  misc_feature: MA Experiment 20001557 PARAMETER Experiment Name: At_Drought_Soil_Dry_P Parameter: Plant Line Value: WS
  misc_feature: MA Experiment 20001557 PARAMETER Experiment Name: At_Drought_Soil_Dry_P Parameter: Post Timepoint (hr) Value: 3
  misc_feature: MA Experiment 20001557 PARAMETER Experiment Name: At_Drought_Soil_Dry_P Parameter: Post-Treatment Value: Re-Water vs. No Drought
  misc_feature: MA Experiment 20001557 PARAMETER Experiment Name: At_Drought_Soil_Dry_P Parameter: Timepoint (day) Value: 13
  misc_feature: MA Experiment 20001557 PARAMETER Experiment Name: At_Drought_Soil_Dry_P Parameter: Treatment Value: Drought vs. No Drought
  misc_feature: MA Experiment ID: 20001558 Result: Down-regulated in Transcription
  misc_feature: MA Experiment 20001558 PARAMETER Experiment Name: At_Drought_Soil_Dry_P Parameter: Age (day) Value: 27
  misc_feature: MA Experiment 20001558 PARAMETER Experiment Name: At_Drought_Soil_Dry_P Parameter: Organism Value: A. thaliana
  misc_feature: MA Experiment 20001558 PARAMETER Experiment Name: At_Drought_Soil_Dry_P Parameter: Plant Line Value: WS
  misc_feature: MA Experiment 20001558 PARAMETER Experiment Name: At_Drought_Soil_Dry_P Parameter: Post Timepoint (hr) Value: 6
  misc_feature: MA Experiment 20001558 PARAMETER Experiment Name: At_Drought_Soil_Dry_P Parameter: Post-Treatment Value: Re-Water vs. No Drought
  misc_feature: MA Experiment 20001558 PARAMETER Experiment Name: At_Drought_Soil_Dry_P Parameter: Timepoint (day) Value: 13
  misc_feature: MA Experiment 20001558 PARAMETER Experiment Name: At_Drought_Soil_Dry_P Parameter: Treatment Value: Drought vs. No Drought
  misc_feature: MA Experiment ID: 20001559 Result: Down-regulated in Transcription
  misc_feature: MA Experiment 20001559 PARAMETER Experiment Name: At_Drought_Soil_Dry_P Parameter: Age (day) Value: 28
  misc_feature: MA Experiment 20001559 PARAMETER Experiment Name: At_Drought_Soil_Dry_P Parameter: Organism Value: A. thaliana
  misc_feature: MA Experiment 20001559 PARAMETER Experiment Name: At_Drought_Soil_Dry_P Parameter: Plant Line Value: WS
  misc_feature: MA Experiment 20001559 PARAMETER Experiment Name: At_Drought_Soil_Dry_P Parameter: Post Timepoint (hr) Value: 29
  misc_feature: MA Experiment 20001559 PARAMETER Experiment Name: At_Drought_Soil_Dry_P Parameter: Post-Treatment Value: Re-Water vs. No Drought
  misc_feature: MA Experiment 20001559 PARAMETER Experiment Name: At_Drought_Soil_Dry_P Parameter: Timepoint (day) Value: 14
  misc_feature: MA Experiment 20001559 PARAMETER Experiment Name: At_Drought_Soil_Dry_P Parameter: Treatment Value: Drought vs. No Drought
  misc_feature: MA Experiment ID: 20001560 Result: Down-regulated in Transcription
  misc_feature: MA Experiment 20001560 PARAMETER Experiment Name: At_Drought_Soil_Dry_P Parameter: Age (day) Value: 28
  misc_feature: MA Experiment 20001560 PARAMETER Experiment Name: At_Drought_Soil_Dry_P Parameter: Organism Value: A. thaliana
  misc_feature: MA Experiment 20001560 PARAMETER Experiment Name: At_Drought_Soil_Dry_P Parameter: Plant Line Value: WS
  misc_feature: MA Experiment 20001560 PARAMETER Experiment Name: At_Drought_Soil_Dry_P Parameter: Post Timepoint (hr) Value: None
  misc_feature: MA Experiment 20001560 PARAMETER Experiment Name: At_Drought_Soil_Dry_P Parameter: Post-Treatment Value: None
  misc_feature: MA Experiment 20001560 PARAMETER Experiment Name: At_Drought_Soil_Dry_P Parameter: Timepoint (day) Value: 14
  misc_feature: MA Experiment 20001560 PARAMETER Experiment Name: At_Drought_Soil_Dry_P Parameter: Treatment Value: Drought vs. No Drought
gactcttcgctcttctttttacacgaacacttctctctctctctcctcactctctttcctctttctctcactaaagaaaaaactagcgatcgaagagaatcatcatcaagaagctactatcagagaaatcaaagccctacaacacaagaatcaacatgggagctgaagaagaaaccaataagacatatcctcattggctaaaacctctgctacgagaaaagttctttgtacaatgcaaattacacgcagattcacataagagtgaatgtaacatgtactgtttagaccgtaccaatggtcctctctgttctctctgcttatctttccacaaagaccatcacgccattcagataagaagatcatcatatcacgatgttataagagtgtcggagattcagaagtttctggacataacaggagttcagacatatgtgatcaacagtgctaaggttgtgttcttgaacgagagacctcagcctcgaccaggcaaaggtgtgatcaatacttgtgaagtctgttatcgaagcctcgttgattccttcagattctgctctcttggttgcaagatctctggaatatcgaagaagaagagaaaggaatggacgaacaatctttcggattctgatgattcgtatagcagtacgagtatcggaaggctcaagaagaatgatgacattatgaataatagtttcacaccatcaacaccgcctttatcagccgtgaatcgtcgaattgcaaagcgaaggaagggaatcccgcatcgtgctcctttcggaggactaatcatagaatactaagaaatggtaatgtatagtcttatgctaataaccatcactagtagtttcggggtacatatatgtatatatatatatatctataatggtatataaagcaatgtaaaataaaagcttaacatcatagtattgtgtagatattaaaggggtaaaaaatgttgggaagatgatagaatgaggcatgaaatgaatacttgtgcctgtatattttgagctcaatggacaaatatgtaaatgtagaatagtgttgtggacaagacaatagtgataagtatgtgatgaatgtgaatggaataaaggtcattttactttcgatgc

SEQ ID NO: 24791 - protein, 213 aa, Arabidopsis thaliana
  peptide (1)..(213): Ceres Seq. ID no. 12329915
  misc_feature (9)..(200): Pfam Name: Protein of unknown function, DUF597 Pfam Description: Protein of unknown function, DUF597
  misc_feature (9)..(200): Pfam Name: Protein of unknown function, DUF597 Pfam Description: Protein of unknown function, DUF597
  misc_feature (4)..(143): Homolog of NCBI NO: 25337907 NR Description: hypothetical protein F9H16.1 - Arabidopsis
  misc_feature (4)..(143): Homolog of NCBI NO: 18394936 NR Description: expressed protein
  misc_feature (1)..(206): Homolog of NCBI NO: 15237491 NR Description: putative protein
  misc_feature (4)..(213): Homolog of NCBI NO: 37537092 NR Description: unknown protein [Oryza sativa (japonica
  misc_feature (2)..(213): Homolog of NCBI NO: 38346725 NR Description: OSJNBa0086O06.23 [Oryza sativa (japonica
  misc_feature (4)..(143): Homolog of NCBI NO: 25337907 NR Description: hypothetical protein F9H16.1 - Arabidopsis
  misc_feature (1)..(206): Homolog of NCBI NO: 15237491 NR Description: putative protein
  misc_feature (2)..(213): Homolog of NCBI NO: 38346725 NR Description: OSJNBa0086O06.23 [Oryza sativa (japonica
  misc_feature (1)..(213): Homolog of NCBI NO: 6714272 NR Description: F6N18.8 [Arabidopsis thaliana]
  misc_feature (1)..(213): Homolog of NCBI NO: 21554139 NR Description: unknown [Arabidopsis thaliana]
  misc_feature (1)..(213): Homolog of NCBI NO: 18398555 NR Description: expressed protein
  misc_feature (1)..(137): Homolog of NCBI NO: 15236696 NR Description: putative protein; protein id: At4g17900.1
  misc_feature (137)..(207): Homolog of NCBI NO: 15236696 NR Description: putative protein; protein id: At4g17900.1
  misc_feature (4)..(213): Homolog of NCBI NO: 37537092 NR Description: unknown protein [Oryza sativa (japonica
  misc_feature (4)..(143): Homolog of NCBI NO: 18394936 NR Description: expressed protein
  misc_feature (137)..(207): Homolog of NCBI NO: 15236696 NR Description: putative protein; protein id: At4g17900.1
  misc_feature (1)..(137): Homolog of NCBI NO: 15236696 NR Description: putative protein; protein id: At4g17900.1
  misc_feature (1)..(213): Homolog of NCBI NO: 18398555 NR Description: expressed protein
  misc_feature (1)..(213): Homolog of NCBI NO: 21554139 NR Description: unknown [Arabidopsis thaliana]
  misc_feature (1)..(213): Homolog of NCBI NO: 6714272 NR Description: F6N18.8 [Arabidopsis thaliana]
MGAEEETNKTYPHWLKPLLREKFFVQCKLHADSHKSECNMYCLDRTNGPLCSLCLSFHKDHHAIQIRRSSYHDVIRVSEIQKFLDITGVQTYVINSAKVVFLNERPQPRPGKGVINTCEVCYRSLVDSFRFCSLGCKISGISKKKRKEWTNNLSDSDDSYSSTSIGRLKKNDDIMNNSFTPSTPPLSAVNRRIAKRRKGIPHRAPFGGLIIEY

SEQ ID NO: 24792 - protein, 174 aa, Arabidopsis thaliana
  peptide (1)..(174): Ceres Seq. ID no. 12329916
  misc_feature (1)..(161): Pfam Name: Protein of unknown function, DUF597 Pfam Description: Protein of unknown function, DUF597
  misc_feature (1)..(161): Pfam Name: Protein of unknown function, DUF597 Pfam Description: Protein of unknown function, DUF597
  misc_feature (1)..(104): Homolog of NCBI NO: 25337907 NR Description: hypothetical protein F9H16.1 - Arabidopsis
  misc_feature (1)..(104): Homolog of NCBI NO: 18394936 NR Description: expressed protein
  misc_feature (1)..(167): Homolog of NCBI NO: 15237491 NR Description: putative protein
  misc_feature (1)..(174): Homolog of NCBI NO: 37537092 NR Description: unknown protein [Oryza sativa (japonica
  misc_feature (1)..(174): Homolog of NCBI NO: 38346725 NR Description: OSJNBa0086O06.23 [Oryza sativa (japonica
  misc_feature (1)..(104): Homolog of NCBI NO: 25337907 NR Description: hypothetical protein F9H16.1 - Arabidopsis
  misc_feature (1)..(167): Homolog of NCBI NO: 15237491 NR Description: putative protein
  misc_feature (1)..(174): Homolog of NCBI NO: 38346725 NR Description: OSJNBa0086O06.23 [Oryza sativa (japonica
  misc_feature (1)..(174): Homolog of NCBI NO: 6714272 NR Description: F6N18.8 [Arabidopsis thaliana]
  misc_feature (1)..(174): Homolog of NCBI NO: 21554139 NR Description: unknown [Arabidopsis thaliana]
  misc_feature (1)..(174): Homolog of NCBI NO: 18398555 NR Description: expressed protein
  misc_feature (1)..(98): Homolog of NCBI NO: 15236696 NR Description: putative protein; protein id: At4g17900.1
  misc_feature (98)..(168): Homolog of NCBI NO: 15236696 NR Description: putative protein; protein id: At4g17900.1
  misc_feature (1)..(174): Homolog of NCBI NO: 37537092 NR Description: unknown protein [Oryza sativa (japonica
  misc_feature (1)..(104): Homolog of NCBI NO: 18394936 NR Description: expressed protein
  misc_feature (98)..(168): Homolog of NCBI NO: 15236696 NR Description: putative protein; protein id: At4g17900.1
  misc_feature (1)..(98): Homolog of NCBI NO: 15236696 NR Description: putative protein; protein id: At4g17900.1
  misc_feature (1)..(174): Homolog of NCBI NO: 18398555 NR Description: expressed protein
  misc_feature (1)..(174): Homolog of NCBI NO: 21554139 NR Description: unknown [Arabidopsis thaliana]
  misc_feature (1)..(174): Homolog of NCBI NO: 6714272 NR Description: F6N18.8 [Arabidopsis thaliana]
MYCLDRTNGPLCSLCLSFHKDHHAIQIRRSSYHDVIRVSEIQKFLDITGVQTYVINSAKVVFLNERPQPRPGKGVINTCEVCYRSLVDSFRFCSLGCKISGISKKKRKEWTNNLSDSDDSYSSTSIGRLKKNDDIMNNSFTPSTPPLSAVNRRIAKRRKGIPHRAPFGGLIIEY

SEQ ID NO: 24793 - DNA, 601 bp, Arabidopsis thaliana
  misc_feature (1)..(601): Ceres Seq. ID no. 12337477
  misc_feature: MA Experiment ID: 108461 Result: Up-regulated in Transcription
  misc_feature: MA Experiment 108461 PARAMETER Experiment Name: At_Germinating_Seeds_cDNA_P Parameter: Age (day) Value: 1 vs. 0
  misc_feature: MA Experiment 108461 PARAMETER Experiment Name: At_Germinating_Seeds_cDNA_P Parameter: Tissue Value: Germinating Seeds
  misc_feature: MA Experiment ID: 108462 Result: Up-regulated in Transcription
  misc_feature: MA Experiment 108462 PARAMETER Experiment Name: At_Germinating_Seeds_cDNA_P Parameter: Age (day) Value: 2 vs. 0
  misc_feature: MA Experiment 108462 PARAMETER Experiment Name: At_Germinating_Seeds_cDNA_P Parameter: Tissue Value: Germinating Seeds
  misc_feature: MA Experiment ID: 108577 Result: Down-regulated in Transcription
  misc_feature: MA Experiment 108577 PARAMETER Experiment Name: At_42deg_Heat_cDNA_P Parameter: Temperature (deg C) Value: 42 vs. 22
  misc_feature: MA Experiment 108577 PARAMETER Experiment Name: At_42deg_Heat_cDNA_P Parameter: Timepoint (hr) Value: 6
  misc_feature: MA Experiment 108577 PARAMETER Experiment Name: At_42deg_Heat_cDNA_P Parameter: Tissue Value: Aerial
  misc_feature: MA Experiment ID: 20000111 Result: Down-regulated in Transcription
  misc_feature: MA Experiment 20000111 PARAMETER Experiment Name: At_42deg_Heat_cDNA_P Parameter: Temperature (deg C) Value: 42 vs. 22
  misc_feature: MA Experiment 20000111 PARAMETER Experiment Name: At_42deg_Heat_cDNA_P Parameter: Timepoint (hr) Value: 6
  misc_feature: MA Experiment 20000111 PARAMETER Experiment Name: At_42deg_Heat_cDNA_P Parameter: Tissue Value: Aerial
  misc_feature: MA Experiment ID: 20000113 Result: Down-regulated in Transcription
  misc_feature: MA Experiment 20000113 PARAMETER Experiment Name: At_42deg_Heat_cDNA_P Parameter: Temperature (deg C) Value: 42 vs. 22
  misc_feature: MA Experiment 20000113 PARAMETER Experiment Name: At_42deg_Heat_cDNA_P Parameter: Timepoint (hr) Value: 8
  misc_feature: MA Experiment 20000113 PARAMETER Experiment Name: At_42deg_Heat_cDNA_P Parameter: Tissue Value: Aerial
  misc_feature: MA Experiment ID: 20000173 Result: Down-regulated in Transcription
  misc_feature: MA Experiment 20000173 PARAMETER Experiment Name: At_42deg_Heat_P Parameter: Age (day) Value: 14
  misc_feature: MA Experiment 20000173 PARAMETER Experiment Name: At_42deg_Heat_P Parameter: Organism Value: A. thaliana
  misc_feature: MA Experiment 20000173 PARAMETER Experiment Name: At_42deg_Heat_P Parameter: Plant Line Value: WS
  misc_feature: MA Experiment 20000173 PARAMETER Experiment Name: At_42deg_Heat_P Parameter: Temperature (deg C) Value: 42 vs. 22
  misc_feature: MA Experiment 20000173 PARAMETER Experiment Name: At_42deg_Heat_P Parameter: Timepoint (hr) Value: 6
  misc_feature: MA Experiment 20000173 PARAMETER Experiment Name: At_42deg_Heat_P Parameter: Tissue Value: Aerial
  misc_feature: MA Experiment ID: 20000179 Result: Up-regulated in Transcription
  misc_feature: MA Experiment 20000179 PARAMETER Experiment Name: At_Germinating_Seeds_P Parameter: Age (hr) Value: 6 vs. 0
  misc_feature: MA Experiment 20000179 PARAMETER Experiment Name: At_Germinating_Seeds_P Parameter: Tissue Value: Germinating Seeds
  misc_feature: MA Experiment ID: 20000180 Result: Up-regulated in Transcription
  misc_feature: MA Experiment 20000180 PARAMETER Experiment Name: At_Germinating_Seeds_P Parameter: Age (hr) Value: 24 vs. 0
  misc_feature: MA Experiment 20000180 PARAMETER Experiment Name: At_Germinating_Seeds_P Parameter: Tissue Value: Germinating Seeds
  misc_feature: MA Experiment ID: 20000227 Result: Up-regulated in Transcription
  misc_feature: MA Experiment 20000227 PARAMETER Experiment Name: At_Root-Tips-vs-Tops_P Parameter: Tissue Value: Root Tips vs. Root Tops
  misc_feature: MA Experiment ID: 20000437 Result: Up-regulated in Transcription
  misc_feature: MA Experiment 20000437 PARAMETER Experiment Name: At_Drought_P Parameter: Age (day) Value: 8
  misc_feature: MA Experiment 20000437 PARAMETER Experiment Name: At_Drought_P Parameter: Organism Value: A. thaliana
  misc_feature: MA Experiment 20000437 PARAMETER Experiment Name: At_Drought_P Parameter: Plant Line Value: WS
  misc_feature: MA Experiment 20000437 PARAMETER Experiment Name: At_Drought_P Parameter: Timepoint (hr) Value: 24
  misc_feature: MA Experiment 20000437 PARAMETER Experiment Name: At_Drought_P Parameter: Tissue Value: Whole Plant
  misc_feature: MA Experiment 20000437 PARAMETER Experiment Name: At_Drought_P Parameter: Treatment Value: Drought vs. No Drought
  misc_feature: MA Experiment ID: 20001248 Result: Up-regulated in Transcription
  misc_feature: MA Experiment 20001248 PARAMETER Experiment Name: At_Far-red-induction_P Parameter: Age (day) Value: 7
  misc_feature: MA Experiment 20001248 PARAMETER Experiment Name: At_Far-red-induction_P Parameter: Light Value: Far-red vs. White
  misc_feature: MA Experiment 20001248 PARAMETER Experiment Name: At_Far-red-induction_P Parameter: Organism Value: A. thaliana
  misc_feature: MA Experiment 20001248 PARAMETER Experiment Name: At_Far-red-induction_P Parameter: Plant Line Value: Columbia
  misc_feature: MA Experiment 20001248 PARAMETER Experiment Name: At_Far-red-induction_P Parameter: Timepoint (hr) Value: 4
  misc_feature: MA Experiment 20001248 PARAMETER Experiment Name: At_Far-red-induction_P Parameter: Tissue Value: Whole Plant
  misc_feature: MA Experiment ID: 20001558 Result: Down-regulated in Transcription
  misc_feature: MA Experiment 20001558 PARAMETER Experiment Name: At_Drought_Soil_Dry_P Parameter: Age (day) Value: 27
  misc_feature: MA Experiment 20001558 PARAMETER Experiment Name: At_Drought_Soil_Dry_P Parameter: Organism Value: A. thaliana
  misc_feature: MA Experiment 20001558 PARAMETER Experiment Name: At_Drought_Soil_Dry_P Parameter: Plant Line Value: WS
  misc_feature: MA Experiment 20001558 PARAMETER Experiment Name: At_Drought_Soil_Dry_P Parameter: Post Timepoint (hr) Value: 6
  misc_feature: MA Experiment 20001558 PARAMETER Experiment Name: At_Drought_Soil_Dry_P Parameter: Post-Treatment Value: Re-Water vs. No Drought
  misc_feature: MA Experiment 20001558 PARAMETER Experiment Name: At_Drought_Soil_Dry_P Parameter: Timepoint (day) Value: 13
  misc_feature: MA Experiment 20001558 PARAMETER Experiment Name: At_Drought_Soil_Dry_P Parameter: Treatment Value: Drought vs. No Drought
caggaaacctagttatgggaggtctgatgatcaggtggagagttacattaagcctagctatggaagatctgaggaacaggaggagggaagttacaggaagcctagttatgggaggtctgaggaacaggaagaggggagttacaggaagcagcctagctatggccgtggcaatgacgatgatgatgatgagcagcgtaggaaccgttctggttctggtgatgatgaggaagggagctatggccgcaagaaatatggtggcaatgactctgatgaggatgaggagaagaagaagcaccgtcacaagcatcaccaccagaagcgtcgtgaagaagacgatgagtaaactaaaccctctctgtgctagagagtgtaatgagaatgtgtgtttgcttagcctcaaaaatctactaaataaagagctaagtcacatacctttctacataatatcttccgacgttggtgttgtgtttgtttgaatctctgtattattactacagagtcttcgtactggttcataataagacctttaagtggtattgggtcaccatgtaactgttgctactctgtttcgttttctatctatcgttttgtgttatgattc

SEQ ID NO: 24794 - protein, 157 aa, Arabidopsis thaliana
  peptide (1)..(157): Ceres Seq. ID no. 12337478
  misc_feature (1)..(157): Homolog of NCBI NO: 18421880 NR Description: putative protein
GNLVMGGLMIRWRVTLSLAMEDLRNRRREVTGSLVMGGLRNRKRGVTGSSLAMAVAMTMMMMSSVGTVLVLVMMRKGAMAARNMVAMTLMRMRRRRSTVTSITTRSVVKKTMSKLNPLCARECNENVCLLSLKNLLNKELSHIPFYIISSDVGVVFV

SEQ ID NO: 24795 - protein, 153 aa, Arabidopsis thaliana
  peptide (1)..(153): Ceres Seq. ID no. 12337479
  misc_feature (1)..(153): Homolog of NCBI NO: 18421880 NR Description: putative protein
MGGLMIRWRVTLSLAMEDLRNRRREVTGSLVMGGLRNRKRGVTGSSLAMAVAMTMMMMSSVGTVLVLVMMRKGAMAARNMVAMTLMRMRRRRSTVTSITTRSVVKKTMSKLNPLCARECNENVCLLSLKNLLNKELSHIPFYIISSDVGVVFV

SEQ ID NO: 24796 - protein, 149 aa, Arabidopsis thaliana
  peptide (1)..(149): Ceres Seq. ID no. 12337480
  misc_feature (1)..(149): Homolog of NCBI NO: 18421880 NR Description: putative protein
MIRWRVTLSLAMEDLRNRRREVTGSLVMGGLRNRKRGVTGSSLAMAVAMTMMMMSSVGTVLVLVMMRKGAMAARNMVAMTLMRMRRRRSTVTSITTRSVVKKTMSKLNPLCARECNENVCLLSLKNLLNKELSHIPFYIISSDVGVVFV

SEQ ID NO: 24797 - protein, 113 aa, Arabidopsis thaliana
  peptide (1)..(113): Ceres Seq. ID no. 12337481
  misc_feature (18)..(93): Pfam Name: Prothymosin/parathymosin family Pfam Description: Prothymosin/parathymosin family
  misc_feature (2)..(113): Homolog of NCBI NO: 15228587 NR Description: hypothetical protein; protein id: At3g29075.1
  misc_feature (5)..(112): Homolog of NCBI NO: 32352182 NR Description: hypothetical protein [Oryza sativa (japonica
  misc_feature (1)..(113): Homolog of NCBI NO: 24417262 NR Description: unknown [Arabidopsis thaliana]
  misc_feature (1)..(113): Homolog of NCBI NO: 9758332 NR Description: gene_id:MIJ24.6~ref|NP_013897.1~similar to
  misc_feature (1)..(113): Homolog of NCBI NO: 24417262 NR Description: unknown [Arabidopsis thaliana]
  misc_feature (1)..(113): Homolog of NCBI NO: 9758332 NR Description: gene_id:MIJ24.6~ref|NP_013897.1~similar to
  misc_feature (1)..(113): Homolog of NCBI NO: 24417262 NR Description: unknown [Arabidopsis thaliana]
  misc_feature (1)..(113): Homolog of NCBI NO: 9758332 NR Description: gene_id:MIJ24.6~ref|NP_013897.1~similar to
  misc_feature (1)..(113): Homolog of NCBI NO: 24417262 NR Description: unknown [Arabidopsis thaliana]
  misc_feature (1)..(113): Homolog of NCBI NO: 9758332 NR Description: gene_id:MIJ24.6~ref|NP_013897.1~similar to
RKPSYGRSDDQVESYIKPSYGRSEEQEEGSYRKPSYGRSEEQEEGSYRKQPSYGRGNDDDDDEQRRNRSGSGDDEEGSYGRKKYGGNDSDEDEEKKKHRHKHHHQKRREEDDE

SEQ ID NO: 24798 - DNA, 994 bp, Arabidopsis thaliana
  misc_feature (1)..(994): Ceres Seq. ID no. 12482732
  misc_feature: MA Experiment ID: 108434 Result: Down-regulated in Transcription
  misc_feature: MA Experiment 108434 PARAMETER Experiment Name: At_Root_Tips_cDNA_P Parameter: Tissue Value: Root Tips
  misc_feature: MA Experiment ID: 108461 Result: Up-regulated in Transcription
  misc_feature: MA Experiment 108461 PARAMETER Experiment Name: At_Germinating_Seeds_cDNA_P Parameter: Age (day) Value: 1 vs. 0
  misc_feature: MA Experiment 108461 PARAMETER Experiment Name: At_Germinating_Seeds_cDNA_P Parameter: Tissue Value: Germinating Seeds
  misc_feature: MA Experiment ID: 108462 Result: Up-regulated in Transcription
  misc_feature: MA Experiment 108462 PARAMETER Experiment Name: At_Germinating_Seeds_cDNA_P Parameter: Age (day) Value: 2 vs. 0
  misc_feature: MA Experiment 108462 PARAMETER Experiment Name: At_Germinating_Seeds_cDNA_P Parameter: Tissue Value: Germinating Seeds
  misc_feature: MA Experiment ID: 108463 Result: Up-regulated in Transcription
  misc_feature: MA Experiment 108463 PARAMETER Experiment Name: At_Germinating_Seeds_cDNA_P Parameter: Age (day) Value: 3 vs. 0
  misc_feature: MA Experiment 108463 PARAMETER Experiment Name: At_Germinating_Seeds_cDNA_P Parameter: Tissue Value: Germinating Seeds
  misc_feature: MA Experiment ID: 108488 Result: Up-regulated in Transcription
  misc_feature: MA Experiment ID: 108594 Result: Down-regulated in Transcription
  misc_feature: MA Experiment 108594 PARAMETER Experiment Name: At_Ler-rhl_Root_cDNA_P Parameter: Plant Line Value: null
  misc_feature: MA Experiment ID: 108595 Result: Down-regulated in Transcription
  misc_feature: MA Experiment 108595 PARAMETER Experiment Name: At_Ler-pi_Ovule_cDNA_P Parameter: Plant Line Value: null
  misc_feature: MA Experiment ID: 20000072 Result: Down-regulated in Transcription
  misc_feature: MA Experiment 20000072 PARAMETER Experiment Name: At_100uM_ABA_Mutants_cDNA_P Parameter: Plant Line Value: CS8105
  misc_feature: MA Experiment 20000072 PARAMETER Experiment Name: At_100uM_ABA_Mutants_cDNA_P Parameter: Timepoint (hr) Value: 6
  misc_feature: MA Experiment 20000072 PARAMETER Experiment Name: At_100uM_ABA_Mutants_cDNA_P Parameter: Tissue Value: Aerial
  misc_feature: MA Experiment 20000072 PARAMETER Experiment Name: At_100uM_ABA_Mutants_cDNA_P Parameter: Treatment Value: 100uM ABA vs. No Treatment
  misc_feature: MA Experiment ID: 20000086 Result: Down-regulated in Transcription
  misc_feature: MA Experiment 20000086 PARAMETER Experiment Name: At_100uM_ABA_Mutants_cDNA_P Parameter: Plant Line Value: CS22
  misc_feature: MA Experiment 20000086 PARAMETER Experiment Name: At_100uM_ABA_Mutants_cDNA_P Parameter: Timepoint (hr) Value: 6
  misc_feature: MA Experiment 20000086 PARAMETER Experiment Name: At_100uM_ABA_Mutants_cDNA_P Parameter: Tissue Value: Aerial
  misc_feature: MA Experiment 20000086 PARAMETER Experiment Name: At_100uM_ABA_Mutants_cDNA_P Parameter: Treatment Value: 100uM ABA vs. No Treatment
  misc_feature: MA Experiment ID: 20000087 Result: Down-regulated in Transcription
  misc_feature: MA Experiment 20000087 PARAMETER Experiment Name: At_100uM_ABA_Mutants_cDNA_P Parameter: Plant Line Value: WS
  misc_feature: MA Experiment 20000087 PARAMETER Experiment Name: At_100uM_ABA_Mutants_cDNA_P Parameter: Timepoint (hr) Value: 6
  misc_feature: MA Experiment 20000087 PARAMETER Experiment Name: At_100uM_ABA_Mutants_cDNA_P Parameter: Tissue Value: Aerial
  misc_feature: MA Experiment 20000087 PARAMETER Experiment Name: At_100uM_ABA_Mutants_cDNA_P Parameter: Treatment Value: 100uM ABA vs. No Treatment
  misc_feature: MA Experiment ID: 20000117 Result: Down-regulated in Transcription
  misc_feature: MA Experiment 20000117 PARAMETER Experiment Name: At_100uM_ABA_Mutants_cDNA_P Parameter: Plant Line Value: Columbia
  misc_feature: MA Experiment 20000117 PARAMETER Experiment Name: At_100uM_ABA_Mutants_cDNA_P Parameter: Timepoint (hr) Value: 6
  misc_feature: MA Experiment 20000117 PARAMETER Experiment Name: At_100uM_ABA_Mutants_cDNA_P Parameter: Tissue Value: Aerial
  misc_feature: MA Experiment 20000117 PARAMETER Experiment Name: At_100uM_ABA_Mutants_cDNA_P Parameter: Treatment Value: 100uM ABA vs. No Treatment
  misc_feature: MA Experiment ID: 20000179 Result: Up-regulated in Transcription
  misc_feature: MA Experiment 20000179 PARAMETER Experiment Name: At_Germinating_Seeds_P Parameter: Age (hr) Value: 6 vs. 0
  misc_feature: MA Experiment 20000179 PARAMETER Experiment Name: At_Germinating_Seeds_P Parameter: Tissue Value: Germinating Seeds
  misc_feature: MA Experiment ID: 20000180 Result: Up-regulated in Transcription
  misc_feature: MA Experiment 20000180 PARAMETER Experiment Name: At_Germinating_Seeds_P Parameter: Age (hr) Value: 24 vs. 0
  misc_feature: MA Experiment 20000180 PARAMETER Experiment Name: At_Germinating_Seeds_P Parameter: Tissue Value: Germinating Seeds
  misc_feature: MA Experiment ID: 20000184 Result: Up-regulated in Transcription
  misc_feature: MA Experiment 20000184 PARAMETER Experiment Name: At_Shoots__P Parameter: Age (day) Value: 7
  misc_feature: MA Experiment 20000184 PARAMETER Experiment Name: At_Shoots__P Parameter: Tissue Value: Shoots vs. Whole Plant
  misc_feature: MA Experiment ID: 20000185 Result: Down-regulated in Transcription
  misc_feature: MA Experiment 20000185 PARAMETER Experiment Name: At_Roots__P Parameter: Age (day) Value: 7 vs. 21
  misc_feature: MA Experiment 20000185 PARAMETER Experiment Name: At_Roots__P Parameter: Organism Value: A. thaliana
  misc_feature: MA Experiment 20000185 PARAMETER Experiment Name: At_Roots__P Parameter: Tissue Value: Roots vs. Whole Plant
  misc_feature: MA Experiment ID: 20000214 Result: Up-regulated in Transcription
  misc_feature: MA Experiment 20000214 PARAMETER Experiment Name: At_4deg_Cold_P Parameter: Timepoint (hr) Value: 6
  misc_feature: MA Experiment ID: 20000437 Result: Down-regulated in Transcription
  misc_feature: MA Experiment 20000437 PARAMETER Experiment Name: At_Drought_P Parameter: Age (day) Value: 8
  misc_feature: MA Experiment 20000437 PARAMETER Experiment Name: At_Drought_P Parameter: Organism Value: A. thaliana
  misc_feature: MA Experiment 20000437 PARAMETER Experiment Name: At_Drought_P Parameter: Plant Line Value: WS
  misc_feature: MA Experiment 20000437 PARAMETER Experiment Name: At_Drought_P Parameter: Timepoint (hr) Value: 24
  misc_feature: MA Experiment 20000437 PARAMETER Experiment Name: At_Drought_P Parameter: Tissue Value: Whole Plant
  misc_feature: MA Experiment 20000437 PARAMETER Experiment Name: At_Drought_P Parameter: Treatment Value: Drought vs. No Drought
  misc_feature: MA Experiment ID: 20000438 Result: Up-regulated in Transcription
  misc_feature: MA Experiment 20000438 PARAMETER Experiment Name: At_Shoots__P Parameter: Age (day) Value: 14
  misc_feature: MA Experiment 20000438 PARAMETER Experiment Name: At_Shoots__P Parameter: Tissue Value: Shoots vs. Whole Plant
  misc_feature: MA Experiment ID: 20000439 Result: Down-regulated in Transcription
  misc_feature: MA Experiment 20000439 PARAMETER Experiment Name: At_Roots__P Parameter: Age (day) Value: 14 vs. 21
  misc_feature: MA Experiment 20000439 PARAMETER Experiment Name: At_Roots__P Parameter: Organism Value: A. thaliana
  misc_feature: MA Experiment 20000439 PARAMETER Experiment Name: At_Roots__P Parameter: Tissue Value: Roots vs. Whole Plant
  misc_feature: MA Experiment ID: 20001248 Result: Down-regulated in Transcription
  misc_feature: MA Experiment 20001248 PARAMETER Experiment Name: At_Far-red-induction_P Parameter: Age (day) Value: 7
  misc_feature: MA Experiment 20001248 PARAMETER Experiment Name: At_Far-red-induction_P Parameter: Light Value: Far-red vs. White
  misc_feature: MA Experiment 20001248 PARAMETER Experiment Name: At_Far-red-induction_P Parameter: Organism Value: A. thaliana
  misc_feature: MA Experiment 20001248 PARAMETER Experiment Name: At_Far-red-induction_P Parameter: Plant Line Value: Columbia
  misc_feature: MA Experiment 20001248 PARAMETER Experiment Name: At_Far-red-induction_P Parameter: Timepoint (hr) Value: 4
  misc_feature: MA Experiment 20001248 PARAMETER Experiment Name: At_Far-red-induction_P Parameter: Tissue Value: Whole Plant
  misc_feature: MA Experiment ID: 20001450 Result: Down-regulated in Transcription
  misc_feature: MA Experiment 20001450 PARAMETER Experiment Name: At_Far-red-induction_P Parameter: Age (day) Value: 7
  misc_feature: MA Experiment 20001450 PARAMETER Experiment Name: At_Far-red-induction_P Parameter: Light Value: Far-red vs. White
  misc_feature: MA Experiment 20001450 PARAMETER Experiment Name: At_Far-red-induction_P Parameter: Organism Value: A. thaliana
  misc_feature: MA Experiment 20001450 PARAMETER Experiment Name: At_Far-red-induction_P Parameter: Plant Line Value: Columbia
  misc_feature: MA Experiment 20001450 PARAMETER Experiment Name: At_Far-red-induction_P Parameter: Timepoint (hr) Value: 8
  misc_feature: MA Experiment 20001450 PARAMETER Experiment Name: At_Far-red-induction_P Parameter: Tissue Value: Whole Plant
  misc_feature: MA Experiment ID: 20001451 Result: Down-regulated in Transcription
  misc_feature: MA Experiment 20001451 PARAMETER Experiment Name: At_Far-red-induction_P Parameter: Age (day) Value: 7
  misc_feature: MA Experiment 20001451 PARAMETER Experiment Name: At_Far-red-induction_P Parameter: Light Value: Far-red vs. White
  misc_feature: MA Experiment 20001451 PARAMETER Experiment Name: At_Far-red-induction_P Parameter: Organism Value: A. thaliana
  misc_feature: MA Experiment 20001451 PARAMETER Experiment Name: At_Far-red-induction_P Parameter: Plant Line Value: Columbia
  misc_feature: MA Experiment 20001451 PARAMETER Experiment Name: At_Far-red-induction_P Parameter: Timepoint (hr) Value: 24
  misc_feature: MA Experiment 20001451 PARAMETER Experiment Name: At_Far-red-induction_P Parameter: Tissue Value: Whole Plant
  misc_feature: MA Experiment ID: 20001757 Result: Up-regulated in Transcription
  misc_feature: MA Experiment 20001757 PARAMETER Experiment Name: At_50mM_NH4NO3_L-to-H_P Parameter: Timepoint (hr) Value: 6
  misc_feature: MA Experiment 20001757 PARAMETER Experiment Name: At_50mM_NH4NO3_L-to-H_P Parameter: Tissue Value: Leaf
  misc_feature: MA Experiment 20001757 PARAMETER Experiment Name: At_50mM_NH4NO3_L-to-H_P Parameter: Treatment Value: 50mM NH4NO3 vs 100mM Mannitol
  misc_feature: MA Experiment ID: 20001908 Result: Down-regulated in Transcription
  misc_feature: MA Experiment 20001908 PARAMETER Experiment Name: At_Drought_Reproduction_P Parameter: Age (day) Value: 40
  misc_feature: MA Experiment 20001908 PARAMETER Experiment Name: At_Drought_Reproduction_P Parameter: Organism Value: A. thaliana
  misc_feature: MA Experiment 20001908 PARAMETER Experiment Name: At_Drought_Reproduction_P Parameter: Plant Line Value: WS
  misc_feature: MA Experiment 20001908 PARAMETER Experiment Name: At_Drought_Reproduction_P Parameter: Timepoint (day) Value: 10
  misc_feature: MA Experiment 20001908 PARAMETER Experiment Name: At_Drought_Reproduction_P Parameter: Tissue Value: Siliques
  misc_feature: MA Experiment 20001908 PARAMETER Experiment Name: At_Drought_Reproduction_P Parameter: Treatment Value: Drought vs. No Drought
aacacaacacaaaacacatcactgatccttctctcatcctcagaaagaatggctcaaaccatgctgcttacttcaggcgtcaccgccggccattttttgaggaacaagagccctttggctcagcccaaagttcaccatctcttcctctctggaaactctccggttgcactaccatctaggagacaatcattcgttcctctcgctctcttcaaacccaaaaccaaagctgctcctaaaaaggttgagaagccgaagagcaaggttgaggatggcatctttggaacgtctggtgggattggtttcacaaaggcgaatgagctattcgttggtcgtgttgctatgatcggtttcgctgcatcgttgcttggtgaggcgttgacgggaaaagggatattagctcagctgaatctggagacagggataccgatttacgaagcagagccattgcttctcttcttcatcttgttcactctgttgggagccattggagctctcggagacagaggaaaattcgtcgacgatcctcccaccgggctcgagaaagccgtcattcctcccggcaaaaacgtccgatctgccctcggtctcaaagaacaaggtccattgtttgggttcacgaaggcgaacgagttattcgtaggaagattggcacagttgggaatagcattttcactgataggagagattattaccgggaaaggagcattagctcaactcaacattgagaccggtataccaattcaagatatcgaaccacttgtcctcttaaacgttgctttcttcttcttcgctgccattaatcctggtaatggaaaattcatcaccgatgatggtgaagaaagctaaattatcatgtacttaaatttagtagagagtgtgtgaccttctcttcatgttgagacaaaaggaaatggacagcttaaattgttgtaatacttatatccttttgtttttaacttggaattttctgattatatatagttttattacacct

SEQ ID NO: 24799 - protein, 281 aa, Arabidopsis thaliana
  peptide (1)..(281): Ceres Seq. ID no. 12482733
  misc_feature (76)..(229): Pfam Name: Chlorophyll A-B binding protein Pfam Description: Chlorophyll A-B binding protein
  misc_feature (17)..(280): Homolog of NCBI NO: 34908652 NR Description: putative photosystem II subunit (22KDa) precursor
  misc_feature (17)..(280): Homolog of NCBI NO: 18203444 NR Description: Photosystem II 22 kDa protein, chloroplast
  misc_feature (17)..(280): Homolog of NCBI NO: 18202913 NR Description: Photosystem II 22 kDa protein, chloroplast
  misc_feature (17)..(280): Homolog of NCBI NO: 1709846 NR Description: Photosystem II 22 kDa protein, chloroplast
  misc_feature (52)..(280): Homolog of NCBI NO: 7489520 NR Description: photosystem II 22-K chlorophyll-binding protein -
  misc_feature (52)..(280): Homolog of NCBI NO: 38345525 NR Description: OSJNBa0039K24.28 [Oryza sativa (japonica
  misc_feature (127)..(281): Homolog of NCBI NO: 6006279 NR Description: photosystem II 22 kDa protein [Arabidopsis
  misc_feature (17)..(280): Homolog of NCBI NO: 400890 NR Description: Photosystem II 22 kDa protein, chloroplast
  misc_feature (17)..(281): Homolog of NCBI NO: 15294226 NR Description: unknown protein [Arabidopsis thaliana]
  misc_feature (17)..(281): Homolog of NCBI NO: 15219418 NR Description: photosystem II 22kDa protein, putative
NTTQNTSLILLSSSERMAQTMLLTSGVTAGHFLRNKSPLAQPKVHHLFLSGNSPVALPSRRQSFVPLALFKPKTKAAPKKVEKPKSKVEDGIFGTSGGIGFTKANELFVGRVAMIGFAASLLGEALTGKGILAQLNLETGIPIYEAEPLLLFFILFTLLGAIGALGDRGKFVDDPPTGLEKAVIPPGKNVRSALGLKEQGPLFGFTKANELFVGRLAQLGIAFSLIGEIITGKGALAQLNIETGIPIQDIEPLVLLNVAFFFFAAINPGNGKFITDDGEES

SEQ ID NO: 24800 - protein, 265 aa, Arabidopsis thaliana
  peptide (1)..(265): Ceres Seq. ID no. 12482734
  misc_feature (60)..(213): Pfam Name: Chlorophyll A-B binding protein Pfam Description: Chlorophyll A-B binding protein
  misc_feature (111)..(265): Homolog of NCBI NO: 6006279 NR Description: photosystem II 22 kDa protein [Arabidopsis
  misc_feature (36)..(264): Homolog of NCBI NO: 7489520 NR Description: photosystem II 22-K chlorophyll-binding protein -
  misc_feature (36)..(264): Homolog of NCBI NO: 38345525 NR Description: OSJNBa0039K24.28 [Oryza sativa (japonica
  misc_feature (1)..(264): Homolog of NCBI NO: 34908652 NR Description: putative photosystem II subunit (22KDa) precursor
  misc_feature (1)..(264): Homolog of NCBI NO: 18203444 NR Description: Photosystem II 22 kDa protein, chloroplast
  misc_feature (1)..(264): Homolog of NCBI NO: 18202913 NR Description: Photosystem II 22 kDa protein, chloroplast
  misc_feature (1)..(264): Homolog of NCBI NO: 1709846 NR Description: Photosystem II 22 kDa protein, chloroplast
  misc_feature (1)..(264): Homolog of NCBI NO: 400890 NR Description: Photosystem II 22 kDa protein, chloroplast
  misc_feature (1)..(265): Homolog of NCBI NO: 15294226 NR Description: unknown protein [Arabidopsis thaliana]
  misc_feature (1)..(265): Homolog of NCBI NO: 15219418 NR Description: photosystem II 22kDa protein, putative
MAQTMLLTSGVTAGHFLRNKSPLAQPKVHHLFLSGNSPVALPSRRQSFVPLALFKPKTKAAPKKVEKPKSKVEDGIFGTSGGIGFTKANELFVGRVAMIGFAASLLGEALTGKGILAQLNLETGIPIYEAEPLLLFFILFTLLGAIGALGDRGKFVDDPPTGLEKAVIPPGKNVRSALGLKEQGPLFGFTKANELFVGRLAQLGIAFSLIGEIITGKGALAQLNIETGIPIQDIEPLVLLNVAFFFFAAINPGNGKFITDDGEES

SEQ ID NO: 24801 - protein, 261 aa, Arabidopsis thaliana
  peptide (1)..(261): Ceres Seq. ID no. 12482735
  misc_feature (56)..(209): Pfam Name: Chlorophyll A-B binding protein Pfam Description: Chlorophyll A-B binding protein
  misc_feature (107)..(261): Homolog of NCBI NO: 6006279 NR Description: photosystem II 22 kDa protein [Arabidopsis
  misc_feature (32)..(260): Homolog of NCBI NO: 7489520 NR Description: photosystem II 22-K chlorophyll-binding protein -
  misc_feature (32)..(260): Homolog of NCBI NO: 38345525 NR Description: OSJNBa0039K24.28 [Oryza sativa (japonica
  misc_feature (1)..(260): Homolog of NCBI NO: 34908652 NR Description: putative photosystem II subunit (22KDa) precursor
  misc_feature (1)..(260): Homolog of NCBI NO: 18203444 NR Description: Photosystem II 22 kDa protein, chloroplast
  misc_feature (1)..(260): Homolog of NCBI NO: 18202913 NR Description: Photosystem II 22 kDa protein, chloroplast
  misc_feature (1)..(260): Homolog of NCBI NO: 1709846 NR Description: Photosystem II 22 kDa protein, chloroplast
  misc_feature (1)..(260): Homolog of NCBI NO: 400890 NR Description: Photosystem II 22 kDa protein, chloroplast
  misc_feature (1)..(261): Homolog of NCBI NO: 15294226 NR Description: unknown protein [Arabidopsis thaliana]
  misc_feature (1)..(261): Homolog of NCBI NO: 15219418 NR Description: photosystem II 22kDa protein, putative
MLLTSGVTAGHFLRNKSPLAQPKVHHLFLSGNSPVALPSRRQSFVPLALFKPKTKAAPKKVEKPKSKVEDGIFGTSGGIGFTKANELFVGRVAMIGFAASLLGEALTGKGILAQLNLETGIPIYEAEPLLLFFILFTLLGAIGALGDRGKFVDDPPTGLEKAVIPPGKNVRSALGLKEQGPLFGFTKANELFVGRLAQLGIAFSLIGEIITGKGALAQLNIETGIPIQDIEPLVLLNVAFFFFAAINPGNGKFITDDGEES

SEQ ID NO: 24802 - DNA, 1565 bp, Arabidopsis thaliana
  misc_feature (1)..(1565): Ceres Seq. ID no. 12389093
  misc_feature: MA Experiment ID: 108461 Result: Down-regulated in Transcription
  misc_feature: MA Experiment 108461 PARAMETER Experiment Name: At_Germinating_Seeds_cDNA_P Parameter: Age (day) Value: 1 vs. 0
  misc_feature: MA Experiment 108461 PARAMETER Experiment Name: At_Germinating_Seeds_cDNA_P Parameter: Tissue Value: Germinating Seeds
  misc_feature: MA Experiment ID: 108464 Result: Down-regulated in Transcription
  misc_feature: MA Experiment 108464 PARAMETER Experiment Name: At_Germinating_Seeds_cDNA_P Parameter: Age (day) Value: 4 vs. 0
  misc_feature: MA Experiment 108464 PARAMETER Experiment Name: At_Germinating_Seeds_cDNA_P Parameter: Tissue Value: Germinating Seeds
  misc_feature: MA Experiment ID: 108668 Result: Up-regulated in Transcription
  misc_feature: MA Experiment 108668 PARAMETER Experiment Name: At_2mM_SA_cDNA_P Parameter: Plant Line Value: WS
  misc_feature: MA Experiment 108668 PARAMETER Experiment Name: At_2mM_SA_cDNA_P Parameter: Timepoint (hr) Value: 6
  misc_feature: MA Experiment 108668 PARAMETER Experiment Name: At_2mM_SA_cDNA_P Parameter: Treatment Value: 2mM SA vs. No Treatment
  misc_feature: MA Experiment ID: 20000179 Result: Down-regulated in Transcription
  misc_feature: MA Experiment 20000179 PARAMETER Experiment Name: At_Germinating_Seeds_P Parameter: Age (hr) Value: 6 vs. 0
  misc_feature: MA Experiment 20000179 PARAMETER Experiment Name: At_Germinating_Seeds_P Parameter: Tissue Value: Germinating Seeds
  misc_feature: MA Experiment ID: 20000180 Result: Down-regulated in Transcription
  misc_feature: MA Experiment 20000180 PARAMETER Experiment Name: At_Germinating_Seeds_P Parameter: Age (hr) Value: 24 vs. 0
  misc_feature: MA Experiment 20000180 PARAMETER Experiment Name: At_Germinating_Seeds_P Parameter: Tissue Value: Germinating Seeds
  misc_feature: MA Experiment ID: 20001755 Result: Down-regulated in Transcription
  misc_feature: MA Experiment 20001755 PARAMETER Experiment Name: At_50mM_NH4NO3_L-to-H_P Parameter: Timepoint (hr) Value: 2
  misc_feature: MA Experiment 20001755 PARAMETER Experiment Name: At_50mM_NH4NO3_L-to-H_P Parameter: Tissue Value: Leaf
  misc_feature: MA Experiment 20001755 PARAMETER Experiment Name: At_50mM_NH4NO3_L-to-H_P Parameter: Treatment Value: 50mM NH4NO3 vs 100mM Mannitol
aacgacaaattaattaaacttctccaaaactcttttcctctaaaaaatctcccaaatacagaaaaaaaaacaaagtcagtaagaaaaatggaagagagaaaagggaggagaataatcatgttccctcttccatttccagggcacttcaaccccatgatcgagctcgctggaatattccaccaccgtggcttctccgtgacgatcctccacacttcctacaacttccccgatccttctcgccacccacacttcacttttcgaaccatctctcacaacaaagaaggagaagaagatcctctgtctcagtcagaaacttcgagtatggacctaatcgttctcgttcgtcggctgaaacaacgctacgccgaaccgtttcgtaagtctgtggcggcggaagtaggtggaggagagacggtgtgttgtttggtctccgacgctatatgggggaagaacacggaggttgtagcggaagagattggagttcgtagggtggtgttgaggacaggtggtgcgtcgtcgttttgtgcttttgccgctttccctctccttagggataagggttacctccctatacaagattctagattagatgagccagtgacagagcttccacctttgaaagtgaaggatcttccggtaatggaaacgaatgagccggaggaactttaccgggtagttaacgacatggtggaaggagccaagtcttcttcaggagtcatatggaacacatttgaagatcttgaaagactatcacttatgaattgtagcagcaaattacaagttccatttttcccgatcggaccgtttcacaaatatagcgaagatcctacaccgaagacagagaacaaggaagataccgattggctcgacaagcaagacccacagtcggtggtctatgcgagtttcggaagccttgcagctatagaagagaaggagtttctcgagattgcttggggtctaagaaacagtgaacgaccgtttttgtgggtggttaggccggggtctgtcagggggaccgagtggctcgagtcattgcctttagggtttatggaaaacattggagataagggaaaaatcgtgaaatggacgaatcagttagaggtattggcgcatcctgccattggagcgttttggacacattgtggatggaactcgacactagagagcatatgtgaaggtgttcctatgatatgtacgtcatgtttcacggaccagcatgtgaacgcgagatacatcgttgatgtatggcgagtcgggatgttgttagagagaagtaagatggaaaagaaggagattgaaaaggtgctaagaagtgtaatgatggagaagggagatggattgagggaaaggagtttgaagttgaaagagagagctgatttttgcttaagtaaagatgggtcttcttccaagtatttagacaaatttgtgagtcatgtcctgtcttttgattcttatgcttttgcaagttaagaaaacttatgaatgactaatgtattctaagcactctccaaaagttccaaaaccattggatgttttgtttcttcaaataataatgttcttgagtc

SEQ ID NO: 24803 - protein, 489 aa, Arabidopsis thaliana
  peptide (1)..(489): Ceres Seq. ID no. 12389094
  misc_feature (36)..(483): Pfam Name: UDP-glucoronosyl and UDP-glucosyl transferase Pfam Description: UDP-glucoronosyl and UDP-glucosyl transferase
  misc_feature (33)..(482): Homolog of NCBI NO: 34395172 NR Description: putative UDP-glucosyltransferase
  misc_feature (30)..(479): Homolog of NCBI NO: 15239258 NR Description: glucuronosyl transferase-like protein; protein
  misc_feature (20)..(481): Homolog of NCBI NO: 34900662 NR Description: glucuronosyl transferase-like protein
  misc_feature (30)..(482): Homolog of NCBI NO: 15239259 NR Description: glucuronosyl transferase-like protein; protein
  misc_feature (31)..(480): Homolog of NCBI NO: 15239257 NR Description: glucuronosyl transferase-like protein
  misc_feature (30)..(482): Homolog of NCBI NO: 26452976 NR Description: unknown protein [Arabidopsis thaliana]
  misc_feature (30)..(482): Homolog of NCBI NO: 15229731 NR Description: glucosyl transferase, putative; protein id:
  misc_feature (30)..(489): Homolog of NCBI NO: 15228176 NR Description: glucuronosyl transferase - like protein; protein
  misc_feature (40)..(489): Homolog of NCBI NO: 21593451 NR Description: glucuronosyl transferase-like protein
  misc_feature (30)..(489): Homolog of NCBI NO: 15228174 NR Description: glucuronosyl transferase - like protein
NDKLIKLLQNSFPLKNLPNTEKKTKSVRKMEERKGRRIIMFPLPFPGHFNPMIELAGIFHHRGFSVTILHTSYNFPDPSRHPHFTFRTISHNKEGEEDPLSQSETSSMDLIVLVRRLKQRYAEPFRKSVAAEVGGGETVCCLVSDAIWGKNTEVVAEEIGVRRVVLRTGGASSFCAFAAFPLLRDKGYLPIQDSRLDEPVTELPPLKVKDLPVMETNEPEELYRVVNDMVEGAKSSSGVIWNTFEDLERLSLMNCSSKLQVPFFPIGPFHKYSEDPTPKTENKEDTDWLDKQDPQSVVYASFGSLAAIEEKEFLEIAWGLRNSERPFLWVVRPGSVRGTEWLESLPLGFMENIGDKGKIVKWTNQLEVLAHPAIGAFWTHCGWNSTLESICEGVPMICTSCFTDQHVNARYIVDVWRVGMLLERSKMEKKEIEKVLRSVMMEKGDGLRERSLKLKERADFCLSKDGSSSKYLDKFVSHVLSFDSYAFAS

SEQ ID NO: 24804 - protein, 460 aa, Arabidopsis thaliana
  peptide (1)..(460): Ceres Seq. ID no. 12389095
  misc_feature (7)..(454): Pfam Name: UDP-glucoronosyl and UDP-glucosyl transferase Pfam Description: UDP-glucoronosyl and UDP-glucosyl transferase
  misc_feature (4)..(453): Homolog of NCBI NO: 34395172 NR Description: putative UDP-glucosyltransferase
  misc_feature (1)..(450): Homolog of NCBI NO: 15239258 NR Description: glucuronosyl transferase-like protein; protein
  misc_feature (1)..(452): Homolog of NCBI NO: 34900662 NR Description: glucuronosyl transferase-like protein
  misc_feature (1)..(453): Homolog of NCBI NO: 15239259 NR Description: glucuronosyl transferase-like protein; protein
  misc_feature (2)..(451): Homolog of NCBI NO: 15239257 NR Description: glucuronosyl transferase-like protein
  misc_feature (1)..(453): Homolog of NCBI NO: 26452976 NR Description: unknown protein [Arabidopsis thaliana]
  misc_feature (1)..(453): Homolog of NCBI NO: 15229731 NR Description: glucosyl transferase, putative; protein id:
  misc_feature (1)..(460): Homolog of NCBI NO: 15228176 NR Description: glucuronosyl transferase - like protein; protein
  misc_feature (11)..(460): Homolog of NCBI NO: 21593451 NR Description: glucuronosyl transferase-like protein
  misc_feature (1)..(460): Homolog of NCBI NO: 15228174 NR Description: glucuronosyl transferase - like protein
MEERKGRRIIMFPLPFPGHFNPMIELAGIFHHRGFSVTILHTSYNFPDPSRHPHFTFRTISHNKEGEEDPLSQSETSSMDLIVLVRRLKQRYAEPFRKSVAAEVGGGETVCCLVSDAIWGKNTEVVAEEIGVRRVVLRTGGASSFCAFAAFPLLRDKGYLPIQDSRLDEPVTELPPLKVKDLPVMETNEPEELYRVVNDMVEGAKSSSGVIWNTFEDLERLSLMNCSSKLQVPFFPIGPFHKYSEDPTPKTENKEDTDWLDKQDPQSVVYASFGSLAAIEEKEFLEIAWGLRNSERPFLWVVRPGSVRGTEWLESLPLGFMENIGDKGKIVKWTNQLEVLAHPAIGAFWTHCGWNSTLESICEGVPMICTSCFTDQHVNARYIVDVWRVGMLLERSKMEKKEIEKVLRSVMMEKGDGLRERSLKLKERADFCLSKDGSSSKYLDKFVSHVLSFDSYAFAS

SEQ ID NO: 24805 - protein, 450 aa, Arabidopsis thaliana
  peptide (1)..(450): Ceres Seq. ID no. 12389096
  misc_feature (1)..(444): Pfam Name: UDP-glucoronosyl and UDP-glucosyl transferase Pfam Description: UDP-glucoronosyl and UDP-glucosyl transferase
  misc_feature (1)..(443): Homolog of NCBI NO: 34395172 NR Description: putative UDP-glucosyltransferase
  misc_feature (1)..(440): Homolog of NCBI NO: 15239258 NR Description: glucuronosyl transferase-like protein; protein
  misc_feature (1)..(442): Homolog of NCBI NO: 34900662 NR Description: glucuronosyl transferase-like protein
  misc_feature (1)..(443): Homolog of NCBI NO: 15239259 NR Description: glucuronosyl transferase-like protein; protein
  misc_feature (1)..(441): Homolog of NCBI NO: 15239257 NR Description: glucuronosyl transferase-like protein
  misc_feature (1)..(443): Homolog of NCBI NO: 26452976 NR Description: unknown protein [Arabidopsis thaliana]
  misc_feature (1)..(443): Homolog of NCBI NO: 15229731 NR Description: glucosyl transferase, putative; protein id:
  misc_feature (1)..(450): Homolog of NCBI NO: 15228176 NR Description: glucuronosyl transferase - like protein; protein
  misc_feature (1)..(450): Homolog of NCBI NO: 21593451 NR Description: glucuronosyl transferase-like protein
  misc_feature (1)..(450): Homolog of NCBI NO: 15228174 NR Description: glucuronosyl transferase - like protein
MFPLPFPGHFNPMIELAGIFHHRGFSVTILHTSYNFPDPSRHPHFTFRTISHNKEGEEDPLSQSETSSMDLIVLVRRLKQRYAEPFRKSVAAEVGGGETVCCLVSDAIWGKNTEVVAEEIGVRRVVLRTGGASSFCAFAAFPLLRDKGYLPIQDSRLDEPVTELPPLKVKDLPVMETNEPEELYRVVNDMVEGAKSSSGVIWNTFEDLERLSLMNCSSKLQVPFFPIGPFHKYSEDPTPKTENKEDTDWLDKQDPQSVVYASFGSLAAIEEKEFLEIAWGLRNSERPFLWVVRPGSVRGTEWLESLPLGFMENIGDKGKIVKWTNQLEVLAHPAIGAFWTHCGWNSTLESICEGVPMICTSCFTDQHVNARYIVDVWRVGMLLERSKMEKKEIEKVLRSVMMEKGDGLRERSLKLKERADFCLSKDGSSSKYLDKFVSHVLSFDSYAFAS

SEQ ID NO: 24806 - DNA, 1682 bp, Arabidopsis thaliana
  misc_feature (1)..(1682): Ceres Seq. ID no. 12340241
  misc_feature: MA Experiment ID: 108434 Result: Down-regulated in Transcription
  misc_feature: MA Experiment 108434 PARAMETER Experiment Name: At_Root_Tips_cDNA_P Parameter: Tissue Value: Root Tips
  misc_feature: MA Experiment ID: 108461 Result: Down-regulated in Transcription
  misc_feature: MA Experiment 108461 PARAMETER Experiment Name: At_Germinating_Seeds_cDNA_P Parameter: Age (day) Value: 1 vs. 0
  misc_feature: MA Experiment 108461 PARAMETER Experiment Name: At_Germinating_Seeds_cDNA_P Parameter: Tissue Value: Germinating Seeds
  misc_feature: MA Experiment ID: 108462 Result: Down-regulated in Transcription
  misc_feature: MA Experiment 108462 PARAMETER Experiment Name: At_Germinating_Seeds_cDNA_P Parameter: Age (day) Value: 2 vs. 0
  misc_feature: MA Experiment 108462 PARAMETER Experiment Name: At_Germinating_Seeds_cDNA_P Parameter: Tissue Value: Germinating Seeds
  misc_feature: MA Experiment ID: 108463 Result: Down-regulated in Transcription
  misc_feature: MA Experiment 108463 PARAMETER Experiment Name: At_Germinating_Seeds_cDNA_P Parameter: Age (day) Value: 3 vs. 0
  misc_feature: MA Experiment 108463 PARAMETER Experiment Name: At_Germinating_Seeds_cDNA_P Parameter: Tissue Value: Germinating Seeds
  misc_feature: MA Experiment ID: 108464 Result: Down-regulated in Transcription
  misc_feature: MA Experiment 108464 PARAMETER Experiment Name: At_Germinating_Seeds_cDNA_P Parameter: Age (day) Value: 4 vs. 0
  misc_feature: MA Experiment 108464 PARAMETER Experiment Name: At_Germinating_Seeds_cDNA_P Parameter: Tissue Value: Germinating Seeds
  misc_feature: MA Experiment ID: 108488 Result: Down-regulated in Transcription
  misc_feature: MA Experiment ID: 108573 Result: Up-regulated in Transcription
  misc_feature: MA Experiment 108573 PARAMETER Experiment Name: At_Drought_cDNA_P Parameter: Timepoint (hr) Value: 6
  misc_feature: MA Experiment 108573 PARAMETER Experiment Name: At_Drought_cDNA_P Parameter: Tissue Value: Aerial
  misc_feature: MA Experiment 108573 PARAMETER Experiment Name: At_Drought_cDNA_P Parameter: Treatment Value: Drought vs. No Drought
  misc_feature: MA Experiment ID: 108594 Result: Down-regulated in Transcription
  misc_feature: MA Experiment 108594 PARAMETER Experiment Name: At_Ler-rhl_Root_cDNA_P Parameter: Plant Line Value: null
  misc_feature: MA Experiment ID: 20000794 Result: Up-regulated in Transcription
  misc_feature: MA Experiment 20000794 PARAMETER Experiment Name: At_Petals_P Parameter: Age (day) Value: 23-25 days
  misc_feature: MA Experiment 20000794 PARAMETER Experiment Name: At_Petals_P Parameter: Plant Line Value: WS
  misc_feature: MA Experiment 20000794 PARAMETER Experiment Name: At_Petals_P Parameter: Tissue Value: Petals vs. Whole plant
  misc_feature: MA Experiment ID: 20001757 Result: Down-regulated in Transcription
  misc_feature: MA Experiment 20001757 PARAMETER Experiment Name: At_50mM_NH4NO3_L-to-H_P Parameter: Timepoint (hr) Value: 6
  misc_feature: MA Experiment 20001757 PARAMETER Experiment Name: At_50mM_NH4NO3_L-to-H_P Parameter: Tissue Value: Leaf
  misc_feature: MA Experiment 20001757 PARAMETER Experiment Name: At_50mM_NH4NO3_L-to-H_P Parameter: Treatment Value: 50mM NH4NO3 vs 100mM Mannitol
  misc_feature: MA Experiment ID: 20001905 Result: Up-regulated in Transcription
  misc_feature: MA Experiment 20001905 PARAMETER Experiment Name: At_Drought_Reproduction_P Parameter: Age (day) Value: 40
  misc_feature: MA Experiment 20001905 PARAMETER Experiment Name: At_Drought_Reproduction_P Parameter: Organism Value: A. thaliana
  misc_feature: MA Experiment 20001905 PARAMETER Experiment Name: At_Drought_Reproduction_P Parameter: Plant Line Value: WS
  misc_feature: MA Experiment 20001905 PARAMETER Experiment Name: At_Drought_Reproduction_P Parameter: Timepoint (day) Value: 10
  misc_feature: MA Experiment 20001905 PARAMETER Experiment Name: At_Drought_Reproduction_P Parameter: Tissue Value: Rosettes
  misc_feature: MA Experiment 20001905 PARAMETER Experiment Name: At_Drought_Reproduction_P Parameter: Treatment Value: Drought vs. No Drought
aattagattgtttttgttttgtttaacatcagttgcgaatcgagctggattcttgggctcgctttttctttcaatcaaaagtttcgatattagtgaaggataaaattcgctaaaaaaagagaattttttttgttaaaaaaattataaaagctggctttctcaaaatttctccatgtggtcgacgaagaagacgaagaagacgaagaagaaagagaaagtctcttagcaaacatgaccgccaccgaagctaagaatcgcaaaatcaatgtcggagatggagatgacgttgttgatatcgaaatccctgacactgctcatcaaattagtagcgattcatggtttcaggtggcgttcgttttgaccaccggtataaacagcgcgtatgtgttgggatattcaggaacaattatggttcctttaggttggattggtggtgtggttggtcttcttattgctactgcaatctctctttatacaaacactctaatagctaagcttcatgagtttggtggcagaagacacattcgctatagagaccttgctggattcatttacggtaggaaggcttatcatcttacatggggattgcaatatgttaatcttttcatgattaattgtggattcattatcctagctggttccgccttaaaggctgtttatgtgcttttcagggatgatcataccatgaaactacctcattttatagccattgctggtttgatttgtgcgattttcgctattgggattcctcatttatcggctcttggggtctggcttggagtttcgaccttcctcagtctcatctatattgttgtggcaatcgtgctatcggttagagatggagtaaaaacaccttcaagagattacgagatacaaggatcatcattgagcaaactttttaccatcacaggagcagccgcaaatctggttttcgcattcaacaccgggatgcttccagaaattcaggcaacagtgaggcaaccagttgttaaaaacatgatgaaggctctatactttcaattcacagcgggtgttttaccgatgtacgcagttacattcatcggatattgggcttatggatcctcaacctcgacctatctactaaacagtgttaatggcccactctgggtcaaagcccttgctaacgtctctgctatccttcaatctgttatctctttgcacatatttgcgagtccaacatatgagtacatggacacaaagtatgggatcaaaggaaacccatttgcgataaagaacttgctgtttaggatcatggcgagaggagggtacatagcggtaagcacgcttatctcagcgctgttgccgttcctcggtgacttcatgagcctaactggtgcagtgagcacattccctctcacattcattctagccaaccacatgtactataaggcaaagaacaataagctgaatgctatgcaaaagctatggcattggcttaacgttgtcttctttagtttgatgtctgttgctgcagccattgcagctgtcagactcatcgccgttgattccaaaaatttccatgtttttgcagatttgtaattcattatattatatagtcaattgtgtatccttcattcttaggcaggtttatttctcctgtaagcttgtattctctctctctttgtcttaccattagagcctaaataaataaatcaagttcc

SEQ ID NO: 24807 - protein, 442 aa, Arabidopsis thaliana
  peptide (1)..(442): Ceres Seq. ID no. 12340242
  misc_feature (15)..(442): Homolog of NCBI NO: 11358960 NR Description: proline transport protein [imported] - rice
  misc_feature (17)..(442): Homolog of NCBI NO: 11358950 NR Description: proline transport protein 3 [imported] - tomato
  misc_feature (22)..(442): Homolog of NCBI NO: 8571474 NR Description: proline/glycine betaine transporter [Atriplex
  misc_feature (17)..(442): Homolog of NCBI NO: 21069020 NR Description: betaine/proline transporter [Avicennia marina]
  misc_feature (17)..(442): Homolog of NCBI NO: 21069018 NR Description: betaine/proline transporter [Avicennia marina]
  misc_feature (1)..(442): Homolog of NCBI NO: 15228183 NR Description: proline transporter 2
  misc_feature (6)..(442): Homolog of NCBI NO: 21554196 NR Description: putative proline transporter [Arabidopsis
  misc_feature (6)..(442): Homolog of NCBI NO: 15228000 NR Description: putative proline transporter
  misc_feature (1)..(442): Homolog of NCBI NO: 15225591 NR Description: proline transporter 1
  misc_feature (1)..(442): Homolog of NCBI NO: 21593453 NR Description: proline transporter 1 [Arabidopsis thaliana]
MTATEAKNRKINVGDGDDVVDIEIPDTAHQISSDSWFQVAFVLTTGINSAYVLGYSGTIMVPLGWIGGVVGLLIATAISLYTNTLIAKLHEFGGRRHIRYRDLAGFIYGRKAYHLTWGLQYVNLFMINCGFIILAGSALKAVYVLFRDDHTMKLPHFIAIAGLICAIFAIGIPHLSALGVWLGVSTFLSLIYIVVAIVLSVRDGVKTPSRDYEIQGSSLSKLFTITGAAANLVFAFNTGMLPEIQATVRQPVVKNMMKALYFQFTAGVLPMYAVTFIGYWAYGSSTSTYLLNSVNGPLWVKALANVSAILQSVISLHIFASPTYEYMDTKYGIKGNPFAIKNLLFRIMARGGYIAVSTLISALLPFLGDFMSLTGAVSTFPLTFILANHMYYKAKNNKLNAMQKLWHWLNVVFFSLMSVAAAIAAVRLIAVDSKNFHVFADL

SEQ ID NO: 24808 - protein, 383 aa, Arabidopsis thaliana
  peptide (1)..(383): Ceres Seq. ID no. 12340243
  misc_feature (1)..(383): Homolog of NCBI NO: 11358960 NR Description: proline transport protein [imported] - rice
  misc_feature (1)..(383): Homolog of NCBI NO: 11358950 NR Description: proline transport protein 3 [imported] - tomato
  misc_feature (1)..(383): Homolog of NCBI NO: 8571474 NR Description: proline/glycine betaine transporter [Atriplex
  misc_feature (1)..(383): Homolog of NCBI NO: 21069020 NR Description: betaine/proline transporter [Avicennia marina]
  misc_feature (1)..(383): Homolog of NCBI NO: 21069018 NR Description: betaine/proline transporter [Avicennia marina]
  misc_feature (1)..(383): Homolog of NCBI NO: 15228183 NR Description: proline transporter 2
  misc_feature (1)..(383): Homolog of NCBI NO: 21554196 NR Description: putative proline transporter [Arabidopsis
  misc_feature (1)..(383): Homolog of NCBI NO: 15228000 NR Description: putative proline transporter
  misc_feature (1)..(383): Homolog of NCBI NO: 15225591 NR Description: proline transporter 1
  misc_feature (1)..(383): Homolog of NCBI NO: 21593453 NR Description: proline transporter 1 [Arabidopsis thaliana]
MVPLGWIGGVVGLLIATAISLYTNTLIAKLHEFGGRRHIRYRDLAGFIYGRKAYHLTWGLQYVNLFMINCGFIILAGSALKAVYVLFRDDHTMKLPHFIAIAGLICAIFAIGIPHLSALGVWLGVSTFLSLIYIVVAIVLSVRDGVKTPSRDYEIQGSSLSKLFTITGAAANLVFAFNTGMLPEIQATVRQPVVKNMMKALYFQFTAGVLPMYAVTFIGYWAYGSSTSTYLLNSVNGPLWVKALANVSAILQSVISLHIFASPTYEYMDTKYGIKGNPFAIKNLLFRIMARGGYIAVSTLISALLPFLGDFMSLTGAVSTFPLTFILANHMYYKAKNNKLNAMQKLWHWLNVVFFSLMSVAAAIAAVRLIAVDSKNFHVFADL

SEQ ID NO: 24809 - protein, 317 aa, Arabidopsis thaliana
  peptide (1)..(317): Ceres Seq. ID no. 12340244
  misc_feature (1)..(317): Homolog of NCBI NO: 21554196 NR Description: putative proline transporter [Arabidopsis
  misc_feature (1)..(317): Homolog of NCBI NO: 15228000 NR Description: putative proline transporter
  misc_feature (1)..(317): Homolog of NCBI NO: 15225591 NR Description: proline transporter 1
  misc_feature (1)..(317): Homolog of NCBI NO: 21593453 NR Description: proline transporter 1 [Arabidopsis thaliana]
  misc_feature (1)..(317): Homolog of NCBI NO: 11358960 NR Description: proline transport protein [imported] - rice
  misc_feature (1)..(317): Homolog of NCBI NO: 11358950 NR Description: proline transport protein 3 [imported] - tomato
  misc_feature (1)..(317): Homolog of NCBI NO: 8571474 NR Description: proline/glycine betaine transporter [Atriplex
  misc_feature (1)..(317): Homolog of NCBI NO: 21069020 NR Description: betaine/proline transporter [Avicennia marina]
  misc_feature (1)..(317): Homolog of NCBI NO: 21069018 NR Description: betaine/proline transporter [Avicennia marina]
  misc_feature (1)..(317): Homolog of NCBI NO: 15228183 NR Description: proline transporter 2
MINCGFIILAGSALKAVYVLFRDDHTMKLPHFIAIAGLICAIFAIGIPHLSALGVWLGVSTFLSLIYIVVAIVLSVRDGVKTPSRDYEIQGSSLSKLFTITGAAANLVFAFNTGMLPEIQATVRQPVVKNMMKALYFQFTAGVLPMYAVTFIGYWAYGSSTSTYLLNSVNGPLWVKALANVSAILQSVISLHIFASPTYEYMDTKYGIKGNPFAIKNLLFRIMARGGYIAVSTLISALLPFLGDFMSLTGAVSTFPLTFILANHMYYKAKNNKLNAMQKLWHWLNVVFFSLMSVAAAIAAVRLIAVDSKNFHVFADL

SEQ ID NO: 24810 - DNA, 1386 bp, Arabidopsis thaliana
  misc_feature (1)..(1386): Ceres Seq. ID no. 12738842
  misc_feature: MA Experiment ID: 20000315 Result: Up-regulated in Transcription
  misc_feature: MA Experiment 20000315 PARAMETER Experiment Name: At_14day_Shoots-Roots_Sub_P Parameter: Age (day) Value: 14
  misc_feature: MA Experiment 20000315 PARAMETER Experiment Name: At_14day_Shoots-Roots_Sub_P Parameter: Organism Value: A. thaliana
  misc_feature: MA Experiment 20000315 PARAMETER Experiment Name: At_14day_Shoots-Roots_Sub_P Parameter: Plant Line Value: WS
  misc_feature: MA Experiment 20000315 PARAMETER Experiment Name: At_14day_Shoots-Roots_Sub_P Parameter: Tissue Value: Shoots vs. Whole Plant
  misc_feature: MA Experiment ID: 20000328 Result: Up-regulated in Transcription
  misc_feature: MA Experiment 20000328 PARAMETER Experiment Name: At_42deg_Heat_Sub_P Parameter: Age (day) Value: 14
  misc_feature: MA Experiment 20000328 PARAMETER Experiment Name: At_42deg_Heat_Sub_P Parameter: Organism Value: A. thaliana
  misc_feature: MA Experiment 20000328 PARAMETER Experiment Name: At_42deg_Heat_Sub_P Parameter: Plant Line Value: WS
  misc_feature: MA Experiment 20000328 PARAMETER Experiment Name: At_42deg_Heat_Sub_P Parameter: Temperature (deg C) Value: 42 vs. 22
  misc_feature: MA Experiment 20000328 PARAMETER Experiment Name: At_42deg_Heat_Sub_P Parameter: Timepoint (hr) Value: 6
  misc_feature: MA Experiment 20000328 PARAMETER Experiment Name: At_42deg_Heat_Sub_P Parameter: Tissue Value: Aerial
attttctctacttgtccacttttctacagccgcatcatccttctcccttgtgcgatatcgtttgcgtgagatttgtctgaaaagtagctaaccatgggtaaagagaagtttcacatcaacattgtggtcattggccacgtcgattctggaaagtcgacaaccactggacacttgatctacaagttgggtggtattgacaagcgtgtgatcgagaggttcgagaaggaggctgctgagatgaacaagaggtccttcaagtacgcatgggtgttggacaaacttaaggctgagcgtgagcgtggtatcaccattgacattgctctctggaagttcgagaccaccaagtactactgcactgtcattgatgctcctggtcatcgtgatttcatcaagaacatgatcactggtacctcccaggctgattgtgctgtccttatcatcgactccaccactggtggttttgaggctggtatctccaaggatggtcagacccgtgagcacgctctccttgctttcacccttggtgtcaagcagatgatctgctgttgtaacaagatggatgccactacccccaagtactccaaggccaggtacgatgaaatcatcaaggaggtgtcttcctacttgaagaaggttggttacaaccccgacaaaatcccatttgtgcccatctctggatttgagggtgacaacatgattgagaggtccaccaaccttgactggtacaagggaccaactctccttgaggctcttgaccagatcaacgagcccaagaggccgtcagacaagccccttcgtctcccacttcaggatgtctacaagattggtggtattggaacggtgccattgggacgtgttgagactggtatgatcaagcctggtatggttgtgacctttgctcccacaggattgaccactgaggtcaagtctgttgagatgcaccacgagtctcttcttgaggcacttccaggtgacaacgttgggttcaatgttaagaatgttgccgtgaaggatcttaagagagggtacgtcgcatccaactccaaggatgaccctgccaagggtgctgctaacttcacctcccaggtcatcatcatgaaccaccctggtcagattggtaacggttacgccccagtcttggattgccacacctctcacattgcagtcaagttctctgagatcttgaccaagattgacaggcgttctggtaaggagattgagaaggagcccaaattcttgaagaatggtgatgctggtatggtgaagatgactccaaccaagcccatggttgtggagaccttctctgagtacccaccacttggacgtttcgctgttagggacatgaggcagactgttgcagtcggtgttatcaagagtgttgacaag

SEQ ID NO: 24811 - protein, 431 aa, Arabidopsis thaliana
  peptide (1)..(431): Ceres Seq. ID no. 12738843
  misc_feature (5)..(227): Pfam Name: Elongation factor Tu GTP binding domain Pfam Description: Elongation factor Tu GTP binding domain
  misc_feature (1)..(430): Homolog of NCBI NO: 15081765 NR Description: At1g07930/T6D22_3 [Arabidopsis thaliana]
  misc_feature (1)..(430): Homolog of NCBI NO: 17064954 NR Description: putative elongation factor 1-a [Arabidopsis
  misc_feature (1)..(430): Homolog of NCBI NO: 18086389 NR Description: At1g07930/T6D22_3 [Arabidopsis thaliana]
  misc_feature (1)..(430): Homolog of NCBI NO: 23397097 NR Description: putative translation elongation factor eEF-1
  misc_feature (1)..(430): Homolog of NCBI NO: 13430510 NR Description: putative translation elongation factor eEF-1
  misc_feature (1)..(430): Homolog of NCBI NO: 13605682 NR Description: At1g07930/T6D22_3 [Arabidopsis thaliana]
  misc_feature (1)..(430): Homolog of NCBI NO: 99688 NR Description: translation elongation factor eEF-1 alpha chain
  misc_feature (1)..(430): Homolog of NCBI NO: 25407012 NR Description: protein T6D22.2 [imported] - Arabidopsis thaliana
  misc_feature (1)..(430): Homolog of NCBI NO: 15239308 NR Description: elongation factor 1-alpha (EF-1-alpha)
  misc_feature (1)..(430): Homolog of NCBI NO: 25407012 NR Description: protein T6D22.2 [imported] - Arabidopsis thaliana
MGKEKFHINIVVIGHVDSGKSTTTGHLIYKLGGIDKRVIERFEKEAAEMNKRSFKYAWVLDKLKAERERGITIDIALWKFETTKYYCTVIDAPGHRDFIKNMITGTSQADCAVLIIDSTTGGFEAGISKDGQTREHALLAFTLGVKQMICCCNKMDATTPKYSKARYDEIIKEVSSYLKKVGYNPDKIPFVPISGFEGDNMIERSTNLDWYKGPTLLEALDQINEPKRPSDKPLRLPLQDVYKIGGIGTVPLGRVETGMIKPGMVVTFAPTGLTTEVKSVEMHHESLLEALPGDNVGFNVKNVAVKDLKRGYVASNSKDDPAKGAANFTSQVIIMNHPGQIGNGYAPVLDCHTSHIAVKFSEILTKIDRRSGKEIEKEPKFLKNGDAGMVKMTPTKPMVVETFSEYPPLGRFAVRDMRQTVAVGVIKSVDK

SEQ ID NO: 24812 - protein, 383 aa, Arabidopsis thaliana
  peptide (1)..(383): Ceres Seq. ID no. 12738844
  misc_feature (1)..(179): Pfam Name: Elongation factor Tu GTP binding domain Pfam Description: Elongation factor Tu GTP binding domain
  misc_feature (1)..(382): Homolog of NCBI NO: 15081765 NR Description: At1g07930/T6D22_3 [Arabidopsis thaliana]
  misc_feature (1)..(382): Homolog of NCBI NO: 17064954 NR Description: putative elongation factor 1-a [Arabidopsis
  misc_feature (1)..(382): Homolog of NCBI NO: 18086389 NR Description: At1g07930/T6D22_3 [Arabidopsis thaliana]
  misc_feature (1)..(382): Homolog of NCBI NO: 23397097 NR Description: putative translation elongation factor eEF-1
  misc_feature (1)..(382): Homolog of NCBI NO: 13430510 NR Description: putative translation elongation factor eEF-1
  misc_feature (1)..(382): Homolog of NCBI NO: 13605682 NR Description: At1g07930/T6D22_3 [Arabidopsis thaliana]
  misc_feature (1)..(382): Homolog of NCBI NO: 99688 NR Description: translation elongation factor eEF-1 alpha chain
  misc_feature (1)..(382): Homolog of NCBI NO: 25407012 NR Description: protein T6D22.2 [imported] - Arabidopsis thaliana
  misc_feature (1)..(382): Homolog of NCBI NO: 15239308 NR Description: elongation factor 1-alpha (EF-1-alpha)
  misc_feature (1)..(382): Homolog of NCBI NO: 25407012 NR Description: protein T6D22.2 [imported] - Arabidopsis thaliana
MNKRSFKYAWVLDKLKAERERGITIDIALWKFETTKYYCTVIDAPGHRDFIKNMITGTSQADCAVLIIDSTTGGFEAGISKDGQTREHALLAFTLGVKQMICCCNKMDATTPKYSKARYDEIIKEVSSYLKKVGYNPDKIPFVPISGFEGDNMIERSTNLDWYKGPTLLEALDQINEPKRPSDKPLRLPLQDVYKIGGIGTVPLGRVETGMIKPGMVVTFAPTGLTTEVKSVEMHHESLLEALPGDNVGFNVKNVAVKDLKRGYVASNSKDDPAKGAANFTSQVIIMNHPGQIGNGYAPVLDCHTSHIAVKFSEILTKIDRRSGKEIEKEPKFLKNGDAGMVKMTPTKPMVVETFSEYPPLGRFAVRDMRQTVAVGVIKSVDK

SEQ ID NO: 24813 - protein, 330 aa, Arabidopsis thaliana
  peptide (1)..(330): Ceres Seq. ID no. 12738845
  misc_feature (1)..(126): Pfam Name: Elongation factor Tu GTP binding domain Pfam Description: Elongation factor Tu GTP binding domain
  misc_feature (1)..(329): Homolog of NCBI NO: 15081765 NR Description: At1g07930/T6D22_3 [Arabidopsis thaliana]
  misc_feature (1)..(329): Homolog of NCBI NO: 17064954 NR Description: putative elongation factor 1-a [Arabidopsis
  misc_feature (1)..(329): Homolog of NCBI NO: 18086389 NR Description: At1g07930/T6D22_3 [Arabidopsis thaliana]
  misc_feature (1)..(329): Homolog of NCBI NO: 23397097 NR Description: putative translation elongation factor eEF-1
  misc_feature (1)..(329): Homolog of NCBI NO: 13430510 NR Description: putative translation elongation factor eEF-1
  misc_feature (1)..(329): Homolog of NCBI NO: 13605682 NR Description: At1g07930/T6D22_3 [Arabidopsis thaliana]
  misc_feature (1)..(329): Homolog of NCBI NO: 99688 NR Description: translation elongation factor eEF-1 alpha chain
  misc_feature (1)..(329): Homolog of NCBI NO: 25407012 NR Description: protein T6D22.2 [imported] - Arabidopsis thaliana
  misc_feature (1)..(329): Homolog of NCBI NO: 15239308 NR Description: elongation factor 1-alpha (EF-1-alpha)
  misc_feature (1)..(329): Homolog of NCBI NO: 25407012 NR Description: protein T6D22.2 [imported] - Arabidopsis thaliana
MITGTSQADCAVLIIDSTTGGFEAGISKDGQTREHALLAFTLGVKQMICCCNKMDATTPKYSKARYDEIIKEVSSYLKKVGYNPDKIPFVPISGFEGDNMIERSTNLDWYKGPTLLEALDQINEPKRPSDKPLRLPLQDVYKIGGIGTVPLGRVETGMIKPGMVVTFAPTGLTTEVKSVEMHHESLLEALPGDNVGFNVKNVAVKDLKRGYVASNSKDDPAKGAANFTSQVIIMNHPGQIGNGYAPVLDCHTSHIAVKFSEILTKIDRRSGKEIEKEPKFLKNGDAGMVKMTPTKPMVVETFSEYPPLGRFAVRDMRQTVAVGVIKSVDK

SEQ ID NO: 24814 - DNA, 1319 bp, Arabidopsis thaliana
  misc_feature (1)..(1319): Ceres Seq. ID no. 13491755
ccctctcccccaatttcctcacttctctctctctctcttcataatcttttcattgatcatcgaccaaccaaaaacaaaaaaaactcaaaaaaatccaaaaaaatcagatctttgaaagcttttcttttgtaacactcgaaaaatggatccgtcctgtgcaaactcagtgaacggattctactcatttctaaacagatcaatggaagatctcgaaagagtttatctttcaaacaatttcatgtccgtacacttcttacagagagctctctgtcttctccgtacctctcactctcatctcactctcttagttcaaaaacttcaacttcccgtcggtgacaaatggctcgatgagtatatggacgaaagctccaaactttgggaagcttgtctcgtcatcaaatccgccgtctcctccgtcgaaaacttctcctccgccggaatttcgatcgcttccaccctcgaccgtcgtctctctcctcagctttctcgtcaggtgataagggcgatatcaggatgtagaagagaagcgatagggatagaggaagaaaacagagcattaatggagaacagagttcaaaggtttccgttttggtcggaacaaacgtcggcgacggcgatggagtcgtcgacgaagttacaaaacgggttcagtggttttcgcggcgtgctttacgcgacgaggaacatgagttcgcttctccttatggttttaatgaacggtctcgtctactgttttcccggagacgcggcaacgcaaacgcagacgcagataacgcaaacgcagagtcaagtcggaggtttcgccggagcaatggggaggttgcagcagagagtggcggctgaggttgggaggatggggataaggaaaggaatattgatgcacgagtatcgccggagcaaagcggcgttggaggagcttaaagcggagctggagcggcggttctgcggtggcggtggtggtgggggagagagggaggaggaggaggaggacgagagggagctgagagagagagttgagaatctgaaagggtattttggtaatttaaggaatgggacagagagtatagtggcgcaaatcgatgatttcttcgatgagattgttgaaggaaggaaaaagcttttggatttctgcagccatagatgatgaaatatcaaaagctgacattttgttttttatgtttacatgaaaaaaaaaaaaaaaagttgggttaggctttaggctctagatgaatcagttggtagggagttgttgtaattttttcttttttactttgttgttatgaaaaaaaataatttgaaatttgagaatttttgtcaag

SEQ ID NO: 24815 - protein, 333 aa, Arabidopsis thaliana
  peptide (1)..(333): Ceres Seq. ID no. 13491756
  misc_feature (9)..(332): Homolog of NCBI NO: 34907302 NR Description: hypothetical protein~similar to Arabidopsis
  misc_feature (222)..(333): Homolog of NCBI NO: 6573780 NR Description: F28K19.7 [Arabidopsis thaliana]
  misc_feature (4)..(118): Homolog of NCBI NO: 6573780 NR Description: F28K19.7 [Arabidopsis thaliana]
  misc_feature (117)..(272): Homolog of NCBI NO: 6573780 NR Description: F28K19.7 [Arabidopsis thaliana]
  misc_feature (1)..(333): Homolog of NCBI NO: 22330710 NR Description: hypothetical protein [Arabidopsis thaliana]
  misc_feature (1)..(333): Homolog of NCBI NO: 21593454 NR Description: unknown [Arabidopsis thaliana]
  misc_feature (1)..(333): Homolog of NCBI NO: 18395063 NR Description: expressed protein [Arabidopsis thaliana]
MDPSCANSVNGFYSFLNRSMEDLERVYLSNNFMSVHFLQRALCLLRTSHSHLTLLVQKLQLPVGDKWLDEYMDESSKLWEACLVIKSAVSSVENFSSAGISIASTLDRRLSPQLSRQVIRAISGCRREAIGIEEENRALMENRVQRFPFWSEQTSATAMESSTKLQNGFSGFRGVLYATRNMSSLLLMVLMNGLVYCFPGDAATQTQTQITQTQSQVGGFAGAMGRLQQRVAAEVGRMGIRKGILMHEYRRSKAALEELKAELERRFCGGGGGGGEREEEEEDERELRERVENLKGYFGNLRNGTESIVAQIDDFFDEIVEGRKKLLDFCSHR

SEQ ID NO: 24816 - protein, 314 aa, Arabidopsis thaliana
  peptide (1)..(314): Ceres Seq. ID no. 13491757
  misc_feature (1)..(313): Homolog of NCBI NO: 34907302 NR Description: hypothetical protein~similar to Arabidopsis
  misc_feature (203)..(314): Homolog of NCBI NO: 6573780 NR Description: F28K19.7 [Arabidopsis thaliana]
  misc_feature (1)..(99): Homolog of NCBI NO: 6573780 NR Description: F28K19.7 [Arabidopsis thaliana]
  misc_feature (98)..(253): Homolog of NCBI NO: 6573780 NR Description: F28K19.7 [Arabidopsis thaliana]
  misc_feature (1)..(314): Homolog of NCBI NO: 22330710 NR Description: hypothetical protein [Arabidopsis thaliana]
  misc_feature (1)..(314): Homolog of NCBI NO: 21593454 NR Description: unknown [Arabidopsis thaliana]
  misc_feature (1)..(314): Homolog of NCBI NO: 18395063 NR Description: expressed protein [Arabidopsis thaliana]
MEDLERVYLSNNFMSVHFLQRALCLLRTSHSHLTLLVQKLQLPVGDKWLDEYMDESSKLWEACLVIKSAVSSVENFSSAGISIASTLDRRLSPQLSRQVIRAISGCRREAIGIEEENRALMENRVQRFPFWSEQTSATAMESSTKLQNGFSGFRGVLYATRNMSSLLLMVLMNGLVYCFPGDAATQTQTQITQTQSQVGGFAGAMGRLQQRVAAEVGRMGIRKGILMHEYRRSKAALEELKAELERRFCGGGGGGGEREEEEEDERELRERVENLKGYFGNLRNGTESIVAQIDDFFDEIVEGRKKLLDFCSHR

SEQ ID NO: 24817 - protein, 301 aa, Arabidopsis thaliana
  peptide (1)..(301): Ceres Seq. ID no. 13491758
  misc_feature (1)..(300): Homolog of NCBI NO: 34907302 NR Description: hypothetical protein~similar to Arabidopsis
  misc_feature (190)..(301): Homolog of NCBI NO: 6573780 NR Description: F28K19.7 [Arabidopsis thaliana]
  misc_feature (1)..(86): Homolog of NCBI NO: 6573780 NR Description: F28K19.7 [Arabidopsis thaliana]
  misc_feature (85)..(240): Homolog of NCBI NO: 6573780 NR Description: F28K19.7 [Arabidopsis thaliana]
  misc_feature (1)..(301): Homolog of NCBI NO: 22330710 NR Description: hypothetical protein [Arabidopsis thaliana]
  misc_feature (1)..(301): Homolog of NCBI NO: 21593454 NR Description: unknown [Arabidopsis thaliana]
  misc_feature (1)..(301): Homolog of NCBI NO: 18395063 NR Description: expressed protein [Arabidopsis thaliana]
MSVHFLQRALCLLRTSHSHLTLLVQKLQLPVGDKWLDEYMDESSKLWEACLVIKSAVSSVENFSSAGISIASTLDRRLSPQLSRQVIRAISGCRREAIGIEEENRALMENRVQRFPFWSEQTSATAMESSTKLQNGFSGFRGVLYATRNMSSLLLMVLMNGLVYCFPGDAATQTQTQITQTQSQVGGFAGAMGRLQQRVAAEVGRMGIRKGILMHEYRRSKAALEELKAELERRFCGGGGGGGEREEEEEDERELRERVENLKGYFGNLRNGTESIVAQIDDFFDEIVEGRKKLLDFCSHR

SEQ ID NO: 24818 - DNA, 1498 bp, Arabidopsis thaliana
  misc_feature (1)..(1498): Ceres Seq. ID no. 13487577
  misc_feature: MA Experiment ID: 108434 Result: Down-regulated in Transcription
  misc_feature: MA Experiment 108434 PARAMETER Experiment Name: At_Root_Tips_cDNA_P Parameter: Tissue Value: Root Tips
  misc_feature: MA Experiment ID: 108435 Result: Down-regulated in Transcription
  misc_feature: MA Experiment 108435 PARAMETER Experiment Name: At_stm_Mutants_cDNA_P Parameter: Plant Line Value: wt Landsburg vs stm
  misc_feature: MA Experiment 108435 PARAMETER Experiment Name: At_stm_Mutants_cDNA_P Parameter: Tissue Value: Shoot Apical Meristem Region
  misc_feature: MA Experiment ID: 108462 Result: Up-regulated in Transcription
  misc_feature: MA Experiment 108462 PARAMETER Experiment Name: At_Germinating_Seeds_cDNA_P Parameter: Age (day) Value: 2 vs. 0
  misc_feature: MA Experiment 108462 PARAMETER Experiment Name: At_Germinating_Seeds_cDNA_P Parameter: Tissue Value: Germinating Seeds
  misc_feature: MA Experiment ID: 108464 Result: Up-regulated in Transcription
  misc_feature: MA Experiment 108464 PARAMETER Experiment Name: At_Germinating_Seeds_cDNA_P Parameter: Age (day) Value: 4 vs. 0
  misc_feature: MA Experiment 108464 PARAMETER Experiment Name: At_Germinating_Seeds_cDNA_P Parameter: Tissue Value: Germinating Seeds
  misc_feature: MA Experiment ID: 108573 Result: Down-regulated in Transcription
  misc_feature: MA Experiment 108573 PARAMETER Experiment Name: At_Drought_cDNA_P Parameter: Timepoint (hr) Value: 6
  misc_feature: MA Experiment 108573 PARAMETER Experiment Name: At_Drought_cDNA_P Parameter: Tissue Value: Aerial
  misc_feature: MA Experiment 108573 PARAMETER Experiment Name: At_Drought_cDNA_P Parameter: Treatment Value: Drought vs. No Drought
  misc_feature: MA Experiment ID: 108585 Result: Down-regulated in Transcription
  misc_feature: MA Experiment 108585 PARAMETER Experiment Name: At_5mM_NaNP_cDNA_P Parameter: Timepoint (hr) Value: 6
  misc_feature: MA Experiment 108585 PARAMETER Experiment Name: At_5mM_NaNP_cDNA_P Parameter: Tissue Value: Aerial
  misc_feature: MA Experiment 108585 PARAMETER Experiment Name: At_5mM_NaNP_cDNA_P Parameter: Treatment Value: null
  misc_feature: MA Experiment ID: 108595 Result: Down-regulated in Transcription
  misc_feature: MA Experiment 108595 PARAMETER Experiment Name: At_Ler-pi_Ovule_cDNA_P Parameter: Plant Line Value: null
  misc_feature: MA Experiment ID: 20000087 Result: Down-regulated in Transcription
  misc_feature: MA Experiment 20000087 PARAMETER Experiment Name: At_100uM_ABA_Mutants_cDNA_P Parameter: Plant Line Value: WS
  misc_feature: MA Experiment 20000087 PARAMETER Experiment Name: At_100uM_ABA_Mutants_cDNA_P Parameter: Timepoint (hr) Value: 6
  misc_feature: MA Experiment 20000087 PARAMETER Experiment Name: At_100uM_ABA_Mutants_cDNA_P Parameter: Tissue Value: Aerial
  misc_feature: MA Experiment 20000087 PARAMETER Experiment Name: At_100uM_ABA_Mutants_cDNA_P Parameter: Treatment Value: 100uM ABA vs. No Treatment
  misc_feature: MA Experiment ID: 20000117 Result: Down-regulated in Transcription
  misc_feature: MA Experiment 20000117 PARAMETER Experiment Name: At_100uM_ABA_Mutants_cDNA_P Parameter: Plant Line Value: Columbia
  misc_feature: MA Experiment 20000117 PARAMETER Experiment Name: At_100uM_ABA_Mutants_cDNA_P Parameter: Timepoint (hr) Value: 6
  misc_feature: MA Experiment 20000117 PARAMETER Experiment Name: At_100uM_ABA_Mutants_cDNA_P Parameter: Tissue Value: Aerial
  misc_feature: MA Experiment 20000117 PARAMETER Experiment Name: At_100uM_ABA_Mutants_cDNA_P Parameter: Treatment Value: 100uM ABA vs. No Treatment
  misc_feature: MA Experiment ID: 20000173 Result: Down-regulated in Transcription
  misc_feature: MA Experiment 20000173 PARAMETER Experiment Name: At_42deg_Heat_P Parameter: Age (day) Value: 14
  misc_feature: MA Experiment 20000173 PARAMETER Experiment Name: At_42deg_Heat_P Parameter: Organism Value: A. thaliana
  misc_feature: MA Experiment 20000173 PARAMETER Experiment Name: At_42deg_Heat_P Parameter: Plant Line Value: WS
  misc_feature: MA Experiment 20000173 PARAMETER Experiment Name: At_42deg_Heat_P Parameter: Temperature (deg C) Value: 42 vs. 22
  misc_feature: MA Experiment 20000173 PARAMETER Experiment Name: At_42deg_Heat_P Parameter: Timepoint (hr) Value: 6
  misc_feature: MA Experiment 20000173 PARAMETER Experiment Name: At_42deg_Heat_P Parameter: Tissue Value: Aerial
  misc_feature: MA Experiment ID: 20000185 Result: Down-regulated in Transcription
  misc_feature: MA Experiment 20000185 PARAMETER Experiment Name: At_Roots__P Parameter: Age (day) Value: 7 vs. 21
  misc_feature: MA Experiment 20000185 PARAMETER Experiment Name: At_Roots__P Parameter: Organism Value: A. thaliana
  misc_feature: MA Experiment 20000185 PARAMETER Experiment Name: At_Roots__P Parameter: Tissue Value: Roots vs. Whole Plant
  misc_feature: MA Experiment ID: 20000436 Result: Down-regulated in Transcription
  misc_feature: MA Experiment 20000436 PARAMETER Experiment Name: At_Drought_P Parameter: Age (day) Value: 7
  misc_feature: MA Experiment 20000436 PARAMETER Experiment Name: At_Drought_P Parameter: Organism Value: A. thaliana
  misc_feature: MA Experiment 20000436 PARAMETER Experiment Name: At_Drought_P Parameter: Plant Line Value: WS
  misc_feature: MA Experiment 20000436 PARAMETER Experiment Name: At_Drought_P Parameter: Timepoint (hr) Value: 12
  misc_feature: MA Experiment 20000436 PARAMETER Experiment Name: At_Drought_P Parameter: Tissue Value: Whole Plant
  misc_feature: MA Experiment 20000436 PARAMETER Experiment Name: At_Drought_P Parameter: Treatment Value: Drought vs. No Drought
  misc_feature: MA Experiment ID: 20000437 Result: Down-regulated in Transcription
  misc_feature: MA Experiment 20000437 PARAMETER Experiment Name: At_Drought_P Parameter: Age (day) Value: 8
  misc_feature: MA Experiment 20000437 PARAMETER Experiment Name: At_Drought_P Parameter: Organism Value: A. thaliana
  misc_feature: MA Experiment 20000437 PARAMETER Experiment Name: At_Drought_P Parameter: Plant Line Value: WS
  misc_feature: MA Experiment 20000437 PARAMETER Experiment Name: At_Drought_P Parameter: Timepoint (hr) Value: 24
  misc_feature: MA Experiment 20000437 PARAMETER Experiment Name: At_Drought_P Parameter: Tissue Value: Whole Plant
  misc_feature: MA Experiment 20000437 PARAMETER Experiment Name: At_Drought_P Parameter: Treatment Value: Drought vs. No Drought
  misc_feature: MA Experiment ID: 20000439 Result: Down-regulated in Transcription
  misc_feature: MA Experiment 20000439 PARAMETER Experiment Name: At_Roots__P Parameter: Age (day) Value: 14 vs. 21
  misc_feature: MA Experiment 20000439 PARAMETER Experiment Name: At_Roots__P Parameter: Organism Value: A. thaliana
  misc_feature: MA Experiment 20000439 PARAMETER Experiment Name: At_Roots__P Parameter: Tissue Value: Roots vs. Whole Plant
  misc_feature: MA Experiment ID: 20000527 Result: Down-regulated in Transcription
  misc_feature: MA Experiment 20000527 PARAMETER Experiment Name: At_10percent_PEG_P Parameter: Age (day) Value: 20
  misc_feature: MA Experiment 20000527 PARAMETER Experiment Name: At_10percent_PEG_P Parameter: Organism Value: A. thaliana
  misc_feature: MA Experiment 20000527 PARAMETER Experiment Name: At_10percent_PEG_P Parameter: Plant Line Value: WS
  misc_feature: MA Experiment 20000527 PARAMETER Experiment Name: At_10percent_PEG_P Parameter: Timepoint (day) Value: 20
  misc_feature: MA Experiment 20000527 PARAMETER Experiment Name: At_10percent_PEG_P Parameter: Tissue Value: Whole Plant
  misc_feature: MA Experiment 20000527 PARAMETER Experiment Name: At_10percent_PEG_P Parameter: Treatment Value: 10percent PEG vs. No Treatment
  misc_feature: MA Experiment ID: 20001555 Result: Down-regulated in Transcription
  misc_feature: MA Experiment 20001555 PARAMETER Experiment Name: At_Drought_Soil_Dry_P Parameter: Age (day) Value: 24
  misc_feature: MA Experiment 20001555 PARAMETER Experiment Name: At_Drought_Soil_Dry_P Parameter: Organism Value: A. thaliana
  misc_feature: MA Experiment 20001555 PARAMETER Experiment Name: At_Drought_Soil_Dry_P Parameter: Plant Line Value: WS
  misc_feature: MA Experiment 20001555 PARAMETER Experiment Name: At_Drought_Soil_Dry_P Parameter: Post Timepoint (hr) Value: None
  misc_feature: MA Experiment 20001555 PARAMETER Experiment Name: At_Drought_Soil_Dry_P Parameter: Post-Treatment Value: None
  misc_feature: MA Experiment 20001555 PARAMETER Experiment Name: At_Drought_Soil_Dry_P Parameter: Timepoint (day) Value: 10
  misc_feature: MA Experiment 20001555 PARAMETER Experiment Name: At_Drought_Soil_Dry_P Parameter: Treatment Value: Drought vs. No Drought
  misc_feature: MA Experiment ID: 20001556 Result: Down-regulated in Transcription
  misc_feature: MA Experiment 20001556 PARAMETER Experiment Name: At_Drought_Soil_Dry_P Parameter: Age (day) Value: 26
  misc_feature: MA Experiment 20001556 PARAMETER Experiment Name: At_Drought_Soil_Dry_P Parameter: Organism Value: A. thaliana
  misc_feature: MA Experiment 20001556 PARAMETER Experiment Name: At_Drought_Soil_Dry_P Parameter: Plant Line Value: WS
  misc_feature: MA Experiment 20001556 PARAMETER Experiment Name: At_Drought_Soil_Dry_P Parameter: Post Timepoint (hr) Value: None
  misc_feature: MA Experiment 20001556 PARAMETER Experiment Name: At_Drought_Soil_Dry_P Parameter: Post-Treatment Value: None
  misc_feature: MA Experiment 20001556 PARAMETER Experiment Name: At_Drought_Soil_Dry_P Parameter: Timepoint (day) Value: 12
  misc_feature: MA Experiment 20001556 PARAMETER Experiment Name: At_Drought_Soil_Dry_P Parameter: Treatment Value: Drought vs. No Drought
  misc_feature: MA Experiment ID: 20001559 Result: Down-regulated in Transcription
  misc_feature: MA Experiment 20001559 PARAMETER Experiment Name: At_Drought_Soil_Dry_P Parameter: Age (day) Value: 28
  misc_feature: MA Experiment 20001559 PARAMETER Experiment Name: At_Drought_Soil_Dry_P Parameter: Organism Value: A. thaliana
  misc_feature: MA Experiment 20001559 PARAMETER Experiment Name: At_Drought_Soil_Dry_P Parameter: Plant Line Value: WS
  misc_feature: MA Experiment 20001559 PARAMETER Experiment Name: At_Drought_Soil_Dry_P Parameter: Post Timepoint (hr) Value: 29
  misc_feature: MA Experiment 20001559 PARAMETER Experiment Name: At_Drought_Soil_Dry_P Parameter: Post-Treatment Value: Re-Water vs. No Drought
  misc_feature: MA Experiment 20001559 PARAMETER Experiment Name: At_Drought_Soil_Dry_P Parameter: Timepoint (day) Value: 14
  misc_feature: MA Experiment 20001559 PARAMETER Experiment Name: At_Drought_Soil_Dry_P Parameter: Treatment Value: Drought vs. No Drought
  misc_feature: MA Experiment ID: 20001904 Result: Down-regulated in Transcription
  misc_feature: MA Experiment 20001904 PARAMETER Experiment Name: At_Drought_Reproduction_P Parameter: Age (day) Value: 37
  misc_feature: MA Experiment 20001904 PARAMETER Experiment Name: At_Drought_Reproduction_P Parameter: Organism Value: A. thaliana
  misc_feature: MA Experiment 20001904 PARAMETER Experiment Name: At_Drought_Reproduction_P Parameter: Plant Line Value: WS
  misc_feature: MA Experiment 20001904 PARAMETER Experiment Name: At_Drought_Reproduction_P Parameter: Timepoint (day) Value: 7
  misc_feature: MA Experiment 20001904 PARAMETER Experiment Name: At_Drought_Reproduction_P Parameter: Tissue Value: Rosettes
  misc_feature: MA Experiment 20001904 PARAMETER Experiment Name: At_Drought_Reproduction_P Parameter: Treatment Value: Drought vs. No Drought
  misc_feature: MA Experiment ID: 20001905 Result: Down-regulated in Transcription
  misc_feature: MA Experiment 20001905 PARAMETER Experiment Name: At_Drought_Reproduction_P Parameter: Age (day) Value: 40
  misc_feature: MA Experiment 20001905 PARAMETER Experiment Name: At_Drought_Reproduction_P Parameter: Organism Value: A. thaliana
  misc_feature: MA Experiment 20001905 PARAMETER Experiment Name: At_Drought_Reproduction_P Parameter: Plant Line Value: WS
  misc_feature: MA Experiment 20001905 PARAMETER Experiment Name: At_Drought_Reproduction_P Parameter: Timepoint (day) Value: 10
  misc_feature: MA Experiment 20001905 PARAMETER Experiment Name: At_Drought_Reproduction_P Parameter: Tissue Value: Rosettes
  misc_feature: MA Experiment 20001905 PARAMETER Experiment Name: At_Drought_Reproduction_P Parameter: Treatment Value: Drought vs. No Drought
  misc_feature: MA Experiment ID: 20001906 Result: Down-regulated in Transcription
  misc_feature: MA Experiment 20001906 PARAMETER Experiment Name: At_Drought_Reproduction_P Parameter: Age (day) Value: 35
  misc_feature: MA Experiment 20001906 PARAMETER Experiment Name: At_Drought_Reproduction_P Parameter: Organism Value: A. thaliana
  misc_feature: MA Experiment 20001906 PARAMETER Experiment Name: At_Drought_Reproduction_P Parameter: Plant Line Value: WS
  misc_feature: MA Experiment 20001906 PARAMETER Experiment Name: At_Drought_Reproduction_P Parameter: Timepoint (day) Value: 5
  misc_feature: MA Experiment 20001906 PARAMETER Experiment Name: At_Drought_Reproduction_P Parameter: Tissue Value: Siliques
  misc_feature: MA Experiment 20001906 PARAMETER Experiment Name: At_Drought_Reproduction_P Parameter: Treatment Value: Drought vs. No Drought
  misc_feature: MA Experiment ID: 20001908 Result: Down-regulated in Transcription
  misc_feature: MA Experiment 20001908 PARAMETER Experiment Name: At_Drought_Reproduction_P Parameter: Age (day) Value: 40
  misc_feature: MA Experiment 20001908 PARAMETER Experiment Name: At_Drought_Reproduction_P Parameter: Organism Value: A. thaliana
  misc_feature: MA Experiment 20001908 PARAMETER Experiment Name: At_Drought_Reproduction_P Parameter: Plant Line Value: WS
  misc_feature: MA Experiment 20001908 PARAMETER Experiment Name: At_Drought_Reproduction_P Parameter: Timepoint (day) Value: 10
  misc_feature: MA Experiment 20001908 PARAMETER Experiment Name: At_Drought_Reproduction_P Parameter: Tissue Value: Siliques
  misc_feature: MA Experiment 20001908 PARAMETER Experiment Name: At_Drought_Reproduction_P Parameter: Treatment Value: Drought vs. No Drought
  misc_feature: MA Experiment ID: 20001911 Result: Down-regulated in Transcription
  misc_feature: MA Experiment 20001911 PARAMETER Experiment Name: At_Drought_Reproduction_P Parameter: Age (day) Value: 40
  misc_feature: MA Experiment 20001911 PARAMETER Experiment Name: At_Drought_Reproduction_P Parameter: Organism Value: A. thaliana
  misc_feature: MA Experiment 20001911 PARAMETER Experiment Name: At_Drought_Reproduction_P Parameter: Plant Line Value: WS
  misc_feature: MA Experiment 20001911 PARAMETER Experiment Name: At_Drought_Reproduction_P Parameter: Timepoint (day) Value: 10
  misc_feature: MA Experiment 20001911 PARAMETER Experiment Name: At_Drought_Reproduction_P Parameter: Tissue Value: Flowers
  misc_feature: MA Experiment 20001911 PARAMETER Experiment Name: At_Drought_Reproduction_P Parameter: Treatment Value: Drought vs. No Drought
tggcccagaattaaacgcaatccacttcaatccaaaatcccatactaaattaaaaccaacacacaggaagaaagaagaaacctctcatcttcccctctcttctgttgaagaaagcttaaacctttctgggtttcttttaactatggcgacaagggttagtttcttcttagctctggtaatgacggtggtgattcttgctccttctgtcgtctctggagaaaatgggttttccgatcttaaaatccgtactcacttgaaacgactcaacaagccagctctcaaatcgattaagagcccagatggagatatgattgactgtgttccaatcactgaccaaccagcttttgctcatcctctgctcattaatcacactgtccagatgtggccaagtttgaacccagaaagtgtatttagtgagagtaaagtttcatcaaaaaccaagaatcagcagtctaatgctatacatcagctttggcatgtgaatgggaaatgtccaaagaacacaattcccatcagaagaacgagaagacaagatctttacagagcgagttccgttgagaattacggtatgaagaatcagaagagtatccctaaacctaaatcttctgagccacctaatgtccttacacaaaatggtcatcagcacgcgataatgtatgtcgaagatggggttttctacggggctaaagcgaagataaatgtatggaagccggatgttgaaatgcctaatgagtttagcttagctcagatttgggttttaggtggaaatttcaactctgatcttaatagtattgaagctggctggcaggtcagcccacaattgtatggtgataataggaccagactcttcacttattggactagtgatgcataccaaggcacaggctgctataatcttctatgctcaggatttgttcaaatcaatagagaaatcgcaatgggtggatcaatctctcctttatcaaactatggaaactctcaatatgacatcaccatactcatctggaaggatccaaaagaaggacattggtggttacagtttggagagaaatacataataggatactggccagcttcactcttctcttacttatcagaaagtgcatcgatgatcgaatggggaggcgaagtggttaactcgcagtccgaggaaggacaacacacaaccactcagatgggaagtgggaggtttgcagaggaaggttggggaaaagcgagttacttcaagaacgttcaagtagttgatggatcgaatgaactgagaaacccggagaatcttcaagtgtttactgatcaagagaactgttacaatgtgaaaagtgggaatggaggttcttggggaagttacttctactatggtggtcctggtcgaaaccctaattgcccttaaagatttggtcgacttactcacattgcagatcattccaaatcaattgtataaaaaacatataatatatatatatacacattcttaagtatattattaatttcaggtttg

SEQ ID NO: 24819 - protein, 462 aa, Arabidopsis thaliana
  peptide (1)..(462): Ceres Seq. ID no. 13487578
  misc_feature (225)..(422): Pfam Name: Arabidopsis proteins of unknown function Pfam Description: Arabidopsis proteins of unknown function
  misc_feature (51)..(462): Homolog of NCBI NO: 7486433 NR Description: hypothetical protein At2g44220 [imported] -
  misc_feature (55)..(462): Homolog of NCBI NO: 30103019 NR Description: unknown protein [Oryza sativa (japonica
  misc_feature (80)..(462): Homolog of NCBI NO: 34393299 NR Description: putative DD1A protein [Oryza sativa (japonica
  misc_feature (78)..(461): Homolog of NCBI NO: 15241244 NR Description: expressed protein [Arabidopsis thaliana]
  misc_feature (71)..(462): Homolog of NCBI NO: 27311623 NR Description: unknown protein [Arabidopsis thaliana]
  misc_feature (71)..(462): Homolog of NCBI NO: 15222707 NR Description: expressed protein [Arabidopsis thaliana]
  misc_feature (54)..(462): Homolog of NCBI NO: 21593294 NR Description: putative carboxyl-terminal peptidase [Arabidopsis
  misc_feature (44)..(462): Homolog of NCBI NO: 18400044 NR Description: expressed protein [Arabidopsis thaliana]
  misc_feature (80)..(462): Homolog of NCBI NO: 34393554 NR Description: putative carboxyl-terminal proteinase
  misc_feature (48)..(462): Homolog of NCBI NO: 18406483 NR Description: expressed protein [Arabidopsis thaliana]
GPELNAIHFNPKSHTKLKPTHRKKEETSHLPLSSVEESLNLSGFLLTMATRVSFFLALVMTVVILAPSVVSGENGFSDLKIRTHLKRLNKPALKSIKSPDGDMIDCVPITDQPAFAHPLLINHTVQMWPSLNPESVFSESKVSSKTKNQQSNAIHQLWHVNGKCPKNTIPIRRTRRQDLYRASSVENYGMKNQKSIPKPKSSEPPNVLTQNGHQHAIMYVEDGVFYGAKAKINVWKPDVEMPNEFSLAQIWVLGGNFNSDLNSIEAGWQVSPQLYGDNRTRLFTYWTSDAYQGTGCYNLLCSGFVQINREIAMGGSISPLSNYGNSQYDITILIWKDPKEGHWWLQFGEKYIIGYWPASLFSYLSESASMIEWGGEVVNSQSEEGQHTTTQMGSGRFAEEGWGKASYFKNVQVVDGSNELRNPENLQVFTDQENCYNVKSGNGGSWGSYFYYGGPGRNPNCP

SEQ ID NO: 24820 - protein, 415 aa, Arabidopsis thaliana
  peptide (1)..(415): Ceres Seq. ID no. 13487579
  misc_feature (178)..(375): Pfam Name: Arabidopsis proteins of unknown function Pfam Description: Arabidopsis proteins of unknown function
  misc_feature (4)..(415): Homolog of NCBI NO: 7486433 NR Description: hypothetical protein At2g44220 [imported] -
  misc_feature (8)..(415): Homolog of NCBI NO: 30103019 NR Description: unknown protein [Oryza sativa (japonica
  misc_feature (33)..(415): Homolog of NCBI NO: 34393299 NR Description: putative DD1A protein [Oryza sativa (japonica
  misc_feature (31)..(414): Homolog of NCBI NO: 15241244 NR Description: expressed protein [Arabidopsis thaliana]
  misc_feature (24)..(415): Homolog of NCBI NO: 27311623 NR Description: unknown protein [Arabidopsis thaliana]
  misc_feature (24)..(415): Homolog of NCBI NO: 15222707 NR Description: expressed protein [Arabidopsis thaliana]
  misc_feature (7)..(415): Homolog of NCBI NO: 21593294 NR Description: putative carboxyl-terminal peptidase [Arabidopsis
  misc_feature (1)..(415): Homolog of NCBI NO: 18400044 NR Description: expressed protein [Arabidopsis thaliana]
  misc_feature (33)..(415): Homolog of NCBI NO: 34393554 NR Description: putative carboxyl-terminal proteinase
  misc_feature (1)..(415): Homolog of NCBI NO: 18406483 NR Description: expressed protein [Arabidopsis thaliana]
MATRVSFFLALVMTVVILAPSVVSGENGFSDLKIRTHLKRLNKPALKSIKSPDGDMIDCVPITDQPAFAHPLLINHTVQMWPSLNPESVFSESKVSSKTKNQQSNAIHQLWHVNGKCPKNTIPIRRTRRQDLYRASSVENYGMKNQKSIPKPKSSEPPNVLTQNGHQHAIMYVEDGVFYGAKAKINVWKPDVEMPNEFSLAQIWVLGGNFNSDLNSIEAGWQVSPQLYGDNRTRLFTYWTSDAYQGTGCYNLLCSGFVQINREIAMGGSISPLSNYGNSQYDITILIWKDPKEGHWWLQFGEKYIIGYWPASLFSYLSESASMIEWGGEVVNSQSEEGQHTTTQMGSGRFAEEGWGKASYFKNVQVVDGSNELRNPENLQVFTDQENCYNVKSGNGGSWGSYFYYGGPGRNPNCP

SEQ ID NO: 24821 - protein, 403 aa, Arabidopsis thaliana
  peptide (1)..(403): Ceres Seq. ID no. 13487580
  misc_feature (166)..(363): Pfam Name: Arabidopsis proteins of unknown function Pfam Description: Arabidopsis proteins of unknown function
  misc_feature (1)..(403): Homolog of NCBI NO: 7486433 NR Description: hypothetical protein At2g44220 [imported] -
  misc_feature (1)..(403): Homolog of NCBI NO: 30103019 NR Description: unknown protein [Oryza sativa (japonica
  misc_feature (21)..(403): Homolog of NCBI NO: 34393299 NR Description: putative DD1A protein [Oryza sativa (japonica
  misc_feature (19)..(402): Homolog of NCBI NO: 15241244 NR Description: expressed protein [Arabidopsis thaliana]
  misc_feature (12)..(403): Homolog of NCBI NO: 27311623 NR Description: unknown protein [Arabidopsis thaliana]
  misc_feature (12)..(403): Homolog of NCBI NO: 15222707 NR Description: expressed protein [Arabidopsis thaliana]
  misc_feature (1)..(403): Homolog of NCBI NO: 21593294 NR Description: putative carboxyl-terminal peptidase [Arabidopsis
  misc_feature (1)..(403): Homolog of NCBI NO: 18400044 NR Description: expressed protein [Arabidopsis thaliana]
  misc_feature (21)..(403): Homolog of NCBI NO: 34393554 NR Description: putative carboxyl-terminal proteinase
  misc_feature (1)..(403): Homolog of NCBI NO: 18406483 NR Description: expressed protein [Arabidopsis thaliana]
MTVVILAPSVVSGENGFSDLKIRTHLKRLNKPALKSIKSPDGDMIDCVPITDQPAFAHPLLINHTVQMWPSLNPESVFSESKVSSKTKNQQSNAIHQLWHVNGKCPKNTIPIRRTRRQDLYRASSVENYGMKNQKSIPKPKSSEPPNVLTQNGHQHAIMYVEDGVFYGAKAKINVWKPDVEMPNEFSLAQIWVLGGNFNSDLNSIEAGWQVSPQLYGDNRTRLFTYWTSDAYQGTGCYNLLCSGFVQINREIAMGGSISPLSNYGNSQYDITILIWKDPKEGHWWLQFGEKYIIGYWPASLFSYLSESASMIEWGGEVVNSQSEEGQHTTTQMGSGRFAEEGWGKASYFKNVQVVDGSNELRNPENLQVFTDQENCYNVKSGNGGSWGSYFYYGGPGRNPNCP

SEQ ID NO: 24822 - DNA, 1248 bp, Arabidopsis thaliana
  misc_feature (1)..(1248): Ceres Seq. ID no. 12370355
  misc_feature: MA Experiment ID: 108434 Result: Down-regulated in Transcription
  misc_feature: MA Experiment 108434 PARAMETER Experiment Name: At_Root_Tips_cDNA_P Parameter: Tissue Value: Root Tips
  misc_feature: MA Experiment ID: 108461 Result: Down-regulated in Transcription
  misc_feature: MA Experiment 108461 PARAMETER Experiment Name: At_Germinating_Seeds_cDNA_P Parameter: Age (day) Value: 1 vs. 0
  misc_feature: MA Experiment 108461 PARAMETER Experiment Name: At_Germinating_Seeds_cDNA_P Parameter: Tissue Value: Germinating Seeds
  misc_feature: MA Experiment ID: 108595 Result: Down-regulated in Transcription
  misc_feature: MA Experiment 108595 PARAMETER Experiment Name: At_Ler-pi_Ovule_cDNA_P Parameter: Plant Line Value: null
  misc_feature: MA Experiment ID: 20000111 Result: Down-regulated in Transcription
  misc_feature: MA Experiment 20000111 PARAMETER Experiment Name: At_42deg_Heat_cDNA_P Parameter: Temperature (deg C) Value: 42 vs. 22
  misc_feature: MA Experiment 20000111 PARAMETER Experiment Name: At_42deg_Heat_cDNA_P Parameter: Timepoint (hr) Value: 6
  misc_feature: MA Experiment 20000111 PARAMETER Experiment Name: At_42deg_Heat_cDNA_P Parameter: Tissue Value: Aerial
  misc_feature: MA Experiment ID: 20000113 Result: Down-regulated in Transcription
  misc_feature: MA Experiment 20000113 PARAMETER Experiment Name: At_42deg_Heat_cDNA_P Parameter: Temperature (deg C) Value: 42 vs. 22
  misc_feature: MA Experiment 20000113 PARAMETER Experiment Name: At_42deg_Heat_cDNA_P Parameter: Timepoint (hr) Value: 8
  misc_feature: MA Experiment 20000113 PARAMETER Experiment Name: At_42deg_Heat_cDNA_P Parameter: Tissue Value: Aerial
  misc_feature: MA Experiment ID: 20000171 Result: Down-regulated in Transcription
  misc_feature: MA Experiment 20000171 PARAMETER Experiment Name: At_42deg_Heat_P Parameter: Age (day) Value: 14
  misc_feature: MA Experiment 20000171 PARAMETER Experiment Name: At_42deg_Heat_P Parameter: Organism Value: A. thaliana
  misc_feature: MA Experiment 20000171 PARAMETER Experiment Name: At_42deg_Heat_P Parameter: Plant Line Value: WS
  misc_feature: MA Experiment 20000171 PARAMETER Experiment Name: At_42deg_Heat_P Parameter: Temperature (deg C) Value: 42 vs. 22
  misc_feature: MA Experiment 20000171 PARAMETER Experiment Name: At_42deg_Heat_P Parameter: Timepoint (hr) Value: 1
  misc_feature: MA Experiment 20000171 PARAMETER Experiment Name: At_42deg_Heat_P Parameter: Tissue Value: Aerial
  misc_feature: MA Experiment ID: 20000173 Result: Down-regulated in Transcription
  misc_feature: MA Experiment 20000173 PARAMETER Experiment Name: At_42deg_Heat_P Parameter: Age (day) Value: 14
  misc_feature: MA Experiment 20000173 PARAMETER Experiment Name: At_42deg_Heat_P Parameter: Organism Value: A. thaliana
  misc_feature: MA Experiment 20000173 PARAMETER Experiment Name: At_42deg_Heat_P Parameter: Plant Line Value: WS
  misc_feature: MA Experiment 20000173 PARAMETER Experiment Name: At_42deg_Heat_P Parameter: Temperature (deg C) Value: 42 vs. 22
  misc_feature: MA Experiment 20000173 PARAMETER Experiment Name: At_42deg_Heat_P Parameter: Timepoint (hr) Value: 6
  misc_feature: MA Experiment 20000173 PARAMETER Experiment Name: At_42deg_Heat_P Parameter: Tissue Value: Aerial
  misc_feature: MA Experiment ID: 20000184 Result: Down-regulated in Transcription
  misc_feature: MA Experiment 20000184 PARAMETER Experiment Name: At_Shoots__P Parameter: Age (day) Value: 7
  misc_feature: MA Experiment 20000184 PARAMETER Experiment Name: At_Shoots__P Parameter: Tissue Value: Shoots vs. Whole Plant
  misc_feature: MA Experiment ID: 20000234 Result: Down-regulated in Transcription
  misc_feature: MA Experiment 20000234 PARAMETER Experiment Name: At_Siliques_P Parameter: Age (day) Value: 21
  misc_feature: MA Experiment 20000234 PARAMETER Experiment Name: At_Siliques_P Parameter: Organism Value: A. thaliana
  misc_feature: MA Experiment 20000234 PARAMETER Experiment Name: At_Siliques_P Parameter: Plant Line Value: WS
  misc_feature: MA Experiment 20000234 PARAMETER Experiment Name: At_Siliques_P Parameter: Tissue Value: Less Than 5mm Siliques vs. Whole Plant
  misc_feature: MA Experiment ID: 20001247 Result: Up-regulated in Transcription
  misc_feature: MA Experiment 20001247 PARAMETER Experiment Name: At_Far-red-induction_P Parameter: Age (day) Value: 7
  misc_feature: MA Experiment 20001247 PARAMETER Experiment Name: At_Far-red-induction_P Parameter: Light Value: Far-red vs. White
  misc_feature: MA Experiment 20001247 PARAMETER Experiment Name: At_Far-red-induction_P Parameter: Organism Value: A. thaliana
  misc_feature: MA Experiment 20001247 PARAMETER Experiment Name: At_Far-red-induction_P Parameter: Plant Line Value: Columbia
  misc_feature: MA Experiment 20001247 PARAMETER Experiment Name: At_Far-red-induction_P Parameter: Timepoint (hr) Value: 1
  misc_feature: MA Experiment 20001247 PARAMETER Experiment Name: At_Far-red-induction_P Parameter: Tissue Value: Whole Plant
  misc_feature: MA Experiment ID: 20001557 Result: Up-regulated in Transcription
  misc_feature: MA Experiment 20001557 PARAMETER Experiment Name: At_Drought_Soil_Dry_P Parameter: Age (day) Value: 27
  misc_feature: MA Experiment 20001557 PARAMETER Experiment Name: At_Drought_Soil_Dry_P Parameter: Organism Value: A. thaliana
  misc_feature: MA Experiment 20001557 PARAMETER Experiment Name: At_Drought_Soil_Dry_P Parameter: Plant Line Value: WS
  misc_feature: MA Experiment 20001557 PARAMETER Experiment Name: At_Drought_Soil_Dry_P Parameter: Post Timepoint (hr) Value: 3
  misc_feature: MA Experiment 20001557 PARAMETER Experiment Name: At_Drought_Soil_Dry_P Parameter: Post-Treatment Value: Re-Water vs. No Drought
  misc_feature: MA Experiment 20001557 PARAMETER Experiment Name: At_Drought_Soil_Dry_P Parameter: Timepoint (day) Value: 13
  misc_feature: MA Experiment 20001557 PARAMETER Experiment Name: At_Drought_Soil_Dry_P Parameter: Treatment Value: Drought vs. No Drought
  misc_feature: MA Experiment ID: 20001558 Result: Up-regulated in Transcription
  misc_feature: MA Experiment 20001558 PARAMETER Experiment Name: At_Drought_Soil_Dry_P Parameter: Age (day) Value: 27
  misc_feature: MA Experiment 20001558 PARAMETER Experiment Name: At_Drought_Soil_Dry_P Parameter: Organism Value: A. thaliana
  misc_feature: MA Experiment 20001558 PARAMETER Experiment Name: At_Drought_Soil_Dry_P Parameter: Plant Line Value: WS
  misc_feature: MA Experiment 20001558 PARAMETER Experiment Name: At_Drought_Soil_Dry_P Parameter: Post Timepoint (hr) Value: 6
  misc_feature: MA Experiment 20001558 PARAMETER Experiment Name: At_Drought_Soil_Dry_P Parameter: Post-Treatment Value: Re-Water vs. No Drought
  misc_feature: MA Experiment 20001558 PARAMETER Experiment Name: At_Drought_Soil_Dry_P Parameter: Timepoint (day) Value: 13
  misc_feature: MA Experiment 20001558 PARAMETER Experiment Name: At_Drought_Soil_Dry_P Parameter: Treatment Value: Drought vs. No Drought
acacaaaaaaaaagctgaaacaagagttcgagaaaaatttcgattctcttgctcgtaaaagcttcttttgattctctttgactctgttttgtggatagctcctgaagaagaagaagatgatggtagtgaacagctttgatctatggcaaaaagatgttttcttctctgcagctgaagaggttcaaaaatctacagatataatggagtctgcttatagattgtggattagagagaagaaagatgagatttgtaaggaacttcaagcagctttaggtacagctaaatggcagttggaggagtttgagaaggcagtgagattgagtcataaacggtgtggggatgatgattcttcatccacacggcataaacagtttgttaccgctattgaaaaccagattcatcgcgtagaaacttctctgcaagaagcttatagtgaaaatgggaaaaagcctctccgttgggttgatcttaatgaagaagagcgtgatgacttagcaatgtttctctctggatcttctcgaacttcacagagttttagtggtgagagcagcatcaagtcgagagagtctactaatagttctctagttgaaaacgttatggaagtttcagctaaagtaacattcaagaaagctaaagtttatggtgatggctctgagtgtgtcatagacattgaagaaagagtgacacctggccaagcagagaaatcagttgggctgagaagaatatggagttcaccaaatttcaattctttgagaattatagttcctggtggtgataatgaagaagaaaaggagacattggtggcacaaatagaagcgacgcctaaagttaaaggaactaagtctgtattgtggatgcagagacttcctgatcataatcagctctttgacaagaccggttgctttcaaaatccgatacgcttaccgtttaatcacccgatcaagtttattgtttccttaatgctaatggtgtttctactattacccttcgtagtgtatttgtcttgagaattttaccacggttcgaaactgtcaagaagctgctaaagagatcagctttcgcgtctaatggttaggattcataatcccacaagaacaaacagagattaaaaagctttacatatgttacttttaacttgttgctttggttcttcagggaacgtatagaaacattgaaacttgtaagattaagtaaagggattagagtttatattacggctttggctgccgttgataaagatggaaatgc

SEQ ID NO: 24823 - protein, 296 aa, Arabidopsis thaliana
  peptide (1)..(296): Ceres Seq. ID no. 12370356
  misc_feature (1)..(293): Homolog of NCBI NO: 18417554 NR Description: putative protein
  misc_feature (1)..(256): Homolog of NCBI NO: 7485788 NR Description: hypothetical protein At2g18860 [imported] -
  misc_feature (1)..(296): Homolog of NCBI NO: 30680486 NR Description: expressed protein [Arabidopsis thaliana]
  misc_feature (44)..(261): Homolog of NCBI NO: 37533116 NR Description: unknown protein [Oryza sativa (japonica
  misc_feature (3)..(55): Homolog of NCBI NO: 26006490 NR Description: Hypothetical protein [Oryza sativa (japonica
  misc_feature (43)..(134): Homolog of NCBI NO: 26006490 NR Description: Hypothetical protein [Oryza sativa (japonica
  misc_feature (3)..(139): Homolog of NCBI NO: 25403328 NR Description: protein T22C5.15 [imported] - Arabidopsis
  misc_feature (3)..(139): Homolog of NCBI NO: 18396454 NR Description: putative clathrin-coat assembly protein
  misc_feature (1)..(138): Homolog of NCBI NO: 40253501 NR Description: clathrin-coat assembly protein-like
  misc_feature (1)..(291): Homolog of NCBI NO: 7486766 NR Description: hypothetical protein F9N11.90 - Arabidopsis
MMVVNSFDLWQKDVFFSAAEEVQKSTDIMESAYRLWIREKKDEICKELQAALGTAKWQLEEFEKAVRLSHKRCGDDDSSSTRHKQFVTAIENQIHRVETSLQEAYSENGKKPLRWVDLNEEERDDLAMFLSGSSRTSQSFSGESSIKSRESTNSSLVENVMEVSAKVTFKKAKVYGDGSECVIDIEERVTPGQAEKSVGLRRIWSSPNFNSLRIIVPGGDNEEEKETLVAQIEATPKVKGTKSVLWMQRLPDHNQLFDKTGCFQNPIRLPFNHPIKFIVSLMLMVFLLLPFVVYLS

SEQ ID NO: 24824 - protein, 295 aa, Arabidopsis thaliana
  peptide (1)..(295): Ceres Seq. ID no. 12370357
  misc_feature (43)..(260): Homolog of NCBI NO: 37533116 NR Description: unknown protein [Oryza sativa (japonica
  misc_feature (2)..(54): Homolog of NCBI NO: 26006490 NR Description: Hypothetical protein [Oryza sativa (japonica
  misc_feature (42)..(133): Homolog of NCBI NO: 26006490 NR Description: Hypothetical protein [Oryza sativa (japonica
  misc_feature (2)..(138): Homolog of NCBI NO: 25403328 NR Description: protein T22C5.15 [imported] - Arabidopsis
  misc_feature (2)..(138): Homolog of NCBI NO: 18396454 NR Description: putative clathrin-coat assembly protein
  misc_feature (1)..(137): Homolog of NCBI NO: 40253501 NR Description: clathrin-coat assembly protein-like
  misc_feature (1)..(290): Homolog of NCBI NO: 7486766 NR Description: hypothetical protein F9N11.90 - Arabidopsis
  misc_feature (1)..(292): Homolog of NCBI NO: 18417554 NR Description: putative protein
  misc_feature (1)..(255): Homolog of NCBI NO: 7485788 NR Description: hypothetical protein At2g18860 [imported] -
  misc_feature (1)..(295): Homolog of NCBI NO: 30680486 NR Description: expressed protein [Arabidopsis thaliana]
MVVNSFDLWQKDVFFSAAEEVQKSTDIMESAYRLWIREKKDEICKELQAALGTAKWQLEEFEKAVRLSHKRCGDDDSSSTRHKQFVTAIENQIHRVETSLQEAYSENGKKPLRWVDLNEEERDDLAMFLSGSSRTSQSFSGESSIKSRESTNSSLVENVMEVSAKVTFKKAKVYGDGSECVIDIEERVTPGQAEKSVGLRRIWSSPNFNSLRIIVPGGDNEEEKETLVAQIEATPKVKGTKSVLWMQRLPDHNQLFDKTGCFQNPIRLPFNHPIKFIVSLMLMVFLLLPFVVYLS

SEQ ID NO: 24825 - protein, 268 aa, Arabidopsis thaliana
  peptide (1)..(268): Ceres Seq. ID no. 12370358
  misc_feature (16)..(233): Homolog of NCBI NO: 37533116 NR Description: unknown protein [Oryza sativa (japonica
  misc_feature (1)..(27): Homolog of NCBI NO: 26006490 NR Description: Hypothetical protein [Oryza sativa (japonica
  misc_feature (15)..(106): Homolog of NCBI NO: 26006490 NR Description: Hypothetical protein [Oryza sativa (japonica
  misc_feature (1)..(111): Homolog of NCBI NO: 25403328 NR Description: protein T22C5.15 [imported] - Arabidopsis
  misc_feature (1)..(111): Homolog of NCBI NO: 18396454 NR Description: putative clathrin-coat assembly protein
  misc_feature (1)..(110): Homolog of NCBI NO: 40253501 NR Description: clathrin-coat assembly protein-like
  misc_feature (1)..(263): Homolog of NCBI NO: 7486766 NR Description: hypothetical protein F9N11.90 - Arabidopsis
  misc_feature (1)..(265): Homolog of NCBI NO: 18417554 NR Description: putative protein
  misc_feature (1)..(228): Homolog of NCBI NO: 7485788 NR Description: hypothetical protein At2g18860 [imported] -
  misc_feature (1)..(268): Homolog of NCBI NO: 30680486 NR Description: expressed protein [Arabidopsis thaliana]
MESAYRLWIREKKDEICKELQAALGTAKWQLEEFEKAVRLSHKRCGDDDSSSTRHKQFVTAIENQIHRVETSLQEAYSENGKKPLRWVDLNEEERDDLAMFLSGSSRTSQSFSGESSIKSRESTNSSLVENVMEVSAKVTFKKAKVYGDGSECVIDIEERVTPGQAEKSVGLRRIWSSPNFNSLRIIVPGGDNEEEKETLVAQIEATPKVKGTKSVLWMQRLPDHNQLFDKTGCFQNPIRLPFNHPIKFIVSLMLMVFLLLPFVVYLS

SEQ ID NO: 24826 - DNA, 1216 bp, Arabidopsis thaliana
  misc_feature (1)..(1216): Ceres Seq. ID no. 12726208
  misc_feature: MA Experiment ID: 108434 Result: Down-regulated in Transcription
  misc_feature: MA Experiment 108434 PARAMETER Experiment Name: At_Root_Tips_cDNA_P Parameter: Tissue Value: Root Tips
  misc_feature: MA Experiment ID: 108435 Result: Up-regulated in Transcription
  misc_feature: MA Experiment 108435 PARAMETER Experiment Name: At_stm_Mutants_cDNA_P Parameter: Plant Line Value: wt Landsburg vs stm
  misc_feature: MA Experiment 108435 PARAMETER Experiment Name: At_stm_Mutants_cDNA_P Parameter: Tissue Value: Shoot Apical Meristem Region
  misc_feature: MA Experiment ID: 108462 Result: Up-regulated in Transcription
  misc_feature: MA Experiment 108462 PARAMETER Experiment Name: At_Germinating_Seeds_cDNA_P Parameter: Age (day) Value: 2 vs. 0
  misc_feature: MA Experiment 108462 PARAMETER Experiment Name: At_Germinating_Seeds_cDNA_P Parameter: Tissue Value: Germinating Seeds
  misc_feature: MA Experiment ID: 108572 Result: Up-regulated in Transcription
  misc_feature: MA Experiment 108572 PARAMETER Experiment Name: At_Drought_cDNA_P Parameter: Timepoint (hr) Value: 1
  misc_feature: MA Experiment 108572 PARAMETER Experiment Name: At_Drought_cDNA_P Parameter: Tissue Value: Aerial
  misc_feature: MA Experiment 108572 PARAMETER Experiment Name: At_Drought_cDNA_P Parameter: Treatment Value: Drought vs. No Drought
  misc_feature: MA Experiment ID: 108605 Result: Up-regulated in Transcription
  misc_feature: MA Experiment 108605 PARAMETER Experiment Name: At_100uM_ABA_cDNA_P Parameter: Timepoint (hr) Value: 6
  misc_feature: MA Experiment 108605 PARAMETER Experiment Name: At_100uM_ABA_cDNA_P Parameter: Tissue Value: Aerial
  misc_feature: MA Experiment 108605 PARAMETER Experiment Name: At_100uM_ABA_cDNA_P Parameter: Treatment Value: 100uM ABA vs. No Treatment
  misc_feature: MA Experiment ID: 108607 Result: Up-regulated in Transcription
  misc_feature: MA Experiment 108607 PARAMETER Experiment Name: At_100uM_ABA_cDNA_P Parameter: Timepoint (hr) Value: 4
  misc_feature: MA Experiment 108607 PARAMETER Experiment Name: At_100uM_ABA_cDNA_P Parameter: Tissue Value: Aerial
  misc_feature: MA Experiment 108607 PARAMETER Experiment Name: At_100uM_ABA_cDNA_P Parameter: Treatment Value: 100uM ABA vs. No Treatment
  misc_feature: MA Experiment ID: 20000328 Result: Up-regulated in Transcription
  misc_feature: MA Experiment 20000328 PARAMETER Experiment Name: At_42deg_Heat_Sub_P Parameter: Age (day) Value: 14
  misc_feature: MA Experiment 20000328 PARAMETER Experiment Name: At_42deg_Heat_Sub_P Parameter: Organism Value: A. thaliana
  misc_feature: MA Experiment 20000328 PARAMETER Experiment Name: At_42deg_Heat_Sub_P Parameter: Plant Line Value: WS
  misc_feature: MA Experiment 20000328 PARAMETER Experiment Name: At_42deg_Heat_Sub_P Parameter: Temperature (deg C) Value: 42 vs. 22
  misc_feature: MA Experiment 20000328 PARAMETER Experiment Name: At_42deg_Heat_Sub_P Parameter: Timepoint (hr) Value: 6
  misc_feature: MA Experiment 20000328 PARAMETER Experiment Name: At_42deg_Heat_Sub_P Parameter: Tissue Value: Aerial
aacaatgactggattactcacctactcgagagtggtttagcttttttgtaccgtacatcttcttcccagctgaatcaagttttcttctttctagaaacatggctgaggcttctgatttgttggaatggcctaagaaggataaccgtcgttttctccatgttgtctaccgcgttggtgatcttgatcgcaccattgagttttacactgaggtctttggtatgaagctgttgaggaaaagagatatccctgaggagaagtattctaatgcttttcttggttttggacctgaaacatctaactttgttgtggagctcacatataactatggtgttagctcatatgatattggaactggctttgggcattttgccatttcaactcaagatgtttccaaactggttgagaacgtccgtgccaagggtggaaatgtgactagggaacctggtccagtcaaaggtggaggcagtgtcattgcgtttgtgaaggaccctgatggctacacttttgagctcatccagagaggtccaactcctgaacctttctgccaagtcatgcttcgtgttggtgatctcgaccgtgccatcaaattctatgaaaaggccctcgggatgagactcttgagaaagattgagagacctgagtacaagtacaccataggcatgatggggtatgctgaagaatacgagtcgatagttttggagctgacctataactacgacgtgactgagtacacaaagggcaatgcatatgcacagattgcaataggcacagatgatgtgtacaaaagcggtgaagttattaagatagtcaaccaagagctaggaggaaagatcactagagaagccggacctcttcctggactcggcaccaagattgtctcattccttgatccagatggctggaaaacggttttggtggacaacaaagattttctcaaggaactggaatgagaagagcgatgaatgaaggtcgagatcacaaaaccataataataaaaatgtgatcataaaataaaaggaagacttagagtttgatctaaaataagaagatgtggtttagtttgtgtcgtgctatgtgtgtgtgctcgtttcttttgtctttgagcttaaaagttaaaactctagtctatatggacctgaataaaaatatttccaccaccttgaggttttggtgtttgcggttatggacggtttattgaatgtaatattttcgtacc

SEQ ID NO: 24827 - protein, 283 aa, Arabidopsis thaliana; identical to SEQ ID NO: 22714
  peptide (1)..(283): Ceres Seq. ID no. 12726209
  misc_feature (6)..(283): Homolog of NCBI NO: 15220397 NR Description: glyoxalase I, putative (lactoylglutathione lyase)
  misc_feature (10)..(283): Homolog of NCBI NO: 7619802 NR Description: putative glyoxalase I [Triticum aestivum]
  misc_feature (1)..(283): Homolog of NCBI NO: 16580747 NR Description: glyoxalase I [Oryza sativa (japonica
  misc_feature (1)..(283): Homolog of NCBI NO: 4126809 NR Description: glyoxalase I [Oryza sativa (japonica
  misc_feature (1)..(219): Homolog of NCBI NO: 30682449 NR Description: glyoxalase I, putative (lactoylglutathione lyase)
  misc_feature (1)..(283): Homolog of NCBI NO: 2213425 NR Description: hypothetical protein [Citrus x paradisi]
  misc_feature (28)..(283): Homolog of NCBI NO: 7488556 NR Description: hypothetical protein - wild cabbage (fragment)
  misc_feature (1)..(283): Homolog of NCBI NO: 2494843 NR Description: Putative lactoylglutathione lyase (Aldoketomutase) (Glyoxalase I) (Glx I) (Ketone-aldehyde mutase)
  misc_feature (1)..(283): Homolog of NCBI NO: 15810219 NR Description: putative lactoylglutathione lyase [Arabidopsis
  misc_feature (1)..(283): Homolog of NCBI NO: 15221116 NR Description: glyoxalase I, putative (lactoylglutathione lyase)

SEQ ID NO: 24828 - protein, 243 aa, Arabidopsis thaliana; identical to SEQ ID NO: 22715
  peptide (1)..(243): Ceres Seq. ID no. 12726210
  misc_feature (1)..(243): Homolog of NCBI NO: 15220397 NR Description: glyoxalase I, putative (lactoylglutathione lyase)
  misc_feature (1)..(243): Homolog of NCBI NO: 7619802 NR Description: putative glyoxalase I [Triticum aestivum]
  misc_feature (1)..(243): Homolog of NCBI NO: 16580747 NR Description: glyoxalase I [Oryza sativa (japonica
  misc_feature (1)..(243): Homolog of NCBI NO: 4126809 NR Description: glyoxalase I [Oryza sativa (japonica
  misc_feature (1)..(179): Homolog of NCBI NO: 30682449 NR Description: glyoxalase I, putative (lactoylglutathione lyase)
  misc_feature (1)..(243): Homolog of NCBI NO: 2213425 NR Description: hypothetical protein [Citrus x paradisi]
  misc_feature (1)..(243): Homolog of NCBI NO: 7488556 NR Description: hypothetical protein - wild cabbage (fragment)
  misc_feature (1)..(243): Homolog of NCBI NO: 2494843 NR Description: Putative lactoylglutathione lyase (Aldoketomutase) (Glyoxalase I) (Glx I) (Ketone-aldehyde mutase)
  misc_feature (1)..(243): Homolog of NCBI NO: 15810219 NR Description: putative lactoylglutathione lyase [Arabidopsis
  misc_feature (1)..(243): Homolog of NCBI NO: 15221116 NR Description: glyoxalase I, putative (lactoylglutathione lyase)

SEQ ID NO: 24829 - DNA, 1032 bp, Arabidopsis thaliana
  misc_feature (1)..(1032): Ceres Seq. ID no. 12385678
  misc_feature: MA Experiment ID: 108573 Result: Up-regulated in Transcription
  misc_feature: MA Experiment 108573 PARAMETER Experiment Name: At_Drought_cDNA_P Parameter: Timepoint (hr) Value: 6
  misc_feature: MA Experiment 108573 PARAMETER Experiment Name: At_Drought_cDNA_P Parameter: Tissue Value: Aerial
  misc_feature: MA Experiment 108573 PARAMETER Experiment Name: At_Drought_cDNA_P Parameter: Treatment Value: Drought vs. No Drought
  misc_feature: MA Experiment ID: 108576 Result: Up-regulated in Transcription
  misc_feature: MA Experiment 108576 PARAMETER Experiment Name: At_42deg_Heat_cDNA_P Parameter: Temperature (deg C) Value: 42 vs. 22
  misc_feature: MA Experiment 108576 PARAMETER Experiment Name: At_42deg_Heat_cDNA_P Parameter: Timepoint (hr) Value: 1
  misc_feature: MA Experiment 108576 PARAMETER Experiment Name: At_42deg_Heat_cDNA_P Parameter: Tissue Value: Aerial
  misc_feature: MA Experiment ID: 108577 Result: Up-regulated in Transcription
  misc_feature: MA Experiment 108577 PARAMETER Experiment Name: At_42deg_Heat_cDNA_P Parameter: Temperature (deg C) Value: 42 vs. 22
  misc_feature: MA Experiment 108577 PARAMETER Experiment Name: At_42deg_Heat_cDNA_P Parameter: Timepoint (hr) Value: 6
  misc_feature: MA Experiment 108577 PARAMETER Experiment Name: At_42deg_Heat_cDNA_P Parameter: Tissue Value: Aerial
  misc_feature: MA Experiment ID: 108595 Result: Up-regulated in Transcription
  misc_feature: MA Experiment 108595 PARAMETER Experiment Name: At_Ler-pi_Ovule_cDNA_P Parameter: Plant Line Value: null
  misc_feature: MA Experiment ID: 20000171 Result: Up-regulated in Transcription
  misc_feature: MA Experiment 20000171 PARAMETER Experiment Name: At_42deg_Heat_P Parameter: Age (day) Value: 14
  misc_feature: MA Experiment 20000171 PARAMETER Experiment Name: At_42deg_Heat_P Parameter: Organism Value: A. thaliana
  misc_feature: MA Experiment 20000171 PARAMETER Experiment Name: At_42deg_Heat_P Parameter: Plant Line Value: WS
  misc_feature: MA Experiment 20000171 PARAMETER Experiment Name: At_42deg_Heat_P Parameter: Temperature (deg C) Value: 42 vs. 22
  misc_feature: MA Experiment 20000171 PARAMETER Experiment Name: At_42deg_Heat_P Parameter: Timepoint (hr) Value: 1
  misc_feature: MA Experiment 20000171 PARAMETER Experiment Name: At_42deg_Heat_P Parameter: Tissue Value: Aerial
  misc_feature: MA Experiment ID: 20000173 Result: Up-regulated in Transcription
  misc_feature: MA Experiment 20000173 PARAMETER Experiment Name: At_42deg_Heat_P Parameter: Age (day) Value: 14
  misc_feature: MA Experiment 20000173 PARAMETER Experiment Name: At_42deg_Heat_P Parameter: Organism Value: A. thaliana
  misc_feature: MA Experiment 20000173 PARAMETER Experiment Name: At_42deg_Heat_P Parameter: Plant Line Value: WS
  misc_feature: MA Experiment 20000173 PARAMETER Experiment Name: At_42deg_Heat_P Parameter: Temperature (deg C) Value: 42 vs. 22
  misc_feature: MA Experiment 20000173 PARAMETER Experiment Name: At_42deg_Heat_P Parameter: Timepoint (hr) Value: 6
  misc_feature: MA Experiment 20000173 PARAMETER Experiment Name: At_42deg_Heat_P Parameter: Tissue Value: Aerial
  misc_feature: MA Experiment ID: 20000179 Result: Up-regulated in Transcription
  misc_feature: MA Experiment 20000179 PARAMETER Experiment Name: At_Germinating_Seeds_P Parameter: Age (hr) Value: 6 vs. 0
  misc_feature: MA Experiment 20000179 PARAMETER Experiment Name: At_Germinating_Seeds_P Parameter: Tissue Value: Germinating Seeds
  misc_feature: MA Experiment ID: 20000227 Result: Down-regulated in Transcription
  misc_feature: MA Experiment 20000227 PARAMETER Experiment Name: At_Root-Tips-vs-Tops_P Parameter: Tissue Value: Root Tips vs. Root Tops
  misc_feature: MA Experiment ID: 20000265 Result: Down-regulated in Transcription
  misc_feature: MA Experiment 20000265 PARAMETER Experiment Name: At_Open_Flower_P Parameter: Age (day) Value: 21
  misc_feature: MA Experiment 20000265 PARAMETER Experiment Name: At_Open_Flower_P Parameter: Plant Line Value: WS
  misc_feature: MA Experiment 20000265 PARAMETER Experiment Name: At_Open_Flower_P Parameter: Tissue Value: Closed Flower vs. Whole Plant
  misc_feature: MA Experiment ID: 20000436 Result: Up-regulated in Transcription
  misc_feature: MA Experiment 20000436 PARAMETER Experiment Name: At_Drought_P Parameter: Age (day) Value: 7
  misc_feature: MA Experiment 20000436 PARAMETER Experiment Name: At_Drought_P Parameter: Organism Value: A. thaliana
  misc_feature: MA Experiment 20000436 PARAMETER Experiment Name: At_Drought_P Parameter: Plant Line Value: WS
  misc_feature: MA Experiment 20000436 PARAMETER Experiment Name: At_Drought_P Parameter: Timepoint (hr) Value: 12
  misc_feature: MA Experiment 20000436 PARAMETER Experiment Name: At_Drought_P Parameter: Tissue Value: Whole Plant
  misc_feature: MA Experiment 20000436 PARAMETER Experiment Name: At_Drought_P Parameter: Treatment Value: Drought vs. No Drought
  misc_feature: MA Experiment ID: 20000437 Result: Up-regulated in Transcription
  misc_feature: MA Experiment 20000437 PARAMETER Experiment Name: At_Drought_P Parameter: Age (day) Value: 8
  misc_feature: MA Experiment 20000437 PARAMETER Experiment Name: At_Drought_P Parameter: Organism Value: A. thaliana
  misc_feature: MA Experiment 20000437 PARAMETER Experiment Name: At_Drought_P Parameter: Plant Line Value: WS
  misc_feature: MA Experiment 20000437 PARAMETER Experiment Name: At_Drought_P Parameter: Timepoint (hr) Value: 24
  misc_feature: MA Experiment 20000437 PARAMETER Experiment Name: At_Drought_P Parameter: Tissue Value: Whole Plant
  misc_feature: MA Experiment 20000437 PARAMETER Experiment Name: At_Drought_P Parameter: Treatment Value: Drought vs. No Drought
  misc_feature: MA Experiment ID: 20000794 Result: Up-regulated in Transcription
  misc_feature: MA Experiment 20000794 PARAMETER Experiment Name: At_Petals_P Parameter: Age (day) Value: 23-25 days
  misc_feature: MA Experiment 20000794 PARAMETER Experiment Name: At_Petals_P Parameter: Plant Line Value: WS
  misc_feature: MA Experiment 20000794 PARAMETER Experiment Name: At_Petals_P Parameter: Tissue Value: Petals vs. Whole plant
  misc_feature: MA Experiment ID: 20001451 Result: Up-regulated in Transcription
  misc_feature: MA Experiment 20001451 PARAMETER Experiment Name: At_Far-red-induction_P Parameter: Age (day) Value: 7
  misc_feature: MA Experiment 20001451 PARAMETER Experiment Name: At_Far-red-induction_P Parameter: Light Value: Far-red vs. White
  misc_feature: MA Experiment 20001451 PARAMETER Experiment Name: At_Far-red-induction_P Parameter: Organism Value: A. thaliana
  misc_feature: MA Experiment 20001451 PARAMETER Experiment Name: At_Far-red-induction_P Parameter: Plant Line Value: Columbia
  misc_feature: MA Experiment 20001451 PARAMETER Experiment Name: At_Far-red-induction_P Parameter: Timepoint (hr) Value: 24
  misc_feature: MA Experiment 20001451 PARAMETER Experiment Name: At_Far-red-induction_P Parameter: Tissue Value: Whole Plant
  misc_feature: MA Experiment ID: 20001554 Result: Up-regulated in Transcription
  misc_feature: MA Experiment 20001554 PARAMETER Experiment Name: At_Drought_Soil_Dry_P Parameter: Age (day) Value: 21
  misc_feature: MA Experiment 20001554 PARAMETER Experiment Name: At_Drought_Soil_Dry_P Parameter: Organism Value: A. thaliana
  misc_feature: MA Experiment 20001554 PARAMETER Experiment Name: At_Drought_Soil_Dry_P Parameter: Plant Line Value: WS
  misc_feature: MA Experiment 20001554 PARAMETER Experiment Name: At_Drought_Soil_Dry_P Parameter: Post Timepoint (hr) Value: None
  misc_feature: MA Experiment 20001554 PARAMETER Experiment Name: At_Drought_Soil_Dry_P Parameter: Post-Treatment Value: None
  misc_feature: MA Experiment 20001554 PARAMETER Experiment Name: At_Drought_Soil_Dry_P Parameter: Timepoint (day) Value: 7
  misc_feature: MA Experiment 20001554 PARAMETER Experiment Name: At_Drought_Soil_Dry_P Parameter: Treatment Value: Drought vs. No Drought
  misc_feature: MA Experiment ID: 20001908 Result: Up-regulated in Transcription
  misc_feature: MA Experiment 20001908 PARAMETER Experiment Name: At_Drought_Reproduction_P Parameter: Age (day) Value: 40
  misc_feature: MA Experiment 20001908 PARAMETER Experiment Name: At_Drought_Reproduction_P Parameter: Organism Value: A. thaliana
  misc_feature: MA Experiment 20001908 PARAMETER Experiment Name: At_Drought_Reproduction_P Parameter: Plant Line Value: WS
  misc_feature: MA Experiment 20001908 PARAMETER Experiment Name: At_Drought_Reproduction_P Parameter: Timepoint (day) Value: 10
  misc_feature: MA Experiment 20001908 PARAMETER Experiment Name: At_Drought_Reproduction_P Parameter: Tissue Value: Siliques
  misc_feature: MA Experiment 20001908 PARAMETER Experiment Name: At_Drought_Reproduction_P Parameter: Treatment Value: Drought vs. No Drought
  misc_feature: MA Experiment ID: 20001911 Result: Up-regulated in Transcription
  misc_feature: MA Experiment 20001911 PARAMETER Experiment Name: At_Drought_Reproduction_P Parameter: Age (day) Value: 40
  misc_feature: MA Experiment 20001911 PARAMETER Experiment Name: At_Drought_Reproduction_P Parameter: Organism Value: A. thaliana
  misc_feature: MA Experiment 20001911 PARAMETER Experiment Name: At_Drought_Reproduction_P Parameter: Plant Line Value: WS
  misc_feature: MA Experiment 20001911 PARAMETER Experiment Name: At_Drought_Reproduction_P Parameter: Timepoint (day) Value: 10
  misc_feature: MA Experiment 20001911 PARAMETER Experiment Name: At_Drought_Reproduction_P Parameter: Tissue Value: Flowers
  misc_feature: MA Experiment 20001911 PARAMETER Experiment Name: At_Drought_Reproduction_P Parameter: Treatment Value: Drought vs. No Drought
aacctcccttaggcactttctacagagcagctaatcaaaaaaaaaaaaaaaaaaccttgttcttctcttcttcttcttcctctctcacaaatttgactttcatagaagaaaaaaatggtgactacatcgtcacgaaccaagtcaaacggaccggtgcttcgttcacaatcaccgtcaggtcgattttgcggtggttactcaagagccgttccgtcatcttcttcatcagctttcgcttcatcaacgagttctagcttttcatctccgtcgtcagcttttttcagcaatcaccgtcatcacgagagcaatcacagtcaccaccgatctgcgtcaccgactcgtgtgaatctctacacagcgcaaccgatgtctcagtcgtttcgttactctctcgatagcagatctatatctccgactaacaaatcgatctccgtttcgaagaatcagccaccgagccataatcacaagatctcaaggagatgtatgtgttctccgacgacgcatccaggatctttcagatgcagtctacataagaacgtagcgaatccacatggtcaaggtacagcttcgtatacaacgaatggattgaatatgcgtcgatctgcgatgactaattcgctggtgagaattggtggtgttgaaggagagtgggtgagaagagctttgactactttgattcgaccttcttcgcatcatctgaaaagacgagctgcttatcagccacgtcctagtcgactctcaatcatggcgaaagctgatgagaattgattttgatctggattttggttaattcaggtttgttttgtttgttgttcttctctctttaaacgaaaaccaccacaggatttagtagatccggcgaagaagtcttgttatgaagctaaggtctgcgaagaagaatcatcctcgagaaatcgagattttgtaaaaggaagaaacacacacctatcataatttttttgttgttgggtgaaagaagatgctagaatgcattgtacatacgttctcttttttactgtttttgttgctccc

SEQ ID NO: 24830 - protein, 217 aa, Arabidopsis thaliana; identical to SEQ ID NO: 22246
  peptide (1)..(217): Ceres Seq. ID no. 12385679
  misc_feature (135)..(214): Homolog of NCBI NO: 30017516 NR Description: hypothetical protein [Oryza sativa (japonica
  misc_feature (42)..(207): Homolog of NCBI NO: 15241329 NR Description: putative protein; protein id: At5g20370.1
  misc_feature (2)..(216): Homolog of NCBI NO: 24461857 NR Description: CTV.15 [Poncirus trifoliata]
  misc_feature (1)..(216): Homolog of NCBI NO: 21618161 NR Description: serine-rich protein [Arabidopsis thaliana]
  misc_feature (1)..(216): Homolog of NCBI NO: 15238753 NR Description: serine-rich protein; protein id: At5g25280.1
  misc_feature (1)..(217): Homolog of NCBI NO: 15238947 NR Description: putative protein
  misc_feature (135)..(214): Homolog of NCBI NO: 30017516 NR Description: hypothetical protein [Oryza sativa (japonica
  misc_feature (42)..(207): Homolog of NCBI NO: 15241329 NR Description: putative protein; protein id: At5g20370.1
  misc_feature (2)..(216): Homolog of NCBI NO: 24461857 NR Description: CTV.15 [Poncirus trifoliata]
  misc_feature (1)..(216): Homolog of NCBI NO: 21618161 NR Description: serine-rich protein [Arabidopsis thaliana]
  misc_feature (1)..(216): Homolog of NCBI NO: 15238753 NR Description: serine-rich protein; protein id: At5g25280.1
  misc_feature (1)..(217): Homolog of NCBI NO: 15238947 NR Description: putative protein

SEQ ID NO: 24831 - protein, 133 aa, Arabidopsis thaliana; identical to SEQ ID NO: 22247
  peptide (1)..(133): Ceres Seq. ID no. 12385680
  misc_feature (51)..(130): Homolog of NCBI NO: 30017516 NR Description: hypothetical protein [Oryza sativa (japonica
  misc_feature (1)..(123): Homolog of NCBI NO: 15241329 NR Description: putative protein; protein id: At5g20370.1
  misc_feature (1)..(132): Homolog of NCBI NO: 24461857 NR Description: CTV.15 [Poncirus trifoliata]
  misc_feature (1)..(132): Homolog of NCBI NO: 21618161 NR Description: serine-rich protein [Arabidopsis thaliana]
  misc_feature (1)..(132): Homolog of NCBI NO: 15238753 NR Description: serine-rich protein; protein id: At5g25280.1
  misc_feature (1)..(133): Homolog of NCBI NO: 15238947 NR Description: putative protein
  misc_feature (51)..(130): Homolog of NCBI NO: 30017516 NR Description: hypothetical protein [Oryza sativa (japonica
  misc_feature (1)..(123): Homolog of NCBI NO: 15241329 NR Description: putative protein; protein id: At5g20370.1
  misc_feature (1)..(132): Homolog of NCBI NO: 24461857 NR Description: CTV.15 [Poncirus trifoliata]
  misc_feature (1)..(132): Homolog of NCBI NO: 21618161 NR Description: serine-rich protein [Arabidopsis thaliana]
  misc_feature (1)..(132): Homolog of NCBI NO: 15238753 NR Description: serine-rich protein; protein id: At5g25280.1
  misc_feature (1)..(133): Homolog of NCBI NO: 15238947 NR Description: putative protein

SEQ ID NO: 24832 - DNA, 1205 bp, Arabidopsis thaliana
  misc_feature (1)..(1205): Ceres Seq. ID no. 12396070
  misc_feature: MA Experiment ID: 20000173 Result: Down-regulated in Transcription
  misc_feature: MA Experiment 20000173 PARAMETER Experiment Name: At_42deg_Heat_P Parameter: Age (day) Value: 14
  misc_feature: MA Experiment 20000173 PARAMETER Experiment Name: At_42deg_Heat_P Parameter: Organism Value: A. thaliana
  misc_feature: MA Experiment 20000173 PARAMETER Experiment Name: At_42deg_Heat_P Parameter: Plant Line Value: WS
  misc_feature: MA Experiment 20000173 PARAMETER Experiment Name: At_42deg_Heat_P Parameter: Temperature (deg C) Value: 42 vs. 22
  misc_feature: MA Experiment 20000173 PARAMETER Experiment Name: At_42deg_Heat_P Parameter: Timepoint (hr) Value: 6
  misc_feature: MA Experiment 20000173 PARAMETER Experiment Name: At_42deg_Heat_P Parameter: Tissue Value: Aerial
  misc_feature: MA Experiment ID: 20000185 Result: Down-regulated in Transcription
  misc_feature: MA Experiment 20000185 PARAMETER Experiment Name: At_Roots__P Parameter: Age (day) Value: 7 vs. 21
  misc_feature: MA Experiment 20000185 PARAMETER Experiment Name: At_Roots__P Parameter: Organism Value: A. thaliana
  misc_feature: MA Experiment 20000185 PARAMETER Experiment Name: At_Roots__P Parameter: Tissue Value: Roots vs. Whole Plant
  misc_feature: MA Experiment ID: 20000227 Result: Down-regulated in Transcription
  misc_feature: MA Experiment 20000227 PARAMETER Experiment Name: At_Root-Tips-vs-Tops_P Parameter: Tissue Value: Root Tips vs. Root Tops
  misc_feature: MA Experiment ID: 20000573 Result: Down-regulated in Transcription
  misc_feature: MA Experiment 20000573 PARAMETER Experiment Name: At_100uM_ABA_Mutants__P Parameter: Organism Value: A. thaliana
  misc_feature: MA Experiment 20000573 PARAMETER Experiment Name: At_100uM_ABA_Mutants__P Parameter: Plant Line Value: CS22 vs. Ler wt
  misc_feature: MA Experiment 20000573 PARAMETER Experiment Name: At_100uM_ABA_Mutants__P Parameter: Timepoint (hr) Value: N/A
  misc_feature: MA Experiment 20000573 PARAMETER Experiment Name: At_100uM_ABA_Mutants__P Parameter: Tissue Value: Whole Plant
  misc_feature: MA Experiment 20000573 PARAMETER Experiment Name: At_100uM_ABA_Mutants__P Parameter: Treatment Value: None
  misc_feature: MA Experiment ID: 20000574 Result: Down-regulated in Transcription
  misc_feature: MA Experiment 20000574 PARAMETER Experiment Name: At_100uM_ABA_Mutants__P Parameter: Organism Value: A. thaliana
  misc_feature: MA Experiment 20000574 PARAMETER Experiment Name: At_100uM_ABA_Mutants__P Parameter: Plant Line Value: CS23 vs. Ler wt
  misc_feature: MA Experiment 20000574 PARAMETER Experiment Name: At_100uM_ABA_Mutants__P Parameter: Timepoint (hr) Value: N/A
  misc_feature: MA Experiment 20000574 PARAMETER Experiment Name: At_100uM_ABA_Mutants__P Parameter: Tissue Value: Whole Plant
  misc_feature: MA Experiment 20000574 PARAMETER Experiment Name: At_100uM_ABA_Mutants__P Parameter: Treatment Value: None
  misc_feature: MA Experiment ID: 20000709 Result: Down-regulated in Transcription
  misc_feature: MA Experiment 20000709 PARAMETER Experiment Name: At_15mM_NH4NO3_L-to-H_P Parameter: Age (hr) Value: 14
  misc_feature: MA Experiment 20000709 PARAMETER Experiment Name: At_15mM_NH4NO3_L-to-H_P Parameter: Organism Value: A. thaliana
  misc_feature: MA Experiment 20000709 PARAMETER Experiment Name: At_15mM_NH4NO3_L-to-H_P Parameter: Plant Line Value: WS
  misc_feature: MA Experiment 20000709 PARAMETER Experiment Name: At_15mM_NH4NO3_L-to-H_P Parameter: Timepoint (hr) Value: 4
  misc_feature: MA Experiment 20000709 PARAMETER Experiment Name: At_15mM_NH4NO3_L-to-H_P Parameter: Tissue Value: Aerial
  misc_feature: MA Experiment 20000709 PARAMETER Experiment Name: At_15mM_NH4NO3_L-to-H_P Parameter: Treatment Value: 15mM NH4NO3 vs. 30mM Mannitol
  misc_feature: MA Experiment ID: 20000794 Result: Down-regulated in Transcription
  misc_feature: MA Experiment 20000794 PARAMETER Experiment Name: At_Petals_P Parameter: Age (day) Value: 23-25 days
  misc_feature: MA Experiment 20000794 PARAMETER Experiment Name: At_Petals_P Parameter: Plant Line Value: WS
  misc_feature: MA Experiment 20000794 PARAMETER Experiment Name: At_Petals_P Parameter: Tissue Value: Petals vs. Whole plant
  misc_feature: MA Experiment ID: 20001557 Result: Down-regulated in Transcription
  misc_feature: MA Experiment 20001557 PARAMETER Experiment Name: At_Drought_Soil_Dry_P Parameter: Age (day) Value: 27
  misc_feature: MA Experiment 20001557 PARAMETER Experiment Name: At_Drought_Soil_Dry_P Parameter: Organism Value: A. thaliana
  misc_feature: MA Experiment 20001557 PARAMETER Experiment Name: At_Drought_Soil_Dry_P Parameter: Plant Line Value: WS
  misc_feature: MA Experiment 20001557 PARAMETER Experiment Name: At_Drought_Soil_Dry_P Parameter: Post Timepoint (hr) Value: 3
  misc_feature: MA Experiment 20001557 PARAMETER Experiment Name: At_Drought_Soil_Dry_P Parameter: Post-Treatment Value: Re-Water vs. No Drought
  misc_feature: MA Experiment 20001557 PARAMETER Experiment Name: At_Drought_Soil_Dry_P Parameter: Timepoint (day) Value: 13
  misc_feature: MA Experiment 20001557 PARAMETER Experiment Name: At_Drought_Soil_Dry_P Parameter: Treatment Value: Drought vs. No Drought
  misc_feature: MA Experiment ID: 20001558 Result: Down-regulated in Transcription
  misc_feature: MA Experiment 20001558 PARAMETER Experiment Name: At_Drought_Soil_Dry_P Parameter: Age (day) Value: 27
  misc_feature: MA Experiment 20001558 PARAMETER Experiment Name: At_Drought_Soil_Dry_P Parameter: Organism Value: A. thaliana
  misc_feature: MA Experiment 20001558 PARAMETER Experiment Name: At_Drought_Soil_Dry_P Parameter: Plant Line Value: WS
  misc_feature: MA Experiment 20001558 PARAMETER Experiment Name: At_Drought_Soil_Dry_P Parameter: Post Timepoint (hr) Value: 6
  misc_feature: MA Experiment 20001558 PARAMETER Experiment Name: At_Drought_Soil_Dry_P Parameter: Post-Treatment Value: Re-Water vs. No Drought
  misc_feature: MA Experiment 20001558 PARAMETER Experiment Name: At_Drought_Soil_Dry_P Parameter: Timepoint (day) Value: 13
  misc_feature: MA Experiment 20001558 PARAMETER Experiment Name: At_Drought_Soil_Dry_P Parameter: Treatment Value: Drought vs. No Drought
  misc_feature: MA Experiment ID: 20001560 Result: Down-regulated in Transcription
  misc_feature: MA Experiment 20001560 PARAMETER Experiment Name: At_Drought_Soil_Dry_P Parameter: Age (day) Value: 28
  misc_feature: MA Experiment 20001560 PARAMETER Experiment Name: At_Drought_Soil_Dry_P Parameter: Organism Value: A. thaliana
  misc_feature: MA Experiment 20001560 PARAMETER Experiment Name: At_Drought_Soil_Dry_P Parameter: Plant Line Value: WS
  misc_feature: MA Experiment 20001560 PARAMETER Experiment Name: At_Drought_Soil_Dry_P Parameter: Post Timepoint (hr) Value: None
  misc_feature: MA Experiment 20001560 PARAMETER Experiment Name: At_Drought_Soil_Dry_P Parameter: Post-Treatment Value: None
  misc_feature: MA Experiment 20001560 PARAMETER Experiment Name: At_Drought_Soil_Dry_P Parameter: Timepoint (day) Value: 14
  misc_feature: MA Experiment 20001560 PARAMETER Experiment Name: At_Drought_Soil_Dry_P Parameter: Treatment Value: Drought vs. No Drought
  misc_feature: MA Experiment ID: 20001904 Result: Down-regulated in Transcription
  misc_feature: MA Experiment 20001904 PARAMETER Experiment Name: At_Drought_Reproduction_P Parameter: Age (day) Value: 37
  misc_feature: MA Experiment 20001904 PARAMETER Experiment Name: At_Drought_Reproduction_P Parameter: Organism Value: A. thaliana
  misc_feature: MA Experiment 20001904 PARAMETER Experiment Name: At_Drought_Reproduction_P Parameter: Plant Line Value: WS
  misc_feature: MA Experiment 20001904 PARAMETER Experiment Name: At_Drought_Reproduction_P Parameter: Timepoint (day) Value: 7
  misc_feature: MA Experiment 20001904 PARAMETER Experiment Name: At_Drought_Reproduction_P Parameter: Tissue Value: Rosettes
  misc_feature: MA Experiment 20001904 PARAMETER Experiment Name: At_Drought_Reproduction_P Parameter: Treatment Value: Drought vs. No Drought
  misc_feature: MA Experiment ID: 20001905 Result: Down-regulated in Transcription
  misc_feature: MA Experiment 20001905 PARAMETER Experiment Name: At_Drought_Reproduction_P Parameter: Age (day) Value: 40
  misc_feature: MA Experiment 20001905 PARAMETER Experiment Name: At_Drought_Reproduction_P Parameter: Organism Value: A. thaliana
  misc_feature: MA Experiment 20001905 PARAMETER Experiment Name: At_Drought_Reproduction_P Parameter: Plant Line Value: WS
  misc_feature: MA Experiment 20001905 PARAMETER Experiment Name: At_Drought_Reproduction_P Parameter: Timepoint (day) Value: 10
  misc_feature: MA Experiment 20001905 PARAMETER Experiment Name: At_Drought_Reproduction_P Parameter: Tissue Value: Rosettes
  misc_feature: MA Experiment 20001905 PARAMETER Experiment Name: At_Drought_Reproduction_P Parameter: Treatment Value: Drought vs. No Drought
atctctcttcttctctctctgcttcttcttgtgggacaaaccctaattattttacttcgatctctctccacttttcccgctcaatcatctgatctttccctctctcagcaatgcatgatcttcgattttctatcagtgttcaaagctgaaaaaaatcgaactgggtctgttgatttcttcaggtctaaaatcagattagattagagaagaagaagaagaatgctggaagctgtagatagctcaggagtggtgaatggaggattcccgcagattcagagcttttacggcgattgcagtagtgaagaagagttatcggtattgccacgtcatacaaaagtggtggtcaccggaaacaaccggacgaaatcggtgcttgttggtcttcaaggtgttgtcaaaaaagctgtcggtctcggtggttggcattggctggttttgacaaatggaatagaagtaaagttgcagaggaatgcgcttagtgtccttgaacctcctactggaaacgaagaagacgatgatcttgatttcgaaaacacacagaggaatggctctgatatgacatctgaggacacactgaagcctcataagtctaagctaagagggcagagatcatctcggtcatctcacaagacgatgagcaggtctctatcatctgactcgcaatcaaaaagttcgggttttactcctcctgaaaacatgaaggttgatcttagcaaattggaaatgcctgctttactgaattattggcgacattttaaccttgtggatgcaattccaaatccatcaaaggagcaactaattgacattgttcaaaggcacttcatgtctcagcaaatggatgagcttcaggttattgtggggtttgtccaagctgcaaagagaatgaagaaggcttgcaagtttcaatccaaagaatccagaaacactgatcttaactgcatcagctaaagaaaagccctgactcttaacaaatcctgtatgtacggtacatcaacttgtttaaccatttgtggcttgctaagtttagttcttctagtgatgtttggctaaagggtagatgttgtttcttctttgcttctgttgtttagccaatgtaagtaccatcaaaaaacccaaataactctctaaagctccctattggaaactatcttgtctgatacgatctggagtgaccggtatgttgttagaatgtaaatatgtttggc

SEQ ID NO: 24833 - protein, 242 aa, Arabidopsis thaliana
  peptide (1)..(242): Ceres Seq. ID no. 12396071
  misc_feature (204)..(223): Homolog of NCBI NO: 38567956 NR Description: OSJNBb0115I21.12 [Oryza sativa (japonica
  misc_feature (26)..(98): Homolog of NCBI NO: 38567956 NR Description: OSJNBb0115I21.12 [Oryza sativa (japonica
  misc_feature (26)..(223): Homolog of NCBI NO: 38346468 NR Description: OSJNBa0019G23.16 [Oryza sativa (japonica
  misc_feature (2)..(213): Homolog of NCBI NO: 18767383 NR Description: Hypothetical protein [Oryza sativa]
  misc_feature (1)..(213): Homolog of NCBI NO: 37533376 NR Description: hypothetical protein [Oryza sativa (japonica
  misc_feature (1)..(234): Homolog of NCBI NO: 15222092 NR Description: hypothetical protein; protein id: At1g75060.1
  misc_feature (1)..(242): Homolog of NCBI NO: 18394724 NR Description: expressed protein
  misc_feature (1)..(242): Homolog of NCBI NO: 25372870 NR Description: protein F18O14.5 [imported] - Arabidopsis
MLEAVDSSGVVNGGFPQIQSFYGDCSSEEELSVLPRHTKVVVTGNNRTKSVLVGLQGVVKKAVGLGGWHWLVLTNGIEVKLQRNALSVLEPPTGNEEDDDLDFENTQRNGSDMTSEDTLKPHKSKLRGQRSSRSSHKTMSRSLSSDSQSKSSGFTPPENMKVDLSKLEMPALLNYWRHFNLVDAIPNPSKEQLIDIVQRHFMSQQMDELQVIVGFVQAAKRMKKACKFQSKESRNTDLNCIS

SEQ ID NO: 24834 - protein, 130 aa, Arabidopsis thaliana
  peptide (1)..(130): Ceres Seq. ID no. 12396072
  misc_feature (92)..(111): Homolog of NCBI NO: 38567956 NR Description: OSJNBb0115I21.12 [Oryza sativa (japonica
  misc_feature (1)..(111): Homolog of NCBI NO: 38346468 NR Description: OSJNBa0019G23.16 [Oryza sativa (japonica
  misc_feature (1)..(101): Homolog of NCBI NO: 18767383 NR Description: Hypothetical protein [Oryza sativa]
  misc_feature (1)..(101): Homolog of NCBI NO: 37533376 NR Description: hypothetical protein [Oryza sativa (japonica
  misc_feature (1)..(122): Homolog of NCBI NO: 15222092 NR Description: hypothetical protein; protein id: At1g75060.1
  misc_feature (1)..(130): Homolog of NCBI NO: 18394724 NR Description: expressed protein
  misc_feature (1)..(130): Homolog of NCBI NO: 25372870 NR Description: protein F18O14.5 [imported] - Arabidopsis
MTSEDTLKPHKSKLRGQRSSRSSHKTMSRSLSSDSQSKSSGFTPPENMKVDLSKLEMPALLNYWRHFNLVDAIPNPSKEQLIDIVQRHFMSQQMDELQVIVGFVQAAKRMKKACKFQSKESRNTDLNCIS

SEQ ID NO: 24835 - DNA, 1285 bp, Arabidopsis thaliana
  misc_feature (1)..(1285): Ceres Seq. ID no. 12561971
  misc_feature: MA Experiment ID: 108435 Result: Up-regulated in Transcription
  misc_feature: MA Experiment 108435 PARAMETER Experiment Name: At_stm_Mutants_cDNA_P Parameter: Plant Line Value: wt Landsburg vs stm
  misc_feature: MA Experiment 108435 PARAMETER Experiment Name: At_stm_Mutants_cDNA_P Parameter: Tissue Value: Shoot Apical Meristem Region
  misc_feature: MA Experiment ID: 108461 Result: Down-regulated in Transcription
  misc_feature: MA Experiment 108461 PARAMETER Experiment Name: At_Germinating_Seeds_cDNA_P Parameter: Age (day) Value: 1 vs. 0
  misc_feature: MA Experiment 108461 PARAMETER Experiment Name: At_Germinating_Seeds_cDNA_P Parameter: Tissue Value: Germinating Seeds
  misc_feature: MA Experiment ID: 108464 Result: Down-regulated in Transcription
  misc_feature: MA Experiment 108464 PARAMETER Experiment Name: At_Germinating_Seeds_cDNA_P Parameter: Age (day) Value: 4 vs. 0
  misc_feature: MA Experiment 108464 PARAMETER Experiment Name: At_Germinating_Seeds_cDNA_P Parameter: Tissue Value: Germinating Seeds
  misc_feature: MA Experiment ID: 108469 Result: Up-regulated in Transcription
  misc_feature: MA Experiment ID: 108501 Result: Up-regulated in Transcription
  misc_feature: MA Experiment 108501 PARAMETER Experiment Name: At_ap2_floral_buds_cDNA_P Parameter: Plant Line Value: ap2 (Ler.)
  misc_feature: MA Experiment 108501 PARAMETER Experiment Name: At_ap2_floral_buds_cDNA_P Parameter: Tissue Value: Closed Flower
  misc_feature: MA Experiment ID: 108561 Result: Up-regulated in Transcription
  misc_feature: MA Experiment 108561 PARAMETER Experiment Name: At_100uM_ABA_cDNA_P Parameter: Timepoint (hr) Value: 6
  misc_feature: MA Experiment 108561 PARAMETER Experiment Name: At_100uM_ABA_cDNA_P Parameter: Tissue Value: Aerial
  misc_feature: MA Experiment 108561 PARAMETER Experiment Name: At_100uM_ABA_cDNA_P Parameter: Treatment Value: 100uM ABA vs. No Treatment
  misc_feature: MA Experiment ID: 108572 Result: Up-regulated in Transcription
  misc_feature: MA Experiment 108572 PARAMETER Experiment Name: At_Drought_cDNA_P Parameter: Timepoint (hr) Value: 1
  misc_feature: MA Experiment 108572 PARAMETER Experiment Name: At_Drought_cDNA_P Parameter: Tissue Value: Aerial
  misc_feature: MA Experiment 108572 PARAMETER Experiment Name: At_Drought_cDNA_P Parameter: Treatment Value: Drought vs. No Drought
  misc_feature: MA Experiment ID: 108573 Result: Up-regulated in Transcription
  misc_feature: MA Experiment 108573 PARAMETER Experiment Name: At_Drought_cDNA_P Parameter: Timepoint (hr) Value: 6
  misc_feature: MA Experiment 108573 PARAMETER Experiment Name: At_Drought_cDNA_P Parameter: Tissue Value: Aerial
  misc_feature: MA Experiment 108573 PARAMETER Experiment Name: At_Drought_cDNA_P Parameter: Treatment Value: Drought vs. No Drought
  misc_feature: MA Experiment ID: 108577 Result: Up-regulated in Transcription
  misc_feature: MA Experiment 108577 PARAMETER Experiment Name: At_42deg_Heat_cDNA_P Parameter: Temperature (deg C) Value: 42 vs. 22
  misc_feature: MA Experiment 108577 PARAMETER Experiment Name: At_42deg_Heat_cDNA_P Parameter: Timepoint (hr) Value: 6
  misc_feature: MA Experiment 108577 PARAMETER Experiment Name: At_42deg_Heat_cDNA_P Parameter: Tissue Value: Aerial
  misc_feature: MA Experiment ID: 108594 Result: Down-regulated in Transcription
  misc_feature: MA Experiment 108594 PARAMETER Experiment Name: At_Ler-rhl_Root_cDNA_P Parameter: Plant Line Value: null
  misc_feature: MA Experiment ID: 108595 Result: Up-regulated in Transcription
  misc_feature: MA Experiment 108595 PARAMETER Experiment Name: At_Ler-pi_Ovule_cDNA_P Parameter: Plant Line Value: null
  misc_feature: MA Experiment ID: 108605 Result: Up-regulated in Transcription
  misc_feature: MA Experiment 108605 PARAMETER Experiment Name: At_100uM_ABA_cDNA_P Parameter: Timepoint (hr) Value: 6
  misc_feature: MA Experiment 108605 PARAMETER Experiment Name: At_100uM_ABA_cDNA_P Parameter: Tissue Value: Aerial
  misc_feature: MA Experiment 108605 PARAMETER Experiment Name: At_100uM_ABA_cDNA_P Parameter: Treatment Value: 100uM ABA vs. No Treatment
  misc_feature: MA Experiment ID: 108607 Result: Up-regulated in Transcription
  misc_feature: MA Experiment 108607 PARAMETER Experiment Name: At_100uM_ABA_cDNA_P Parameter: Timepoint (hr) Value: 4
  misc_feature: MA Experiment 108607 PARAMETER Experiment Name: At_100uM_ABA_cDNA_P Parameter: Tissue Value: Aerial
  misc_feature: MA Experiment 108607 PARAMETER Experiment Name: At_100uM_ABA_cDNA_P Parameter: Treatment Value: 100uM ABA vs. No Treatment
  misc_feature: MA Experiment ID: 108608 Result: Up-regulated in Transcription
  misc_feature: MA Experiment 108608 PARAMETER Experiment Name: At_100uM_ABA_cDNA_P Parameter: Timepoint (hr) Value: 1
  misc_feature: MA Experiment 108608 PARAMETER Experiment Name: At_100uM_ABA_cDNA_P Parameter: Tissue Value: Aerial
  misc_feature: MA Experiment 108608 PARAMETER Experiment Name: At_100uM_ABA_cDNA_P Parameter: Treatment Value: 100uM ABA vs. No Treatment
  misc_feature: MA Experiment ID: 108609 Result: Up-regulated in Transcription
  misc_feature: MA Experiment 108609 PARAMETER Experiment Name: At_100uM_ABA_cDNA_P Parameter: Timepoint (hr) Value: 24
  misc_feature: MA Experiment 108609 PARAMETER Experiment Name: At_100uM_ABA_cDNA_P Parameter: Tissue Value: Aerial
  misc_feature: MA Experiment 108609 PARAMETER Experiment Name: At_100uM_ABA_cDNA_P Parameter: Treatment Value: 100uM ABA vs. No Treatment
  misc_feature: MA Experiment ID: 108668 Result: Up-regulated in Transcription
  misc_feature: MA Experiment 108668 PARAMETER Experiment Name: At_2mM_SA_cDNA_P Parameter: Plant Line Value: WS
  misc_feature: MA Experiment 108668 PARAMETER Experiment Name: At_2mM_SA_cDNA_P Parameter: Timepoint (hr) Value: 6
  misc_feature: MA Experiment 108668 PARAMETER Experiment Name: At_2mM_SA_cDNA_P Parameter: Treatment Value: 2mM SA vs. No Treatment
  misc_feature: MA Experiment ID: 20000069 Result: Up-regulated in Transcription
  misc_feature: MA Experiment 20000069 PARAMETER Experiment Name: At_100uM_ABA_Mutants_cDNA_P Parameter: Plant Line Value: CS23
  misc_feature: MA Experiment 20000069 PARAMETER Experiment Name: At_100uM_ABA_Mutants_cDNA_P Parameter: Timepoint (hr) Value: 6
  misc_feature: MA Experiment 20000069 PARAMETER Experiment Name: At_100uM_ABA_Mutants_cDNA_P Parameter: Tissue Value: Aerial
  misc_feature: MA Experiment 20000069 PARAMETER Experiment Name: At_100uM_ABA_Mutants_cDNA_P Parameter: Treatment Value: 100uM ABA vs. No Treatment
  misc_feature: MA Experiment ID: 20000070 Result: Up-regulated in Transcription
  misc_feature: MA Experiment 20000070 PARAMETER Experiment Name: At_100uM_ABA_Mutants_cDNA_P Parameter: Plant Line Value: CS24
  misc_feature: MA Experiment 20000070 PARAMETER Experiment Name: At_100uM_ABA_Mutants_cDNA_P Parameter: Timepoint (hr) Value: 6
  misc_feature: MA Experiment 20000070 PARAMETER Experiment Name: At_100uM_ABA_Mutants_cDNA_P Parameter: Tissue Value: Aerial
  misc_feature: MA Experiment 20000070 PARAMETER Experiment Name: At_100uM_ABA_Mutants_cDNA_P Parameter: Treatment Value: 100uM ABA vs. No Treatment
  misc_feature: MA Experiment ID: 20000071 Result: Up-regulated in Transcription
  misc_feature: MA Experiment 20000071 PARAMETER Experiment Name: At_100uM_ABA_Mutants_cDNA_P Parameter: Plant Line Value: CS8104
  misc_feature: MA Experiment 20000071 PARAMETER Experiment Name: At_100uM_ABA_Mutants_cDNA_P Parameter: Timepoint (hr) Value: 6
  misc_feature: MA Experiment 20000071 PARAMETER Experiment Name: At_100uM_ABA_Mutants_cDNA_P Parameter: Tissue Value: Aerial
  misc_feature: MA Experiment 20000071 PARAMETER Experiment Name: At_100uM_ABA_Mutants_cDNA_P Parameter: Treatment Value: 100uM ABA vs. No Treatment
  misc_feature: MA Experiment ID: 20000086 Result: Up-regulated in Transcription
  misc_feature: MA Experiment 20000086 PARAMETER Experiment Name: At_100uM_ABA_Mutants_cDNA_P Parameter: Plant Line Value: CS22
  misc_feature: MA Experiment 20000086 PARAMETER Experiment Name: At_100uM_ABA_Mutants_cDNA_P Parameter: Timepoint (hr) Value: 6
  misc_feature: MA Experiment 20000086 PARAMETER Experiment Name: At_100uM_ABA_Mutants_cDNA_P Parameter: Tissue Value: Aerial
  misc_feature: MA Experiment 20000086 PARAMETER Experiment Name: At_100uM_ABA_Mutants_cDNA_P Parameter: Treatment Value: 100uM ABA vs. No Treatment
  misc_feature: MA Experiment ID: 20000087 Result: Up-regulated in Transcription
  misc_feature: MA Experiment 20000087 PARAMETER Experiment Name: At_100uM_ABA_Mutants_cDNA_P Parameter: Plant Line Value: WS
  misc_feature: MA Experiment 20000087 PARAMETER Experiment Name: At_100uM_ABA_Mutants_cDNA_P Parameter: Timepoint (hr) Value: 6
  misc_feature: MA Experiment 20000087 PARAMETER Experiment Name: At_100uM_ABA_Mutants_cDNA_P Parameter: Tissue Value: Aerial
  misc_feature: MA Experiment 20000087 PARAMETER Experiment Name: At_100uM_ABA_Mutants_cDNA_P Parameter: Treatment Value: 100uM ABA vs. No Treatment
  misc_feature: MA Experiment ID: 20000088 Result: Up-regulated in Transcription
  misc_feature: MA Experiment 20000088 PARAMETER Experiment Name: At_100uM_ABA_Mutants_cDNA_P Parameter: Plant Line Value: Landsberg
  misc_feature: MA Experiment 20000088 PARAMETER Experiment Name: At_100uM_ABA_Mutants_cDNA_P Parameter: Timepoint (hr) Value: 6
  misc_feature: MA Experiment 20000088 PARAMETER Experiment Name: At_100uM_ABA_Mutants_cDNA_P Parameter: Tissue Value: Aerial
  misc_feature: MA Experiment 20000088 PARAMETER Experiment Name: At_100uM_ABA_Mutants_cDNA_P Parameter: Treatment Value: 100uM ABA vs. No Treatment
  misc_feature: MA Experiment ID: 20000093 Result: Up-regulated in Transcription
  misc_feature: MA Experiment 20000093 PARAMETER Experiment Name: At_42deg_Heat_cDNA_P Parameter: Temperature (deg C) Value: 42 vs. 22
  misc_feature: MA Experiment 20000093 PARAMETER Experiment Name: At_42deg_Heat_cDNA_P Parameter: Timepoint (hr) Value: 0.5
  misc_feature: MA Experiment 20000093 PARAMETER Experiment Name: At_42deg_Heat_cDNA_P Parameter: Tissue Value: Aerial
  misc_feature: MA Experiment ID: 20000112 Result: Up-regulated in Transcription
  misc_feature: MA Experiment 20000112 PARAMETER Experiment Name: At_42deg_Heat_cDNA_P Parameter: Temperature (deg C) Value: 42 vs. 22
  misc_feature: MA Experiment 20000112 PARAMETER Experiment Name: At_42deg_Heat_cDNA_P Parameter: Timepoint (hr) Value: 2
  misc_feature: MA Experiment 20000112 PARAMETER Experiment Name: At_42deg_Heat_cDNA_P Parameter: Tissue Value: Aerial
  misc_feature: MA Experiment ID: 20000113 Result: Up-regulated in Transcription
  misc_feature: MA Experiment 20000113 PARAMETER Experiment Name: At_42deg_Heat_cDNA_P Parameter: Temperature (deg C) Value: 42 vs. 22
  misc_feature: MA Experiment 20000113 PARAMETER Experiment Name: At_42deg_Heat_cDNA_P Parameter: Timepoint (hr) Value: 8
  misc_feature: MA Experiment 20000113 PARAMETER Experiment Name: At_42deg_Heat_cDNA_P Parameter: Tissue Value: Aerial
  misc_feature: MA Experiment ID: 20000117 Result: Up-regulated in Transcription
  misc_feature: MA Experiment 20000117 PARAMETER Experiment Name: At_100uM_ABA_Mutants_cDNA_P Parameter: Plant Line Value: Columbia
  misc_feature: MA Experiment 20000117 PARAMETER Experiment Name: At_100uM_ABA_Mutants_cDNA_P Parameter: Timepoint (hr) Value: 6
  misc_feature: MA Experiment 20000117 PARAMETER Experiment Name: At_100uM_ABA_Mutants_cDNA_P Parameter: Tissue Value: Aerial
  misc_feature: MA Experiment 20000117 PARAMETER Experiment Name: At_100uM_ABA_Mutants_cDNA_P Parameter: Treatment Value: 100uM ABA vs. No Treatment
  misc_feature: MA Experiment ID: 20000144 Result: Up-regulated in Transcription
  misc_feature: MA Experiment 20000144 PARAMETER Experiment Name: At_42deg_Heat_cDNA_P Parameter: Temperature (deg C) Value: 42 vs. 22
  misc_feature: MA Experiment 20000144 PARAMETER Experiment Name: At_42deg_Heat_cDNA_P Parameter: Timepoint (hr) Value: 1
  misc_feature: MA Experiment 20000144 PARAMETER Experiment Name: At_42deg_Heat_cDNA_P Parameter: Tissue Value: Aerial
  misc_feature: MA Experiment ID: 20000166 Result: Up-regulated in Transcription
  misc_feature: MA Experiment 20000166 PARAMETER Experiment Name: At_100uM_ABA_P Parameter: Age (day) Value: 14
  misc_feature: MA Experiment 20000166 PARAMETER Experiment Name: At_100uM_ABA_P Parameter: Organism Value: A. thaliana
  misc_feature: MA Experiment 20000166 PARAMETER Experiment Name: At_100uM_ABA_P Parameter: Plant Line Value: WS
  misc_feature: MA Experiment 20000166 PARAMETER Experiment Name: At_100uM_ABA_P Parameter: Timepoint (hr) Value: 1
  misc_feature: MA Experiment 20000166 PARAMETER Experiment Name: At_100uM_ABA_P Parameter: Tissue Value: Aerial
  misc_feature: MA Experiment 20000166 PARAMETER Experiment Name: At_100uM_ABA_P Parameter: Treatment Value: 100uM ABA vs. No Treatment
  misc_feature: MA Experiment ID: 20000169 Result: Up-regulated in Transcription
  misc_feature: MA Experiment 20000169 PARAMETER Experiment Name: At_100uM_ABA_P Parameter: Age (day) Value: 14
  misc_feature: MA Experiment 20000169 PARAMETER Experiment Name: At_100uM_ABA_P Parameter: Organism Value: A. thaliana
  misc_feature: MA Experiment 20000169 PARAMETER Experiment Name: At_100uM_ABA_P Parameter: Plant Line Value: WS
  misc_feature: MA Experiment 20000169 PARAMETER Experiment Name: At_100uM_ABA_P Parameter: Timepoint (hr) Value: 6
  misc_feature: MA Experiment 20000169 PARAMETER Experiment Name: At_100uM_ABA_P Parameter: Tissue Value: Aerial
  misc_feature: MA Experiment 20000169 PARAMETER Experiment Name: At_100uM_ABA_P Parameter: Treatment Value: 100uM ABA vs. No Treatment
  misc_feature: MA Experiment ID: 20000171 Result: Up-regulated in Transcription
  misc_feature: MA Experiment 20000171 PARAMETER Experiment Name: At_42deg_Heat_P Parameter: Age (day) Value: 14
  misc_feature: MA Experiment 20000171 PARAMETER Experiment Name: At_42deg_Heat_P Parameter: Organism Value: A. thaliana
  misc_feature: MA Experiment 20000171 PARAMETER Experiment Name: At_42deg_Heat_P Parameter: Plant Line Value: WS
  misc_feature: MA Experiment 20000171 PARAMETER Experiment Name: At_42deg_Heat_P Parameter: Temperature (deg C) Value: 42 vs. 22
  misc_feature: MA Experiment 20000171 PARAMETER Experiment Name: At_42deg_Heat_P Parameter: Timepoint (hr) Value: 1
  misc_feature: MA Experiment 20000171 PARAMETER Experiment Name: At_42deg_Heat_P Parameter: Tissue Value: Aerial
  misc_feature: MA Experiment ID: 20000182 Result: Up-regulated in Transcription
  misc_feature: MA Experiment 20000182 PARAMETER Experiment Name: At_2mM_SA_P Parameter: Age (day) Value: 14
  misc_feature: MA Experiment 20000182 PARAMETER Experiment Name: At_2mM_SA_P Parameter: Organism Value: A. thaliana
  misc_feature: MA Experiment 20000182 PARAMETER Experiment Name: At_2mM_SA_P Parameter: Plant Line Value: WS
  misc_feature: MA Experiment 20000182 PARAMETER Experiment Name: At_2mM_SA_P Parameter: Timepoint (hr) Value: 6
  misc_feature: MA Experiment 20000182 PARAMETER Experiment Name: At_2mM_SA_P Parameter: Tissue Value: Aerial
  misc_feature: MA Experiment 20000182 PARAMETER Experiment Name: At_2mM_SA_P Parameter: Treatment Value: 2mM SA vs. No Treatment
  misc_feature: MA Experiment ID: 20000184 Result: Down-regulated in Transcription
  misc_feature: MA Experiment 20000184 PARAMETER Experiment Name: At_Shoots__P Parameter: Age (day) Value: 7
  misc_feature: MA Experiment 20000184 PARAMETER Experiment Name: At_Shoots__P Parameter: Tissue Value: Shoots vs. Whole Plant
  misc_feature: MA Experiment ID: 20000234 Result: Up-regulated in Transcription
  misc_feature: MA Experiment 20000234 PARAMETER Experiment Name: At_Siliques_P Parameter: Age (day) Value: 21
  misc_feature: MA Experiment 20000234 PARAMETER Experiment Name: At_Siliques_P Parameter: Organism Value: A. thaliana
  misc_feature: MA Experiment 20000234 PARAMETER Experiment Name: At_Siliques_P Parameter: Plant Line Value: WS
  misc_feature: MA Experiment 20000234 PARAMETER Experiment Name: At_Siliques_P Parameter: Tissue Value: Less Than 5mm Siliques vs. Whole Plant
  misc_feature: MA Experiment ID: 20000264 Result: Up-regulated in Transcription
  misc_feature: MA Experiment 20000264 PARAMETER Experiment Name: At_Open_Flower_P Parameter: Age (day) Value: 21
  misc_feature: MA Experiment 20000264 PARAMETER Experiment Name: At_Open_Flower_P Parameter: Plant Line Value: WS
  misc_feature: MA Experiment 20000264 PARAMETER Experiment Name: At_Open_Flower_P Parameter: Tissue Value: Open Flower vs. Whole Plant
  misc_feature: MA Experiment ID: 20000267 Result: Up-regulated in Transcription
  misc_feature: MA Experiment 20000267 PARAMETER Experiment Name: At_Drought_P Parameter: Age (day) Value: 7
  misc_feature: MA Experiment 20000267 PARAMETER Experiment Name: At_Drought_P Parameter: Organism Value: A. thaliana
  misc_feature: MA Experiment 20000267 PARAMETER Experiment Name: At_Drought_P Parameter: Plant Line Value: WS
  misc_feature: MA Experiment 20000267 PARAMETER Experiment Name: At_Drought_P Parameter: Timepoint (hr) Value: 6
  misc_feature: MA Experiment 20000267 PARAMETER Experiment Name: At_Drought_P Parameter: Tissue Value: Whole Plant
  misc_feature: MA Experiment 20000267 PARAMETER Experiment Name: At_Drought_P Parameter: Treatment Value: Drought vs. No Drought
  misc_feature: MA Experiment ID: 20000268 Result: Up-regulated in Transcription
  misc_feature: MA Experiment 20000268 PARAMETER Experiment Name: At_100mM_NaCl__P Parameter: Age (day) Value: 14
  misc_feature: MA Experiment 20000268 PARAMETER Experiment Name: At_100mM_NaCl__P Parameter: Organism Value: A. thaliana
  misc_feature: MA Experiment 20000268 PARAMETER Experiment Name: At_100mM_NaCl__P Parameter: Plant Line Value: WS
  misc_feature: MA Experiment 20000268 PARAMETER Experiment Name: At_100mM_NaCl__P Parameter: Timepoint (hr) Value: 6
  misc_feature: MA Experiment 20000268 PARAMETER Experiment Name: At_100mM_NaCl__P Parameter: Tissue Value: Whole Plant
  misc_feature: MA Experiment 20000268 PARAMETER Experiment Name: At_100mM_NaCl__P Parameter: Treatment Value: 100mM NaCl vs. No Treatment
  misc_feature: MA Experiment ID: 20000436 Result: Up-regulated in Transcription
  misc_feature: MA Experiment 20000436 PARAMETER Experiment Name: At_Drought_P Parameter: Age (day) Value: 7
  misc_feature: MA Experiment 20000436 PARAMETER Experiment Name: At_Drought_P Parameter: Organism Value: A. thaliana
  misc_feature: MA Experiment 20000436 PARAMETER Experiment Name: At_Drought_P Parameter: Plant Line Value: WS
  misc_feature: MA Experiment 20000436 PARAMETER Experiment Name: At_Drought_P Parameter: Timepoint (hr) Value: 12
  misc_feature: MA Experiment 20000436 PARAMETER Experiment Name: At_Drought_P Parameter: Tissue Value: Whole Plant
  misc_feature: MA Experiment 20000436 PARAMETER Experiment Name: At_Drought_P Parameter: Treatment Value: Drought vs. No Drought
  misc_feature: MA Experiment ID: 20000453 Result: Up-regulated in Transcription
  misc_feature: MA Experiment 20000453 PARAMETER Experiment Name: At_100uM_ABA_P Parameter: Age (day) Value: 15
  misc_feature: MA Experiment 20000453 PARAMETER Experiment Name: At_100uM_ABA_P Parameter: Organism Value: A. thaliana
  misc_feature: MA Experiment 20000453 PARAMETER Experiment Name: At_100uM_ABA_P Parameter: Plant Line Value: WS
  misc_feature: MA Experiment 20000453 PARAMETER Experiment Name: At_100uM_ABA_P Parameter: Timepoint (hr) Value: 24
  misc_feature: MA Experiment 20000453 PARAMETER Experiment Name: At_100uM_ABA_P Parameter: Tissue Value: Aerial
  misc_feature: MA Experiment 20000453 PARAMETER Experiment Name: At_100uM_ABA_P Parameter: Treatment Value: 100uM ABA vs. No Treatment
  misc_feature: MA Experiment ID: 20000455 Result: Up-regulated in Transcription
  misc_feature: MA Experiment 20000455 PARAMETER Experiment Name: At_100uM_ABA_P Parameter: Age (day) Value: 16
  misc_feature: MA Experiment 20000455 PARAMETER Experiment Name: At_100uM_ABA_P Parameter: Organism Value: A. thaliana
  misc_feature: MA Experiment 20000455 PARAMETER Experiment Name: At_100uM_ABA_P Parameter: Plant Line Value: WS
  misc_feature: MA Experiment 20000455 PARAMETER Experiment Name: At_100uM_ABA_P Parameter: Timepoint (hr) Value: 48
  misc_feature: MA Experiment 20000455 PARAMETER Experiment Name: At_100uM_ABA_P Parameter: Tissue Value: Aerial
  misc_feature: MA Experiment 20000455 PARAMETER Experiment Name: At_100uM_ABA_P Parameter: Treatment Value: 100uM ABA vs. No Treatment
  misc_feature: MA Experiment ID: 20000794 Result: Up-regulated in Transcription
  misc_feature: MA Experiment 20000794 PARAMETER Experiment Name: At_Petals_P Parameter: Age (day) Value: 23-25 days
  misc_feature: MA Experiment 20000794 PARAMETER Experiment Name: At_Petals_P Parameter: Plant Line Value: WS
  misc_feature: MA Experiment 20000794 PARAMETER Experiment Name: At_Petals_P Parameter: Tissue Value: Petals vs. Whole plant
  misc_feature: MA Experiment ID: 20001248 Result: Down-regulated in Transcription
  misc_feature: MA Experiment 20001248 PARAMETER Experiment Name: At_Far-red-induction_P Parameter: Age (day) Value: 7
  misc_feature: MA Experiment 20001248 PARAMETER Experiment Name: At_Far-red-induction_P Parameter: Light Value: Far-red vs. White
  misc_feature: MA Experiment 20001248 PARAMETER Experiment Name: At_Far-red-induction_P Parameter: Organism Value: A. thaliana
  misc_feature: MA Experiment 20001248 PARAMETER Experiment Name: At_Far-red-induction_P Parameter: Plant Line Value: Columbia
  misc_feature: MA Experiment 20001248 PARAMETER Experiment Name: At_Far-red-induction_P Parameter: Timepoint (hr) Value: 4
  misc_feature: MA Experiment 20001248 PARAMETER Experiment Name: At_Far-red-induction_P Parameter: Tissue Value: Whole Plant
  misc_feature: MA Experiment ID: 20001450 Result: Down-regulated in Transcription
  misc_feature: MA Experiment 20001450 PARAMETER Experiment Name: At_Far-red-induction_P Parameter: Age (day) Value: 7
  misc_feature: MA Experiment 20001450 PARAMETER Experiment Name: At_Far-red-induction_P Parameter: Light Value: Far-red vs. White
  misc_feature: MA Experiment 20001450 PARAMETER Experiment Name: At_Far-red-induction_P Parameter: Organism Value: A. thaliana
  misc_feature: MA Experiment 20001450 PARAMETER Experiment Name: At_Far-red-induction_P Parameter: Plant Line Value: Columbia
  misc_feature: MA Experiment 20001450 PARAMETER Experiment Name: At_Far-red-induction_P Parameter: Timepoint (hr) Value: 8
  misc_feature: MA Experiment 20001450 PARAMETER Experiment Name: At_Far-red-induction_P Parameter: Tissue Value: Whole Plant
  misc_feature: MA Experiment ID: 20001554 Result: Up-regulated in Transcription
  misc_feature: MA Experiment 20001554 PARAMETER Experiment Name: At_Drought_Soil_Dry_P Parameter: Age (day) Value: 21
  misc_feature: MA Experiment 20001554 PARAMETER Experiment Name: At_Drought_Soil_Dry_P Parameter: Organism Value: A. thaliana
  misc_feature: MA Experiment 20001554 PARAMETER Experiment Name: At_Drought_Soil_Dry_P Parameter: Plant Line Value: WS
  misc_feature: MA Experiment 20001554 PARAMETER Experiment Name: At_Drought_Soil_Dry_P Parameter: Post Timepoint (hr) Value: None
  misc_feature: MA Experiment 20001554 PARAMETER Experiment Name: At_Drought_Soil_Dry_P Parameter: Post-Treatment Value: None
  misc_feature: MA Experiment 20001554 PARAMETER Experiment Name: At_Drought_Soil_Dry_P Parameter: Timepoint (day) Value: 7
  misc_feature: MA Experiment 20001554 PARAMETER Experiment Name: At_Drought_Soil_Dry_P Parameter: Treatment Value: Drought vs. No Drought
  misc_feature: MA Experiment ID: 20001555 Result: Up-regulated in Transcription
  misc_feature: MA Experiment 20001555 PARAMETER Experiment Name: At_Drought_Soil_Dry_P Parameter: Age (day) Value: 24
  misc_feature: MA Experiment 20001555 PARAMETER Experiment Name: At_Drought_Soil_Dry_P Parameter: Organism Value: A. thaliana
  misc_feature: MA Experiment 20001555 PARAMETER Experiment Name: At_Drought_Soil_Dry_P Parameter: Plant Line Value: WS
  misc_feature: MA Experiment 20001555 PARAMETER Experiment Name: At_Drought_Soil_Dry_P Parameter: Post Timepoint (hr) Value: None
  misc_feature: MA Experiment 20001555 PARAMETER Experiment Name: At_Drought_Soil_Dry_P Parameter: Post-Treatment Value: None
  misc_feature: MA Experiment 20001555 PARAMETER Experiment Name: At_Drought_Soil_Dry_P Parameter: Timepoint (day) Value: 10
  misc_feature: MA Experiment 20001555 PARAMETER Experiment Name: At_Drought_Soil_Dry_P Parameter: Treatment Value: Drought vs. No Drought
  misc_feature: MA Experiment ID: 20001905 Result: Up-regulated in Transcription
  misc_feature: MA Experiment 20001905 PARAMETER Experiment Name: At_Drought_Reproduction_P Parameter: Age (day) Value: 40
  misc_feature: MA Experiment 20001905 PARAMETER Experiment Name: At_Drought_Reproduction_P Parameter: Organism Value: A. thaliana
  misc_feature: MA Experiment 20001905 PARAMETER Experiment Name: At_Drought_Reproduction_P Parameter: Plant Line Value: WS
  misc_feature: MA Experiment 20001905 PARAMETER Experiment Name: At_Drought_Reproduction_P Parameter: Timepoint (day) Value: 10
  misc_feature: MA Experiment 20001905 PARAMETER Experiment Name: At_Drought_Reproduction_P Parameter: Tissue Value: Rosettes
  misc_feature: MA Experiment 20001905 PARAMETER Experiment Name: At_Drought_Reproduction_P Parameter: Treatment Value: Drought vs. No Drought
gcagacgaatgtttttggtttcgagaatttgctgaaatctattcaacgtatacagaggctggagctggggaagaaaaggattgtctatggagggagacgtcggaataggtttggtatgccagaatactatggatgggaaggcgagtaatggaaatggtttagagaagactgtaccttcttgttgccttaaggctatggcatgtgtacctgaggatgatgctaagtgtcactccactgttgtttctgggtggttttcggaacctcaccctcgctctgggaaaaaaggcggcaaagcagtctatttcaacaaccctatgtggccaggagaagcacactcactgaaagttgagaaagttctgttcaaagacaagtcggattttcaggaagtcctagtgttcgagtcagccacgtacggaaaggtgcttgttctagatggtatcgtacagctgaccgaaaaagatgaatgtgcatatcaggagatgatagcccatctgcctttatgctctatatcttcccctaaaaatgttcttgttgttggtggaggtgatggtggtgttcttcgagagatttctcgccatagttctgttgaggttattgatatctgtgagatagacaagatggttatagatgtgtctaagaagttcttccccgagttagcggttgggtttgacgatcctcgtgttcaacttcacattggtgatgctgctgagttcctccgtaaatcccctgaagggaagtatgatgccatcattgttgattcttcagatcccgtaggtcctgctcttgcgcttgttgagaagcctttcttcgagacactggctagagcgttgaagcctgggggagttctttgtaacatggcagaaagtatgtggctccatactcatcttattgaagatatgatctccatttgccgtcaaacattcaaaagtgttcactatgcgtggagcagcgtccccacatatccaagcggcgtgattggtttcgtcttgtgctctactgaaggaccagctgttgacttcaagaacccaatcaaccctattgagaaactagacggtgcgatgacccataaaagagaattgaagttctataactctgatatgcacagagccgcatttgctttgcccacattcctgcggagagaagtagcttcacttctggcttcttgacttctgtttggctctaccatatccctcatatcaaactttgtagaactcttgaagaggaataataaatcattgaaggctttgtatctctaagtttactcctttataaaaagacttatatt

SEQ ID NO: 24836 - protein, 359 aa, Arabidopsis thaliana
  peptide (1)..(359): Ceres Seq. ID no. 12561972
  misc_feature (54)..(313): Pfam Name: Spermine/spermidine synthase Pfam Description: Spermine/spermidine synthase
  misc_feature (75)..(355): Homolog of NCBI NO: 6094327 NR Description: Spermidine synthase 1 (Putrescine
  misc_feature (42)..(355): Homolog of NCBI NO: 12229958 NR Description: Spermidine synthase 1 (Putrescine
  misc_feature (75)..(355): Homolog of NCBI NO: 6094330 NR Description: Spermidine synthase 2 (Putrescine
  misc_feature (49)..(355): Homolog of NCBI NO: 6094335 NR Description: Spermidine synthase (Putrescine
  misc_feature (18)..(355): Homolog of NCBI NO: 33354149 NR Description: aminopropyl transferase [Oryza sativa (japonica
  misc_feature (15)..(359): Homolog of NCBI NO: 33150481 NR Description: putative spermine synthase [Lycopersicon
  misc_feature (1)..(359): Homolog of NCBI NO: 9757993 NR Description: spermidine synthase [Arabidopsis thaliana]
  misc_feature (15)..(359): Homolog of NCBI NO: 21592832 NR Description: spermidine synthase [Arabidopsis thaliana]
  misc_feature (1)..(359): Homolog of NCBI NO: 15983394 NR Description: AT5g53120/MFH8_5 [Arabidopsis thaliana]
  misc_feature (1)..(359): Homolog of NCBI NO: 18423473 NR Description: spermidine synthase
MEGDVGIGLVCQNTMDGKASNGNGLEKTVPSCCLKAMACVPEDDAKCHSTVVSGWFSEPHPRSGKKGGKAVYFNNPMWPGEAHSLKVEKVLFKDKSDFQEVLVFESATYGKVLVLDGIVQLTEKDECAYQEMIAHLPLCSISSPKNVLVVGGGDGGVLREISRHSSVEVIDICEIDKMVIDVSKKFFPELAVGFDDPRVQLHIGDAAEFLRKSPEGKYDAIIVDSSDPVGPALALVEKPFFETLARALKPGGVLCNMAESMWLHTHLIEDMISICRQTFKSVHYAWSSVPTYPSGVIGFVLCSTEGPAVDFKNPINPIEKLDGAMTHKRELKFYNSDMHRAAFALPTFLRREVASLLAS

SEQ ID NO: 24837 - protein, 345 aa, Arabidopsis thaliana
  peptide (1)..(345): Ceres Seq. ID no. 12561973
  misc_feature (40)..(299): Pfam Name: Spermine/spermidine synthase Pfam Description: Spermine/spermidine synthase
  misc_feature (61)..(341): Homolog of NCBI NO: 6094330 NR Description: Spermidine synthase 2 (Putrescine
  misc_feature (35)..(341): Homolog of NCBI NO: 6094335 NR Description: Spermidine synthase (Putrescine
  misc_feature (4)..(341): Homolog of NCBI NO: 33354149 NR Description: aminopropyl transferase [Oryza sativa (japonica
  misc_feature (1)..(345): Homolog of NCBI NO: 33150481 NR Description: putative spermine synthase [Lycopersicon
  misc_feature (61)..(341): Homolog of NCBI NO: 6094327 NR Description: Spermidine synthase 1 (Putrescine
  misc_feature (28)..(341): Homolog of NCBI NO: 12229958 NR Description: Spermidine synthase 1 (Putrescine
  misc_feature (1)..(345): Homolog of NCBI NO: 9757993 NR Description: spermidine synthase [Arabidopsis thaliana]
  misc_feature (1)..(345): Homolog of NCBI NO: 21592832 NR Description: spermidine synthase [Arabidopsis thaliana]
  misc_feature (1)..(345): Homolog of NCBI NO: 15983394 NR Description: AT5g53120/MFH8_5 [Arabidopsis thaliana]
  misc_feature (1)..(345): Homolog of NCBI NO: 18423473 NR Description: spermidine synthase
MDGKASNGNGLEKTVPSCCLKAMACVPEDDAKCHSTVVSGWFSEPHPRSGKKGGKAVYFNNPMWPGEAHSLKVEKVLFKDKSDFQEVLVFESATYGKVLVLDGIVQLTEKDECAYQEMIAHLPLCSISSPKNVLVVGGGDGGVLREISRHSSVEVIDICEIDKMVIDVSKKFFPELAVGFDDPRVQLHIGDAAEFLRKSPEGKYDAIIVDSSDPVGPALALVEKPFFETLARALKPGGVLCNMAESMWLHTHLIEDMISICRQTFKSVHYAWSSVPTYPSGVIGFVLCSTEGPAVDFKNPINPIEKLDGAMTHKRELKFYNSDMHRAAFALPTFLRREVASLLAS

SEQ ID NO: 24838 - protein, 323 aa, Arabidopsis thaliana
  peptide (1)..(323): Ceres Seq. ID no. 12561974
  misc_feature (18)..(277): Pfam Name: Spermine/spermidine synthase Pfam Description: Spermine/spermidine synthase
  misc_feature (39)..(319): Homolog of NCBI NO: 6094327 NR Description: Spermidine synthase 1 (Putrescine
  misc_feature (6)..(319): Homolog of NCBI NO: 12229958 NR Description: Spermidine synthase 1 (Putrescine
  misc_feature (39)..(319): Homolog of NCBI NO: 6094330 NR Description: Spermidine synthase 2 (Putrescine
  misc_feature (13)..(319): Homolog of NCBI NO: 6094335 NR Description: Spermidine synthase (Putrescine
  misc_feature (1)..(319): Homolog of NCBI NO: 33354149 NR Description: aminopropyl transferase [Oryza sativa (japonica
  misc_feature (1)..(323): Homolog of NCBI NO: 33150481 NR Description: putative spermine synthase [Lycopersicon
  misc_feature (1)..(323): Homolog of NCBI NO: 9757993 NR Description: spermidine synthase [Arabidopsis thaliana]
  misc_feature (1)..(323): Homolog of NCBI NO: 21592832 NR Description: spermidine synthase [Arabidopsis thaliana]
  misc_feature (1)..(323): Homolog of NCBI NO: 15983394 NR Description: AT5g53120/MFH8_5 [Arabidopsis thaliana]
  misc_feature (1)..(323): Homolog of NCBI NO: 18423473 NR Description: spermidine synthase
MACVPEDDAKCHSTVVSGWFSEPHPRSGKKGGKAVYFNNPMWPGEAHSLKVEKVLFKDKSDFQEVLVFESATYGKVLVLDGIVQLTEKDECAYQEMIAHLPLCSISSPKNVLVVGGGDGGVLREISRHSSVEVIDICEIDKMVIDVSKKFFPELAVGFDDPRVQLHIGDAAEFLRKSPEGKYDAIIVDSSDPVGPALALVEKPFFETLARALKPGGVLCNMAESMWLHTHLIEDMISICRQTFKSVHYAWSSVPTYPSGVIGFVLCSTEGPAVDFKNPINPIEKLDGAMTHKRELKFYNSDMHRAAFALPTFLRREVASLLAS

SEQ ID NO: 24839 - DNA, 971 bp, Arabidopsis thaliana
  misc_feature (1)..(971): Ceres Seq. ID no. 13486619
  misc_feature: MA Experiment ID: 108501 Result: Up-regulated in Transcription
  misc_feature: MA Experiment 108501 PARAMETER Experiment Name: At_ap2_floral_buds_cDNA_P Parameter: Plant Line Value: ap2 (Ler.)
  misc_feature: MA Experiment 108501 PARAMETER Experiment Name: At_ap2_floral_buds_cDNA_P Parameter: Tissue Value: Closed Flower
  misc_feature: MA Experiment ID: 108573 Result: Down-regulated in Transcription
  misc_feature: MA Experiment 108573 PARAMETER Experiment Name: At_Drought_cDNA_P Parameter: Timepoint (hr) Value: 6
  misc_feature: MA Experiment 108573 PARAMETER Experiment Name: At_Drought_cDNA_P Parameter: Tissue Value: Aerial
  misc_feature: MA Experiment 108573 PARAMETER Experiment Name: At_Drought_cDNA_P Parameter: Treatment Value: Drought vs. No Drought
  misc_feature: MA Experiment ID: 108577 Result: Down-regulated in Transcription
  misc_feature: MA Experiment 108577 PARAMETER Experiment Name: At_42deg_Heat_cDNA_P Parameter: Temperature (deg C) Value: 42 vs. 22
  misc_feature: MA Experiment 108577 PARAMETER Experiment Name: At_42deg_Heat_cDNA_P Parameter: Timepoint (hr) Value: 6
  misc_feature: MA Experiment 108577 PARAMETER Experiment Name: At_42deg_Heat_cDNA_P Parameter: Tissue Value: Aerial
  misc_feature: MA Experiment ID: 108595 Result: Up-regulated in Transcription
  misc_feature: MA Experiment 108595 PARAMETER Experiment Name: At_Ler-pi_Ovule_cDNA_P Parameter: Plant Line Value: null
  misc_feature: MA Experiment ID: 20000111 Result: Down-regulated in Transcription
  misc_feature: MA Experiment 20000111 PARAMETER Experiment Name: At_42deg_Heat_cDNA_P Parameter: Temperature (deg C) Value: 42 vs. 22
  misc_feature: MA Experiment 20000111 PARAMETER Experiment Name: At_42deg_Heat_cDNA_P Parameter: Timepoint (hr) Value: 6
  misc_feature: MA Experiment 20000111 PARAMETER Experiment Name: At_42deg_Heat_cDNA_P Parameter: Tissue Value: Aerial
  misc_feature: MA Experiment ID: 20000113 Result: Down-regulated in Transcription
  misc_feature: MA Experiment 20000113 PARAMETER Experiment Name: At_42deg_Heat_cDNA_P Parameter: Temperature (deg C) Value: 42 vs. 22
  misc_feature: MA Experiment 20000113 PARAMETER Experiment Name: At_42deg_Heat_cDNA_P Parameter: Timepoint (hr) Value: 8
  misc_feature: MA Experiment 20000113 PARAMETER Experiment Name: At_42deg_Heat_cDNA_P Parameter: Tissue Value: Aerial
  misc_feature: MA Experiment ID: 20000437 Result: Up-regulated in Transcription
  misc_feature: MA Experiment 20000437 PARAMETER Experiment Name: At_Drought_P Parameter: Age (day) Value: 8
  misc_feature: MA Experiment 20000437 PARAMETER Experiment Name: At_Drought_P Parameter: Organism Value: A. thaliana
  misc_feature: MA Experiment 20000437 PARAMETER Experiment Name: At_Drought_P Parameter: Plant Line Value: WS
  misc_feature: MA Experiment 20000437 PARAMETER Experiment Name: At_Drought_P Parameter: Timepoint (hr) Value: 24
  misc_feature: MA Experiment 20000437 PARAMETER Experiment Name: At_Drought_P Parameter: Tissue Value: Whole Plant
  misc_feature: MA Experiment 20000437 PARAMETER Experiment Name: At_Drought_P Parameter: Treatment Value: Drought vs. No Drought
  misc_feature: MA Experiment ID: 20000573 Result: Up-regulated in Transcription
  misc_feature: MA Experiment 20000573 PARAMETER Experiment Name: At_100uM_ABA_Mutants__P Parameter: Organism Value: A. thaliana
  misc_feature: MA Experiment 20000573 PARAMETER Experiment Name: At_100uM_ABA_Mutants__P Parameter: Plant Line Value: CS22 vs. Ler wt
  misc_feature: MA Experiment 20000573 PARAMETER Experiment Name: At_100uM_ABA_Mutants__P Parameter: Timepoint (hr) Value: N/A
  misc_feature: MA Experiment 20000573 PARAMETER Experiment Name: At_100uM_ABA_Mutants__P Parameter: Tissue Value: Whole Plant
  misc_feature: MA Experiment 20000573 PARAMETER Experiment Name: At_100uM_ABA_Mutants__P Parameter: Treatment Value: None
  misc_feature: Phenotype: FERTILITY Fertility-Reduced
  misc_feature: Phenotype: FERTILITY Fertility-Reduced
  misc_feature: Phenotype: FERTILITY Fertility-Reduced
aaagaaattataactacaaactcttctgtttattattattattatagttagctttttaatataaaacggatattagaattttgtaacaaagaaatcggcgggagtcgtgtgctttagcccaaaaacattggcctcgttgtccaacgtgtgtatttggaggaaaacatcattagagggccacatatacatctctctaattacactttacgaatattaaacacatttaattgtacttaatcctcggcataacacttgtccattaagtcaccatgtacttgctataaatatggtcaagtccagtccataatatatgcatctctgatctttcttggtgagagtaatagacatgggagctcttgattctctttccgagtatatctccgactacttccgcgtcaccagaaaaaggaggaagcggaaagtcatgcagacggtgaatataaaggtgaaaatggactgcgatggttgtgaacgcagagtcaagaacgcggtttcctccatgaaaggtgtgaaatcggtggaggtgaatagaaagatacataaagtgacggtgagtggatacgtggaaccaaagaaggtattaaagagaatcgaaaggacagggaaaaaagcggagatatggccgtacgttccttacaacatggtcgcatatccatacgcggtcggaacttacgacaaaaaagctccggccggttatgtcaggaaatctgagcagtcgcagttgcagctgttgccgggagctcccgagaaccactacatttctctttttagcgacgagaatcccaacgcttgcaccgttatgtaataaataatttactctagtagtattatccacagcatgtaacgtttttatcaagcaattggctctctctctctctctctttttgttatgttaatgcagagaggaagaaccaactatagctagttgtgtaaaaatttcaatatttcaaaataagttagtggaatgtgta

SEQ ID NO: 24840 - protein, 152 aa, Arabidopsis thaliana
  peptide (1)..(152): Ceres Seq. ID no. 13486620
  misc_feature (31)..(91): Pfam Name: Heavy-metal-associated domain Pfam Description: Heavy-metal-associated domain
  misc_feature (2)..(152): Homolog of NCBI NO: 15235984 NR Description: copper chaperone (CCH)-related [Arabidopsis
  misc_feature (1)..(152): Homolog of NCBI NO: 15233937 NR Description: copper chaperone (CCH)-related [Arabidopsis
  misc_feature (40)..(152): Homolog of NCBI NO: 4097555 NR Description: ATFP7 [Arabidopsis thaliana]
  misc_feature (1)..(152): Homolog of NCBI NO: 34914538 NR Description: OSJNBa0094H06.16 [Oryza sativa (japonica
  misc_feature (1)..(152): Homolog of NCBI NO: 15237967 NR Description: copper chaperone (CCH)-related [Arabidopsis
  misc_feature (1)..(152): Homolog of NCBI NO: 28866017 NR Description: farnesylated protein 2 [Hordeum vulgare subsp.
  misc_feature (1)..(152): Homolog of NCBI NO: 28866019 NR Description: farnesylated protein 3 [Hordeum vulgare subsp.
  misc_feature (1)..(152): Homolog of NCBI NO: 15219990 NR Description: copper chaperone (CCH)-related [Arabidopsis
  misc_feature (1)..(152): Homolog of NCBI NO: 32442810 NR Description: putative farnesylated protein [Brassica rapa
  misc_feature (1)..(152): Homolog of NCBI NO: 15223925 NR Description: copper chaperone (CCH)-related [Arabidopsis
MGALDSLSEYISDYFRVTRKRRKRKVMQTVNIKVKMDCDGCERRVKNAVSSMKGVKSVEVNRKIHKVTVSGYVEPKKVLKRIERTGKKAEIWPYVPYNMVAYPYAVGTYDKKAPAGYVRKSEQSQLQLLPGAPENHYISLFSDENPNACTVM

SEQ ID NO: 24841 - protein, 126 aa, Arabidopsis thaliana
  peptide (1)..(126): Ceres Seq. ID no. 13486621
  misc_feature (5)..(65): Pfam Name: Heavy-metal-associated domain Pfam Description: Heavy-metal-associated domain
  misc_feature (1)..(126): Homolog of NCBI NO: 15235984 NR Description: copper chaperone (CCH)-related [Arabidopsis
  misc_feature (1)..(126): Homolog of NCBI NO: 15233937 NR Description: copper chaperone (CCH)-related [Arabidopsis
  misc_feature (14)..(126): Homolog of NCBI NO: 4097555 NR Description: ATFP7 [Arabidopsis thaliana]
  misc_feature (1)..(126): Homolog of NCBI NO: 34914538 NR Description: OSJNBa0094H06.16 [Oryza sativa (japonica
  misc_feature (1)..(126): Homolog of NCBI NO: 15237967 NR Description: copper chaperone (CCH)-related [Arabidopsis
  misc_feature (1)..(126): Homolog of NCBI NO: 28866017 NR Description: farnesylated protein 2 [Hordeum vulgare subsp.
  misc_feature (1)..(126): Homolog of NCBI NO: 28866019 NR Description: farnesylated protein 3 [Hordeum vulgare subsp.
  misc_feature (1)..(126): Homolog of NCBI NO: 15219990 NR Description: copper chaperone (CCH)-related [Arabidopsis
  misc_feature (1)..(126): Homolog of NCBI NO: 32442810 NR Description: putative farnesylated protein [Brassica rapa
  misc_feature (1)..(126): Homolog of NCBI NO: 15223925 NR Description: copper chaperone (CCH)-related [Arabidopsis
MQTVNIKVKMDCDGCERRVKNAVSSMKGVKSVEVNRKIHKVTVSGYVEPKKVLKRIERTGKKAEIWPYVPYNMVAYPYAVGTYDKKAPAGYVRKSEQSQLQLLPGAPENHYISLFSDENPNACTVM

SEQ ID NO: 24842 - protein, 117 aa, Arabidopsis thaliana
  peptide (1)..(117): Ceres Seq. ID no. 13486622
  misc_feature (1)..(56): Pfam Name: Heavy-metal-associated domain Pfam Description: Heavy-metal-associated domain
  misc_feature (1)..(117): Homolog of NCBI NO: 15235984 NR Description: copper chaperone (CCH)-related [Arabidopsis
  misc_feature (1)..(117): Homolog of NCBI NO: 15233937 NR Description: copper chaperone (CCH)-related [Arabidopsis
  misc_feature (5)..(117): Homolog of NCBI NO: 4097555 NR Description: ATFP7 [Arabidopsis thaliana]
  misc_feature (1)..(117): Homolog of NCBI NO: 34914538 NR Description: OSJNBa0094H06.16 [Oryza sativa (japonica
  misc_feature (1)..(117): Homolog of NCBI NO: 15237967 NR Description: copper chaperone (CCH)-related [Arabidopsis
  misc_feature (1)..(117): Homolog of NCBI NO: 28866017 NR Description: farnesylated protein 2 [Hordeum vulgare subsp.
  misc_feature (1)..(117): Homolog of NCBI NO: 28866019 NR Description: farnesylated protein 3 [Hordeum vulgare subsp.
  misc_feature (1)..(117): Homolog of NCBI NO: 15219990 NR Description: copper chaperone (CCH)-related [Arabidopsis
  misc_feature (1)..(117): Homolog of NCBI NO: 32442810 NR Description: putative farnesylated protein [Brassica rapa
  misc_feature (1)..(117): Homolog of NCBI NO: 15223925 NR Description: copper chaperone (CCH)-related [Arabidopsis
MDCDGCERRVKNAVSSMKGVKSVEVNRKIHKVTVSGYVEPKKVLKRIERTGKKAEIWPYVPYNMVAYPYAVGTYDKKAPAGYVRKSEQSQLQLLPGAPENHYISLFSDENPNACTVM

SEQ ID NO: 24843 - DNA, 815 bp, Arabidopsis thaliana
  misc_feature (1)..(815): Ceres Seq. ID no. 13619680
  misc_feature: MA Experiment ID: 20000111 Result: Up-regulated in Transcription
  misc_feature: MA Experiment 20000111 PARAMETER Experiment Name: At_42deg_Heat_cDNA_P Parameter: Temperature (deg C) Value: 42 vs. 22
  misc_feature: MA Experiment 20000111 PARAMETER Experiment Name: At_42deg_Heat_cDNA_P Parameter: Timepoint (hr) Value: 6
  misc_feature: MA Experiment 20000111 PARAMETER Experiment Name: At_42deg_Heat_cDNA_P Parameter: Tissue Value: Aerial
  misc_feature: MA Experiment ID: 20000113 Result: Up-regulated in Transcription
  misc_feature: MA Experiment 20000113 PARAMETER Experiment Name: At_42deg_Heat_cDNA_P Parameter: Temperature (deg C) Value: 42 vs. 22
  misc_feature: MA Experiment 20000113 PARAMETER Experiment Name: At_42deg_Heat_cDNA_P Parameter: Timepoint (hr) Value: 8
  misc_feature: MA Experiment 20000113 PARAMETER Experiment Name: At_42deg_Heat_cDNA_P Parameter: Tissue Value: Aerial
  misc_feature: MA Experiment ID: 20000173 Result: Up-regulated in Transcription
  misc_feature: MA Experiment 20000173 PARAMETER Experiment Name: At_42deg_Heat_P Parameter: Age (day) Value: 14
  misc_feature: MA Experiment 20000173 PARAMETER Experiment Name: At_42deg_Heat_P Parameter: Organism Value: A. thaliana
  misc_feature: MA Experiment 20000173 PARAMETER Experiment Name: At_42deg_Heat_P Parameter: Plant Line Value: WS
  misc_feature: MA Experiment 20000173 PARAMETER Experiment Name: At_42deg_Heat_P Parameter: Temperature (deg C) Value: 42 vs. 22
  misc_feature: MA Experiment 20000173 PARAMETER Experiment Name: At_42deg_Heat_P Parameter: Timepoint (hr) Value: 6
  misc_feature: MA Experiment 20000173 PARAMETER Experiment Name: At_42deg_Heat_P Parameter: Tissue Value: Aerial
  misc_feature: MA Experiment ID: 20000227 Result: Down-regulated in Transcription
  misc_feature: MA Experiment 20000227 PARAMETER Experiment Name: At_Root-Tips-vs-Tops_P Parameter: Tissue Value: Root Tips vs. Root Tops
  misc_feature: MA Experiment ID: 20000234 Result: Down-regulated in Transcription
  misc_feature: MA Experiment 20000234 PARAMETER Experiment Name: At_Siliques_P Parameter: Age (day) Value: 21
  misc_feature: MA Experiment 20000234 PARAMETER Experiment Name: At_Siliques_P Parameter: Organism Value: A. thaliana
  misc_feature: MA Experiment 20000234 PARAMETER Experiment Name: At_Siliques_P Parameter: Plant Line Value: WS
  misc_feature: MA Experiment 20000234 PARAMETER Experiment Name: At_Siliques_P Parameter: Tissue Value: Less Than 5mm Siliques vs. Whole Plant
  misc_feature: MA Experiment ID: 20000264 Result: Down-regulated in Transcription
  misc_feature: MA Experiment 20000264 PARAMETER Experiment Name: At_Open_Flower_P Parameter: Age (day) Value: 21
  misc_feature: MA Experiment 20000264 PARAMETER Experiment Name: At_Open_Flower_P Parameter: Plant Line Value: WS
  misc_feature: MA Experiment 20000264 PARAMETER Experiment Name: At_Open_Flower_P Parameter: Tissue Value: Open Flower vs. Whole Plant
  misc_feature: MA Experiment ID: 20000265 Result: Down-regulated in Transcription
  misc_feature: MA Experiment 20000265 PARAMETER Experiment Name: At_Open_Flower_P Parameter: Age (day) Value: 21
  misc_feature: MA Experiment 20000265 PARAMETER Experiment Name: At_Open_Flower_P Parameter: Plant Line Value: WS
  misc_feature: MA Experiment 20000265 PARAMETER Experiment Name: At_Open_Flower_P Parameter: Tissue Value: Closed Flower vs. Whole Plant
  misc_feature: MA Experiment ID: 20000495 Result: Down-regulated in Transcription
  misc_feature: MA Experiment 20000495 PARAMETER Experiment Name: At_Guard_Cells_P Parameter: Harvest Date Value: 8/2/2002
  misc_feature: MA Experiment 20000495 PARAMETER Experiment Name: At_Guard_Cells_P Parameter: Organism Value: A. thaliana
  misc_feature: MA Experiment 20000495 PARAMETER Experiment Name: At_Guard_Cells_P Parameter: Tissue Value: Guard Cells vs. Leaves
  misc_feature: MA Experiment ID: 20000496 Result: Down-regulated in Transcription
  misc_feature: MA Experiment 20000496 PARAMETER Experiment Name: At_Guard_Cells_P Parameter: Harvest Date Value: 7/19/2002
  misc_feature: MA Experiment 20000496 PARAMETER Experiment Name: At_Guard_Cells_P Parameter: Organism Value: Canola
  misc_feature: MA Experiment 20000496 PARAMETER Experiment Name: At_Guard_Cells_P Parameter: Tissue Value: Guard Cells vs. Leaves
  misc_feature: MA Experiment ID: 20000794 Result: Down-regulated in Transcription
  misc_feature: MA Experiment 20000794 PARAMETER Experiment Name: At_Petals_P Parameter: Age (day) Value: 23-25 days
  misc_feature: MA Experiment 20000794 PARAMETER Experiment Name: At_Petals_P Parameter: Plant Line Value: WS
  misc_feature: MA Experiment 20000794 PARAMETER Experiment Name: At_Petals_P Parameter: Tissue Value: Petals vs. Whole plant
  misc_feature: MA Experiment ID: 20001560 Result: Down-regulated in Transcription
  misc_feature: MA Experiment 20001560 PARAMETER Experiment Name: At_Drought_Soil_Dry_P Parameter: Age (day) Value: 28
  misc_feature: MA Experiment 20001560 PARAMETER Experiment Name: At_Drought_Soil_Dry_P Parameter: Organism Value: A. thaliana
  misc_feature: MA Experiment 20001560 PARAMETER Experiment Name: At_Drought_Soil_Dry_P Parameter: Plant Line Value: WS
  misc_feature: MA Experiment 20001560 PARAMETER Experiment Name: At_Drought_Soil_Dry_P Parameter: Post Timepoint (hr) Value: None
  misc_feature: MA Experiment 20001560 PARAMETER Experiment Name: At_Drought_Soil_Dry_P Parameter: Post-Treatment Value: None
  misc_feature: MA Experiment 20001560 PARAMETER Experiment Name: At_Drought_Soil_Dry_P Parameter: Timepoint (day) Value: 14
  misc_feature: MA Experiment 20001560 PARAMETER Experiment Name: At_Drought_Soil_Dry_P Parameter: Treatment Value: Drought vs. No Drought
gtattcttcgtctttcgtccaccaccatctctattttcttcctttcccctaagtcttggttcttcttctctctaatacgagaagaaaaaggcgaaaacctcgccaatccgattacgcgaaaaatcaaaggtttttggatatggcgtcgaagcggatcttgaaggaattgaaggatctccagaaggatccacctacatcatgtagcgcaggtcctgttgctgaagacatgtttcactggcaggcaacgataatgggtccttcagagagtccttatgctggaggtgttttccttgtaaccatccatttccctccggattacccattcaagcctcctaaggtggcctttaggaccaaggtgttccatcccaacattaacagcaacggtagcatttgcctcgacatcttgaaggagcagtggagtcctgcgctcaccatttccaaggtgctgctatcgatctgttctttgttaaccgatccaaacccggatgatcctttggtgcccgagatagctcacatgtacaagactgacaagaacaagtacgagtccactgcacgaagctggactcagaagtatgccatgggctaaatggaaaatcccacctactaaattatctctttatgaagaaaaaaatctgccttaatttctatgtatgattcgatagacatctctttgtgtccttttaactttctgaagacaggaccaaatgaagtgggtcttgttttaaacgaaacaaaaaaaaacatcatctttgtgaaaactagaatctgatcatcttctgttgtttcttcttgtggtgaaattatgatttgatgtt

SEQ ID NO: 24844 - protein, 148 aa, Arabidopsis thaliana
  peptide (1)..(148): Ceres Seq. ID no. 13619681
  misc_feature (1)..(148): Homolog of NCBI NO: 456568 NR Description: ubiquitin conjugating enzyme
  misc_feature (1)..(148): Homolog of NCBI NO: 19347859 NR Description: putative E2, ubiquitin-conjugating enzyme UBC9
  misc_feature (1)..(148): Homolog of NCBI NO: 18408001 NR Description: ubiquitin-conjugating enzyme [Arabidopsis
  misc_feature (1)..(148): Homolog of NCBI NO: 5762457 NR Description: ubiquitin-conjugating enzyme UBC2
  misc_feature (1)..(148): Homolog of NCBI NO: 40287554 NR Description: ubiquitin-conjugating enzyme 8 [Capsicum annuum]
  misc_feature (1)..(148): Homolog of NCBI NO: 30687803 NR Description: ubiquitin-conjugating enzyme 9 (UBC9)
  misc_feature (1)..(148): Homolog of NCBI NO: 21554343 NR Description: E2, ubiquitin-conjugating enzyme 10 (UBC10)
  misc_feature (1)..(148): Homolog of NCBI NO: 18417097 NR Description: ubiquitin-conjugating enzyme 9 (UBC9)
  misc_feature (1)..(148): Homolog of NCBI NO: 11762186 NR Description: AT4g27960 [Arabidopsis thaliana]
  misc_feature (1)..(148): Homolog of NCBI NO: 18423494 NR Description: ubiquitin-conjugating enzyme 10 (UBC10)
MASKRILKELKDLQKDPPTSCSAGPVAEDMFHWQATIMGPSESPYAGGVFLVTIHFPPDYPFKPPKVAFRTKVFHPNINSNGSICLDILKEQWSPALTISKVLLSICSLLTDPNPDDPLVPEIAHMYKTDKNKYESTARSWTQKYAMG

SEQ ID NO: 24845 - protein, 119 aa, Arabidopsis thaliana
  peptide (1)..(119): Ceres Seq. ID no. 13619682
  misc_feature (1)..(119): Homolog of NCBI NO: 456568 NR Description: ubiquitin conjugating enzyme
  misc_feature (1)..(119): Homolog of NCBI NO: 19347859 NR Description: putative E2, ubiquitin-conjugating enzyme UBC9
  misc_feature (1)..(119): Homolog of NCBI NO: 18408001 NR Description: ubiquitin-conjugating enzyme [Arabidopsis
  misc_feature (1)..(119): Homolog of NCBI NO: 5762457 NR Description: ubiquitin-conjugating enzyme UBC2
  misc_feature (1)..(119): Homolog of NCBI NO: 40287554 NR Description: ubiquitin-conjugating enzyme 8 [Capsicum annuum]
  misc_feature (1)..(119): Homolog of NCBI NO: 30687803 NR Description: ubiquitin-conjugating enzyme 9 (UBC9)
  misc_feature (1)..(119): Homolog of NCBI NO: 21554343 NR Description: E2, ubiquitin-conjugating enzyme 10 (UBC10)
  misc_feature (1)..(119): Homolog of NCBI NO: 18417097 NR Description: ubiquitin-conjugating enzyme 9 (UBC9)
  misc_feature (1)..(119): Homolog of NCBI NO: 11762186 NR Description: AT4g27960 [Arabidopsis thaliana]
  misc_feature (1)..(119): Homolog of NCBI NO: 18423494 NR Description: ubiquitin-conjugating enzyme 10 (UBC10)
MFHWQATIMGPSESPYAGGVFLVTIHFPPDYPFKPPKVAFRTKVFHPNINSNGSICLDILKEQWSPALTISKVLLSICSLLTDPNPDDPLVPEIAHMYKTDKNKYESTARSWTQKYAMG

SEQ ID NO: 24846 - protein, 111 aa, Arabidopsis thaliana
  peptide (1)..(111): Ceres Seq. ID no. 13619683
  misc_feature (1)..(111): Homolog of NCBI NO: 456568 NR Description: ubiquitin conjugating enzyme
  misc_feature (1)..(111): Homolog of NCBI NO: 19347859 NR Description: putative E2, ubiquitin-conjugating enzyme UBC9
  misc_feature (1)..(111): Homolog of NCBI NO: 18408001 NR Description: ubiquitin-conjugating enzyme [Arabidopsis
  misc_feature (1)..(111): Homolog of NCBI NO: 5762457 NR Description: ubiquitin-conjugating enzyme UBC2
  misc_feature (1)..(111): Homolog of NCBI NO: 40287554 NR Description: ubiquitin-conjugating enzyme 8 [Capsicum annuum]
  misc_feature (1)..(111): Homolog of NCBI NO: 30687803 NR Description: ubiquitin-conjugating enzyme 9 (UBC9)
  misc_feature (1)..(111): Homolog of NCBI NO: 21554343 NR Description: E2, ubiquitin-conjugating enzyme 10 (UBC10)
  misc_feature (1)..(111): Homolog of NCBI NO: 18417097 NR Description: ubiquitin-conjugating enzyme 9 (UBC9)
  misc_feature (1)..(111): Homolog of NCBI NO: 11762186 NR Description: AT4g27960 [Arabidopsis thaliana]
  misc_feature (1)..(111): Homolog of NCBI NO: 18423494 NR Description: ubiquitin-conjugating enzyme 10 (UBC10)
MGPSESPYAGGVFLVTIHFPPDYPFKPPKVAFRTKVFHPNINSNGSICLDILKEQWSPALTISKVLLSICSLLTDPNPDDPLVPEIAHMYKTDKNKYESTARSWTQKYAMG

SEQ ID NO: 24847 - DNA, 1265 bp, Arabidopsis thaliana
  misc_feature (1)..(1265): Ceres Seq. ID no. 12321902
  misc_feature: MA Experiment ID: 108434 Result: Up-regulated in Transcription
  misc_feature: MA Experiment 108434 PARAMETER Experiment Name: At_Root_Tips_cDNA_P Parameter: Tissue Value: Root Tips
  misc_feature: MA Experiment ID: 108488 Result: Up-regulated in Transcription
  misc_feature: MA Experiment ID: 108573 Result: Up-regulated in Transcription
  misc_feature: MA Experiment 108573 PARAMETER Experiment Name: At_Drought_cDNA_P Parameter: Timepoint (hr) Value: 6
  misc_feature: MA Experiment 108573 PARAMETER Experiment Name: At_Drought_cDNA_P Parameter: Tissue Value: Aerial
  misc_feature: MA Experiment 108573 PARAMETER Experiment Name: At_Drought_cDNA_P Parameter: Treatment Value: Drought vs. No Drought
  misc_feature: MA Experiment ID: 108577 Result: Up-regulated in Transcription
  misc_feature: MA Experiment 108577 PARAMETER Experiment Name: At_42deg_Heat_cDNA_P Parameter: Temperature (deg C) Value: 42 vs. 22
  misc_feature: MA Experiment 108577 PARAMETER Experiment Name: At_42deg_Heat_cDNA_P Parameter: Timepoint (hr) Value: 6
  misc_feature: MA Experiment 108577 PARAMETER Experiment Name: At_42deg_Heat_cDNA_P Parameter: Tissue Value: Aerial
  misc_feature: MA Experiment ID: 20000087 Result: Down-regulated in Transcription
  misc_feature: MA Experiment 20000087 PARAMETER Experiment Name: At_100uM_ABA_Mutants_cDNA_P Parameter: Plant Line Value: WS
  misc_feature: MA Experiment 20000087 PARAMETER Experiment Name: At_100uM_ABA_Mutants_cDNA_P Parameter: Timepoint (hr) Value: 6
  misc_feature: MA Experiment 20000087 PARAMETER Experiment Name: At_100uM_ABA_Mutants_cDNA_P Parameter: Tissue Value: Aerial
  misc_feature: MA Experiment 20000087 PARAMETER Experiment Name: At_100uM_ABA_Mutants_cDNA_P Parameter: Treatment Value: 100uM ABA vs. No Treatment
  misc_feature: MA Experiment ID: 20000090 Result: Down-regulated in Transcription
  misc_feature: MA Experiment ID: 20000093 Result: Up-regulated in Transcription
  misc_feature: MA Experiment 20000093 PARAMETER Experiment Name: At_42deg_Heat_cDNA_P Parameter: Temperature (deg C) Value: 42 vs. 22
  misc_feature: MA Experiment 20000093 PARAMETER Experiment Name: At_42deg_Heat_cDNA_P Parameter: Timepoint (hr) Value: 0.5
  misc_feature: MA Experiment 20000093 PARAMETER Experiment Name: At_42deg_Heat_cDNA_P Parameter: Tissue Value: Aerial
  misc_feature: MA Experiment ID: 20000112 Result: Up-regulated in Transcription
  misc_feature: MA Experiment 20000112 PARAMETER Experiment Name: At_42deg_Heat_cDNA_P Parameter: Temperature (deg C) Value: 42 vs. 22
  misc_feature: MA Experiment 20000112 PARAMETER Experiment Name: At_42deg_Heat_cDNA_P Parameter: Timepoint (hr) Value: 2
  misc_feature: MA Experiment 20000112 PARAMETER Experiment Name: At_42deg_Heat_cDNA_P Parameter: Tissue Value: Aerial
  misc_feature: MA Experiment ID: 20000113 Result: Up-regulated in Transcription
  misc_feature: MA Experiment 20000113 PARAMETER Experiment Name: At_42deg_Heat_cDNA_P Parameter: Temperature (deg C) Value: 42 vs. 22
  misc_feature: MA Experiment 20000113 PARAMETER Experiment Name: At_42deg_Heat_cDNA_P Parameter: Timepoint (hr) Value: 8
  misc_feature: MA Experiment 20000113 PARAMETER Experiment Name: At_42deg_Heat_cDNA_P Parameter: Tissue Value: Aerial
  misc_feature: MA Experiment ID: 20000144 Result: Up-regulated in Transcription
  misc_feature: MA Experiment 20000144 PARAMETER Experiment Name: At_42deg_Heat_cDNA_P Parameter: Temperature (deg C) Value: 42 vs. 22
  misc_feature: MA Experiment 20000144 PARAMETER Experiment Name: At_42deg_Heat_cDNA_P Parameter: Timepoint (hr) Value: 1
  misc_feature: MA Experiment 20000144 PARAMETER Experiment Name: At_42deg_Heat_cDNA_P Parameter: Tissue Value: Aerial
  misc_feature: MA Experiment ID: 20000173 Result: Up-regulated in Transcription
  misc_feature: MA Experiment 20000173 PARAMETER Experiment Name: At_42deg_Heat_P Parameter: Age (day) Value: 14
  misc_feature: MA Experiment 20000173 PARAMETER Experiment Name: At_42deg_Heat_P Parameter: Organism Value: A. thaliana
  misc_feature: MA Experiment 20000173 PARAMETER Experiment Name: At_42deg_Heat_P Parameter: Plant Line Value: WS
  misc_feature: MA Experiment 20000173 PARAMETER Experiment Name: At_42deg_Heat_P Parameter: Temperature (deg C) Value: 42 vs. 22
  misc_feature: MA Experiment 20000173 PARAMETER Experiment Name: At_42deg_Heat_P Parameter: Timepoint (hr) Value: 6
  misc_feature: MA Experiment 20000173 PARAMETER Experiment Name: At_42deg_Heat_P Parameter: Tissue Value: Aerial
  misc_feature: MA Experiment ID: 20000224 Result: Down-regulated in Transcription
  misc_feature: MA Experiment ID: 20000227 Result: Up-regulated in Transcription
  misc_feature: MA Experiment 20000227 PARAMETER Experiment Name: At_Root-Tips-vs-Tops_P Parameter: Tissue Value: Root Tips vs. Root Tops
  misc_feature: MA Experiment ID: 20000286 Result: Up-regulated in Transcription
  misc_feature: MA Experiment 20000286 PARAMETER Experiment Name: At_Open_Flower_P Parameter: Age (day) Value: 21
  misc_feature: MA Experiment 20000286 PARAMETER Experiment Name: At_Open_Flower_P Parameter: Plant Line Value: WS
  misc_feature: MA Experiment 20000286 PARAMETER Experiment Name: At_Open_Flower_P Parameter: Tissue Value: Half Open vs. Whole Plant
  misc_feature: MA Experiment ID: 20000437 Result: Down-regulated in Transcription
  misc_feature: MA Experiment 20000437 PARAMETER Experiment Name: At_Drought_P Parameter: Age (day) Value: 8
  misc_feature: MA Experiment 20000437 PARAMETER Experiment Name: At_Drought_P Parameter: Organism Value: A. thaliana
  misc_feature: MA Experiment 20000437 PARAMETER Experiment Name: At_Drought_P Parameter: Plant Line Value: WS
  misc_feature: MA Experiment 20000437 PARAMETER Experiment Name: At_Drought_P Parameter: Timepoint (hr) Value: 24
  misc_feature: MA Experiment 20000437 PARAMETER Experiment Name: At_Drought_P Parameter: Tissue Value: Whole Plant
  misc_feature: MA Experiment 20000437 PARAMETER Experiment Name: At_Drought_P Parameter: Treatment Value: Drought vs. No Drought
  misc_feature: MA Experiment ID: 20001451 Result: Up-regulated in Transcription
  misc_feature: MA Experiment 20001451 PARAMETER Experiment Name: At_Far-red-induction_P Parameter: Age (day) Value: 7
  misc_feature: MA Experiment 20001451 PARAMETER Experiment Name: At_Far-red-induction_P Parameter: Light Value: Far-red vs. White
  misc_feature: MA Experiment 20001451 PARAMETER Experiment Name: At_Far-red-induction_P Parameter: Organism Value: A. thaliana
  misc_feature: MA Experiment 20001451 PARAMETER Experiment Name: At_Far-red-induction_P Parameter: Plant Line Value: Columbia
  misc_feature: MA Experiment 20001451 PARAMETER Experiment Name: At_Far-red-induction_P Parameter: Timepoint (hr) Value: 24
  misc_feature: MA Experiment 20001451 PARAMETER Experiment Name: At_Far-red-induction_P Parameter: Tissue Value: Whole Plant
  misc_feature: MA Experiment ID: 20001555 Result: Down-regulated in Transcription
  misc_feature: MA Experiment 20001555 PARAMETER Experiment Name: At_Drought_Soil_Dry_P Parameter: Age (day) Value: 24
  misc_feature: MA Experiment 20001555 PARAMETER Experiment Name: At_Drought_Soil_Dry_P Parameter: Organism Value: A. thaliana
  misc_feature: MA Experiment 20001555 PARAMETER Experiment Name: At_Drought_Soil_Dry_P Parameter: Plant Line Value: WS
  misc_feature: MA Experiment 20001555 PARAMETER Experiment Name: At_Drought_Soil_Dry_P Parameter: Post Timepoint (hr) Value: None
  misc_feature: MA Experiment 20001555 PARAMETER Experiment Name: At_Drought_Soil_Dry_P Parameter: Post-Treatment Value: None
  misc_feature: MA Experiment 20001555 PARAMETER Experiment Name: At_Drought_Soil_Dry_P Parameter: Timepoint (day) Value: 10
  misc_feature: MA Experiment 20001555 PARAMETER Experiment Name: At_Drought_Soil_Dry_P Parameter: Treatment Value: Drought vs. No Drought
  misc_feature: MA Experiment ID: 20001556 Result: Down-regulated in Transcription
  misc_feature: MA Experiment 20001556 PARAMETER Experiment Name: At_Drought_Soil_Dry_P Parameter: Age (day) Value: 26
  misc_feature: MA Experiment 20001556 PARAMETER Experiment Name: At_Drought_Soil_Dry_P Parameter: Organism Value: A. thaliana
  misc_feature: MA Experiment 20001556 PARAMETER Experiment Name: At_Drought_Soil_Dry_P Parameter: Plant Line Value: WS
  misc_feature: MA Experiment 20001556 PARAMETER Experiment Name: At_Drought_Soil_Dry_P Parameter: Post Timepoint (hr) Value: None
  misc_feature: MA Experiment 20001556 PARAMETER Experiment Name: At_Drought_Soil_Dry_P Parameter: Post-Treatment Value: None
  misc_feature: MA Experiment 20001556 PARAMETER Experiment Name: At_Drought_Soil_Dry_P Parameter: Timepoint (day) Value: 12
  misc_feature: MA Experiment 20001556 PARAMETER Experiment Name: At_Drought_Soil_Dry_P Parameter: Treatment Value: Drought vs. No Drought
  misc_feature: MA Experiment ID: 20001558 Result: Up-regulated in Transcription
  misc_feature: MA Experiment 20001558 PARAMETER Experiment Name: At_Drought_Soil_Dry_P Parameter: Age (day) Value: 27
  misc_feature: MA Experiment 20001558 PARAMETER Experiment Name: At_Drought_Soil_Dry_P Parameter: Organism Value: A. thaliana
  misc_feature: MA Experiment 20001558 PARAMETER Experiment Name: At_Drought_Soil_Dry_P Parameter: Plant Line Value: WS
  misc_feature: MA Experiment 20001558 PARAMETER Experiment Name: At_Drought_Soil_Dry_P Parameter: Post Timepoint (hr) Value: 6
  misc_feature: MA Experiment 20001558 PARAMETER Experiment Name: At_Drought_Soil_Dry_P Parameter: Post-Treatment Value: Re-Water vs. No Drought
  misc_feature: MA Experiment 20001558 PARAMETER Experiment Name: At_Drought_Soil_Dry_P Parameter: Timepoint (day) Value: 13
  misc_feature: MA Experiment 20001558 PARAMETER Experiment Name: At_Drought_Soil_Dry_P Parameter: Treatment Value: Drought vs. No Drought
  misc_feature: MA Experiment ID: 20001757 Result: Up-regulated in Transcription
  misc_feature: MA Experiment 20001757 PARAMETER Experiment Name: At_50mM_NH4NO3_L-to-H_P Parameter: Timepoint (hr) Value: 6
  misc_feature: MA Experiment 20001757 PARAMETER Experiment Name: At_50mM_NH4NO3_L-to-H_P Parameter: Tissue Value: Leaf
  misc_feature: MA Experiment 20001757 PARAMETER Experiment Name: At_50mM_NH4NO3_L-to-H_P Parameter: Treatment Value: 50mM NH4NO3 vs 100mM Mannitol
attaactatttaatcgtactaataatgattataagcagaattatgtagactatacaaatagtacgtaataccgaaagtacccttggtttatccctggcattacaagggtttcctttttcccctttaaaatggcagaagagatacactgtcgtcgtcacacagcaccacaaactccatagctagctagagagtaaaaagaacaaagatgtcgaaagaagtgagcgaagaaggcaaaacccaccatggaaaagactacgtggatcctccaccagctcctcttctcgacatgggtgagctcaaatcctggtctttctacagagctctcatcgctgagttcatcgctacactcctcttcctctacgtcaccgtcgctactgtcatcggccacaagaagcaaaccggtccttgtgacggcgttggtttacttggtatcgcttgggctttcggtggtatgatcttcgtcctcgtctactgcaccgccggtatctctggtggtcacattaacccagctgtgactttcggtctgttcttggcccgtaaggtctctttggtgcgagctcttggttacatgatagctcagtgtcttggagccatttgtggtgtgggtttcgtgaaagctttcatgaaaactccttacaacactcttggtggaggagctaacaccgtagctgacggttacagcaaaggaactgctctcggagctgagattattggaactttcgtccttgtttacaccgttttctctgcaactgaccctaagagaagcgctcgtgactctcacatccccgttttggctccacttccaattggatttgctgtgttcatggtgcatttggctactatccccattactggaactggtatcaacccagctagaagctttggtgctgctgttatctacaacaacgagaaggcgtgggatgaccaatggatcttttgggttggtccgttcttgggagcactagctgcagcagcttaccaccaatacatattgagagcttcagcaattaaggccttgggctcgttccgaagcaacgcaaccaattaatgaaggctttttttaagataatgtcaagaaacaactttaagatttatatgctttaattattatttgttgttcttttgtgtgtaatgagagagatggtggattgatgttaattatgaaatggctcagtgacttctatttccttctttagtttttgattgtctttgttaatcgtttgcctttggtttctcttagtagttacaaattcatgttttctctt

SEQ ID NO: 24848 - protein, 280 aa, Arabidopsis thaliana
  peptide (1)..(280): Ceres Seq. ID no. 12321903
  misc_feature (1)..(280): Homolog of NCBI NO: 7441253 NR Description: probable aquaporin - spinach
  misc_feature (1)..(280): Homolog of NCBI NO: 7441276 NR Description: mipE protein - common ice plant
  misc_feature (1)..(280): Homolog of NCBI NO: 1168480 NR Description: AQUAPORIN
  misc_feature (1)..(280): Homolog of NCBI NO: 17940742 NR Description: aquaporin-like protein [Petunia x hybrida]
  misc_feature (1)..(280): Homolog of NCBI NO: 8071628 NR Description: putative aquaporin PIP2-2 [Vitis berlandieri x
  misc_feature (1)..(280): Homolog of NCBI NO: 15227302 NR Description: putative plasma membrane intrinsic protein
  misc_feature (1)..(280): Homolog of NCBI NO: 11119335 NR Description: aquaporin [Brassica oleracea]
  misc_feature (1)..(280): Homolog of NCBI NO: 2306917 NR Description: plasma membrane intrinsic protein [Arabidopsis
  misc_feature (1)..(280): Homolog of NCBI NO: 1688296 NR Description: plasma membrane intrinsic protein PIP3
  misc_feature (1)..(280): Homolog of NCBI NO: 15236267 NR Description: plasma membrane intrinsic protein (SIMIP)
MSKEVSEEGKTHHGKDYVDPPPAPLLDMGELKSWSFYRALIAEFIATLLFLYVTVATVIGHKKQTGPCDGVGLLGIAWAFGGMIFVLVYCTAGISGGHINPAVTFGLFLARKVSLVRALGYMIAQCLGAICGVGFVKAFMKTPYNTLGGGANTVADGYSKGTALGAEIIGTFVLVYTVFSATDPKRSARDSHIPVLAPLPIGFAVFMVHLATIPITGTGINPARSFGAAVIYNNEKAWDDQWIFWVGPFLGALAAAAYHQYILRASAIKALGSFRSNATN

SEQ ID NO: 24849 - protein, 253 aa, Arabidopsis thaliana
  peptide (1)..(253): Ceres Seq. ID no. 12321904
  misc_feature (1)..(253): Homolog of NCBI NO: 7441276 NR Description: mipE protein - common ice plant
  misc_feature (1)..(253): Homolog of NCBI NO: 1168480 NR Description: AQUAPORIN
  misc_feature (1)..(253): Homolog of NCBI NO: 17940742 NR Description: aquaporin-like protein [Petunia x hybrida]
  misc_feature (1)..(253): Homolog of NCBI NO: 8071628 NR Description: putative aquaporin PIP2-2 [Vitis berlandieri x
  misc_feature (1)..(253): Homolog of NCBI NO: 15227302 NR Description: putative plasma membrane intrinsic protein
  misc_feature (1)..(253): Homolog of NCBI NO: 11119335 NR Description: aquaporin [Brassica oleracea]
  misc_feature (1)..(253): Homolog of NCBI NO: 2306917 NR Description: plasma membrane intrinsic protein [Arabidopsis
  misc_feature (1)..(253): Homolog of NCBI NO: 1688296 NR Description: plasma membrane intrinsic protein PIP3
  misc_feature (1)..(253): Homolog of NCBI NO: 15236267 NR Description: plasma membrane intrinsic protein (SIMIP)
  misc_feature (1)..(253): Homolog of NCBI NO: 7441253 NR Description: probable aquaporin - spinach
MGELKSWSFYRALIAEFIATLLFLYVTVATVIGHKKQTGPCDGVGLLGIAWAFGGMIFVLVYCTAGISGGHINPAVTFGLFLARKVSLVRALGYMIAQCLGAICGVGFVKAFMKTPYNTLGGGANTVADGYSKGTALGAEIIGTFVLVYTVFSATDPKRSARDSHIPVLAPLPIGFAVFMVHLATIPITGTGINPARSFGAAVIYNNEKAWDDQWIFWVGPFLGALAAAAYHQYILRASAIKALGSFRSNATN

SEQ ID NO: 24850 - protein, 198 aa, Arabidopsis thaliana
  peptide (1)..(198): Ceres Seq. ID no. 12321905
  misc_feature (1)..(198): Homolog of NCBI NO: 15236267 NR Description: plasma membrane intrinsic protein (SIMIP)
  misc_feature (1)..(198): Homolog of NCBI NO: 7441253 NR Description: probable aquaporin - spinach
  misc_feature (1)..(198): Homolog of NCBI NO: 7441276 NR Description: mipE protein - common ice plant
  misc_feature (1)..(198): Homolog of NCBI NO: 1168480 NR Description: AQUAPORIN
  misc_feature (1)..(198): Homolog of NCBI NO: 17940742 NR Description: aquaporin-like protein [Petunia x hybrida]
  misc_feature (1)..(198): Homolog of NCBI NO: 8071628 NR Description: putative aquaporin PIP2-2 [Vitis berlandieri x
  misc_feature (1)..(198): Homolog of NCBI NO: 15227302 NR Description: putative plasma membrane intrinsic protein
  misc_feature (1)..(198): Homolog of NCBI NO: 11119335 NR Description: aquaporin [Brassica oleracea]
  misc_feature (1)..(198): Homolog of NCBI NO: 2306917 NR Description: plasma membrane intrinsic protein [Arabidopsis
  misc_feature (1)..(198): Homolog of NCBI NO: 1688296 NR Description: plasma membrane intrinsic protein PIP3
MIFVLVYCTAGISGGHINPAVTFGLFLARKVSLVRALGYMIAQCLGAICGVGFVKAFMKTPYNTLGGGANTVADGYSKGTALGAEIIGTFVLVYTVFSATDPKRSARDSHIPVLAPLPIGFAVFMVHLATIPITGTGINPARSFGAAVIYNNEKAWDDQWIFWVGPFLGALAAAAYHQYILRASAIKALGSFRSNATN

SEQ ID NO: 24851 - DNA, 967 bp, Arabidopsis thaliana
  misc_feature (1)..(967): Ceres Seq. ID no. 12580012
  misc_feature: MA Experiment ID: 108462 Result: Down-regulated in Transcription
  misc_feature: MA Experiment 108462 PARAMETER Experiment Name: At_Germinating_Seeds_cDNA_P Parameter: Age (day) Value: 2 vs. 0
  misc_feature: MA Experiment 108462 PARAMETER Experiment Name: At_Germinating_Seeds_cDNA_P Parameter: Tissue Value: Germinating Seeds
  misc_feature: MA Experiment ID: 108463 Result: Down-regulated in Transcription
  misc_feature: MA Experiment 108463 PARAMETER Experiment Name: At_Germinating_Seeds_cDNA_P Parameter: Age (day) Value: 3 vs. 0
  misc_feature: MA Experiment 108463 PARAMETER Experiment Name: At_Germinating_Seeds_cDNA_P Parameter: Tissue Value: Germinating Seeds
  misc_feature: MA Experiment ID: 108464 Result: Down-regulated in Transcription
  misc_feature: MA Experiment 108464 PARAMETER Experiment Name: At_Germinating_Seeds_cDNA_P Parameter: Age (day) Value: 4 vs. 0
  misc_feature: MA Experiment 108464 PARAMETER Experiment Name: At_Germinating_Seeds_cDNA_P Parameter: Tissue Value: Germinating Seeds
  misc_feature: MA Experiment ID: 20000071 Result: Up-regulated in Transcription
  misc_feature: MA Experiment 20000071 PARAMETER Experiment Name: At_100uM_ABA_Mutants_cDNA_P Parameter: Plant Line Value: CS8104
  misc_feature: MA Experiment 20000071 PARAMETER Experiment Name: At_100uM_ABA_Mutants_cDNA_P Parameter: Timepoint (hr) Value: 6
  misc_feature: MA Experiment 20000071 PARAMETER Experiment Name: At_100uM_ABA_Mutants_cDNA_P Parameter: Tissue Value: Aerial
  misc_feature: MA Experiment 20000071 PARAMETER Experiment Name: At_100uM_ABA_Mutants_cDNA_P Parameter: Treatment Value: 100uM ABA vs. No Treatment
  misc_feature: MA Experiment ID: 20000090 Result: Up-regulated in Transcription
  misc_feature: MA Experiment ID: 20000234 Result: Up-regulated in Transcription
  misc_feature: MA Experiment 20000234 PARAMETER Experiment Name: At_Siliques_P Parameter: Age (day) Value: 21
  misc_feature: MA Experiment 20000234 PARAMETER Experiment Name: At_Siliques_P Parameter: Organism Value: A. thaliana
  misc_feature: MA Experiment 20000234 PARAMETER Experiment Name: At_Siliques_P Parameter: Plant Line Value: WS
  misc_feature: MA Experiment 20000234 PARAMETER Experiment Name: At_Siliques_P Parameter: Tissue Value: Less Than 5mm Siliques vs. Whole Plant
  misc_feature: MA Experiment ID: 20000265 Result: Up-regulated in Transcription
  misc_feature: MA Experiment 20000265 PARAMETER Experiment Name: At_Open_Flower_P Parameter: Age (day) Value: 21
  misc_feature: MA Experiment 20000265 PARAMETER Experiment Name: At_Open_Flower_P Parameter: Plant Line Value: WS
  misc_feature: MA Experiment 20000265 PARAMETER Experiment Name: At_Open_Flower_P Parameter: Tissue Value: Closed Flower vs. Whole Plant
  misc_feature: MA Experiment ID: 20000794 Result: Up-regulated in Transcription
  misc_feature: MA Experiment 20000794 PARAMETER Experiment Name: At_Petals_P Parameter: Age (day) Value: 23-25 days
  misc_feature: MA Experiment 20000794 PARAMETER Experiment Name: At_Petals_P Parameter: Plant Line Value: WS
  misc_feature: MA Experiment 20000794 PARAMETER Experiment Name: At_Petals_P Parameter: Tissue Value: Petals vs. Whole plant
  misc_feature: MA Experiment ID: 20001247 Result: Down-regulated in Transcription
  misc_feature: MA Experiment 20001247 PARAMETER Experiment Name: At_Far-red-induction_P Parameter: Age (day) Value: 7
  misc_feature: MA Experiment 20001247 PARAMETER Experiment Name: At_Far-red-induction_P Parameter: Light Value: Far-red vs. White
  misc_feature: MA Experiment 20001247 PARAMETER Experiment Name: At_Far-red-induction_P Parameter: Organism Value: A. thaliana
  misc_feature: MA Experiment 20001247 PARAMETER Experiment Name: At_Far-red-induction_P Parameter: Plant Line Value: Columbia
  misc_feature: MA Experiment 20001247 PARAMETER Experiment Name: At_Far-red-induction_P Parameter: Timepoint (hr) Value: 1
  misc_feature: MA Experiment 20001247 PARAMETER Experiment Name: At_Far-red-induction_P Parameter: Tissue Value: Whole Plant
  misc_feature: MA Experiment ID: 20001560 Result: Up-regulated in Transcription
  misc_feature: MA Experiment 20001560 PARAMETER Experiment Name: At_Drought_Soil_Dry_P Parameter: Age (day) Value: 28
  misc_feature: MA Experiment 20001560 PARAMETER Experiment Name: At_Drought_Soil_Dry_P Parameter: Organism Value: A. thaliana
  misc_feature: MA Experiment 20001560 PARAMETER Experiment Name: At_Drought_Soil_Dry_P Parameter: Plant Line Value: WS
  misc_feature: MA Experiment 20001560 PARAMETER Experiment Name: At_Drought_Soil_Dry_P Parameter: Post Timepoint (hr) Value: None
  misc_feature: MA Experiment 20001560 PARAMETER Experiment Name: At_Drought_Soil_Dry_P Parameter: Post-Treatment Value: None
  misc_feature: MA Experiment 20001560 PARAMETER Experiment Name: At_Drought_Soil_Dry_P Parameter: Timepoint (day) Value: 14
  misc_feature: MA Experiment 20001560 PARAMETER Experiment Name: At_Drought_Soil_Dry_P Parameter: Treatment Value: Drought vs. No Drought
  misc_feature: MA Experiment ID: 20001906 Result: Up-regulated in Transcription
  misc_feature: MA Experiment 20001906 PARAMETER Experiment Name: At_Drought_Reproduction_P Parameter: Age (day) Value: 35
  misc_feature: MA Experiment 20001906 PARAMETER Experiment Name: At_Drought_Reproduction_P Parameter: Organism Value: A. thaliana
  misc_feature: MA Experiment 20001906 PARAMETER Experiment Name: At_Drought_Reproduction_P Parameter: Plant Line Value: WS
  misc_feature: MA Experiment 20001906 PARAMETER Experiment Name: At_Drought_Reproduction_P Parameter: Timepoint (day) Value: 5
  misc_feature: MA Experiment 20001906 PARAMETER Experiment Name: At_Drought_Reproduction_P Parameter: Tissue Value: Siliques
  misc_feature: MA Experiment 20001906 PARAMETER Experiment Name: At_Drought_Reproduction_P Parameter: Treatment Value: Drought vs. No Drought
actcattttactgttaagcaaacacaagataagaagaaacaaacaatggcgatttctttcatttagatattttcctcgattcttagcttctggattttggtgaaaggatttgaaatggcggtgtcgcttttatcgaaattacggtgtataacagtagatgttactggtacacttatagcttacaaaggagagcttggtgattactattgtatggctgctaaagccattggtttgccttgtcctgattataaacgagttcatgaaggttttaaactagcttatacagatatggcacaaaagtatccttgtttcggtttccatgccaaaatgccaaacattgtttggtggaaaacttgtgtgagagattcatttgtcaaggcaggatatgagtatgatgaggagacatttgagaagatatttaggagaatctattcgacgtttggttctgctgcaccttactctgtgtttcaagattctcaaccgtttttaagatgggcacgcaggaaaggtcttatagtcggacttgttagcaatgcggaataccgatatcaagaagttattttaccttccttcggtttgagcaaggcagagtgggattttggtgtattctctggaattgaagggatagagaaaccagatccgaggatttttacgctcgcgctagagagagccgggaataatattgcgcctgaagaggttttgcatattggagacagcatgcgcaaagattatgttccagcaaagagtattgggatgcatgctttgttggttgataggtttaagacggaagctgctaaagactggatagaagctggagccattgtgcttccagatttggttgctgttcaacaacttttggagtctgataagttgaaatgttagaaaacagacctctcttaagtatgaaatctaatgtattgtagtattgcacatttgagtaaaataagtttcaacggcttctttggtt

SEQ ID NO: 24852 - protein, 255 aa, Arabidopsis thaliana
  peptide (1)..(255): Ceres Seq. ID no. 12580013
  misc_feature (9)..(222): Pfam Name: haloacid dehalogenase-like hydrolase Pfam Description: haloacid dehalogenase-like hydrolase
  misc_feature (9)..(220): Homolog of NCBI NO: 17553988 NR Description: Predicted CDS, haloacid dehalogenase-like
  misc_feature (3)..(219): Homolog of NCBI NO: 24639695 NR Description: CG15912-PA [Drosophila melanogaster]
  misc_feature (6)..(219): Homolog of NCBI NO: 21483246 NR Description: GH02773p [Drosophila melanogaster]
  misc_feature (6)..(219): Homolog of NCBI NO: 19923000 NR Description: Rhythmically expressed gene 2 CG3200-PA
  misc_feature (9)..(238): Homolog of NCBI NO: 37520921 NR Description: hypothetical protein gll1352 [Gloeobacter
  misc_feature (10)..(221): Homolog of NCBI NO: 23130292 NR Description: hypothetical protein [Nostoc punctiforme]
  misc_feature (6)..(223): Homolog of NCBI NO: 17231587 NR Description: hypothetical protein [Nostoc sp. PCC 7120]
  misc_feature (8)..(219): Homolog of NCBI NO: 27714603 NR Description: similar to RIKEN cDNA 2810435D12
  misc_feature (9)..(221): Homolog of NCBI NO: 33468704 NR Description: SI:zC10E8.6 (novel protein) [Danio rerio]
  misc_feature (1)..(255): Homolog of NCBI NO: 15241564 NR Description: Dreg-2 like protein; protein id: At5g44730.1
MAVSLLSKLRCITVDVTGTLIAYKGELGDYYCMAAKAIGLPCPDYKRVHEGFKLAYTDMAQKYPCFGFHAKMPNIVWWKTCVRDSFVKAGYEYDEETFEKIFRRIYSTFGSAAPYSVFQDSQPFLRWARRKGLIVGLVSNAEYRYQEVILPSFGLSKAEWDFGVFSGIEGIEKPDPRIFTLALERAGNNIAPEEVLHIGDSMRKDYVPAKSIGMHALLVDRFKTEAAKDWIEAGAIVLPDLVAVQQLLESDKLKC

SEQ ID NO: 24853 - protein, 223 aa, Arabidopsis thaliana
  peptide (1)..(223): Ceres Seq. ID no. 12580014
  misc_feature (1)..(190): Pfam Name: haloacid dehalogenase-like hydrolase Pfam Description: haloacid dehalogenase-like hydrolase
  misc_feature (1)..(188): Homolog of NCBI NO: 17553988 NR Description: Predicted CDS, haloacid dehalogenase-like
  misc_feature (1)..(187): Homolog of NCBI NO: 24639695 NR Description: CG15912-PA [Drosophila melanogaster]
  misc_feature (1)..(187): Homolog of NCBI NO: 21483246 NR Description: GH02773p [Drosophila melanogaster]
  misc_feature (1)..(187): Homolog of NCBI NO: 19923000 NR Description: Rhythmically expressed gene 2 CG3200-PA
  misc_feature (1)..(206): Homolog of NCBI NO: 37520921 NR Description: hypothetical protein gll1352 [Gloeobacter
  misc_feature (1)..(189): Homolog of NCBI NO: 23130292 NR Description: hypothetical protein [Nostoc punctiforme]
  misc_feature (1)..(191): Homolog of NCBI NO: 17231587 NR Description: hypothetical protein [Nostoc sp. PCC 7120]
  misc_feature (1)..(187): Homolog of NCBI NO: 27714603 NR Description: similar to RIKEN cDNA 2810435D12
  misc_feature (1)..(189): Homolog of NCBI NO: 33468704 NR Description: SI:zC10E8.6 (novel protein) [Danio rerio]
  misc_feature (1)..(223): Homolog of NCBI NO: 15241564 NR Description: Dreg-2 like protein; protein id: At5g44730.1
MAAKAIGLPCPDYKRVHEGFKLAYTDMAQKYPCFGFHAKMPNIVWWKTCVRDSFVKAGYEYDEETFEKIFRRIYSTFGSAAPYSVFQDSQPFLRWARRKGLIVGLVSNAEYRYQEVILPSFGLSKAEWDFGVFSGIEGIEKPDPRIFTLALERAGNNIAPEEVLHIGDSMRKDYVPAKSIGMHALLVDRFKTEAAKDWIEAGAIVLPDLVAVQQLLESDKLKC

SEQ ID NO: 24854 - protein, 197 aa, Arabidopsis thaliana
  peptide (1)..(197): Ceres Seq. ID no. 12580015
  misc_feature (1)..(164): Pfam Name: haloacid dehalogenase-like hydrolase Pfam Description: haloacid dehalogenase-like hydrolase
  misc_feature (1)..(162): Homolog of NCBI NO: 17553988 NR Description: Predicted CDS, haloacid dehalogenase-like
  misc_feature (1)..(161): Homolog of NCBI NO: 24639695 NR Description: CG15912-PA [Drosophila melanogaster]
  misc_feature (1)..(161): Homolog of NCBI NO: 21483246 NR Description: GH02773p [Drosophila melanogaster]
  misc_feature (1)..(161): Homolog of NCBI NO: 19923000 NR Description: Rhythmically expressed gene 2 CG3200-PA
  misc_feature (1)..(180): Homolog of NCBI NO: 37520921 NR Description: hypothetical protein gll1352 [Gloeobacter
  misc_feature (1)..(163): Homolog of NCBI NO: 23130292 NR Description: hypothetical protein [Nostoc punctiforme]
  misc_feature (1)..(165): Homolog of NCBI NO: 17231587 NR Description: hypothetical protein [Nostoc sp. PCC 7120]
  misc_feature (1)..(161): Homolog of NCBI NO: 27714603 NR Description: similar to RIKEN cDNA 2810435D12
  misc_feature (1)..(163): Homolog of NCBI NO: 33468704 NR Description: SI:zC10E8.6 (novel protein) [Danio rerio]
  misc_feature (1)..(197): Homolog of NCBI NO: 15241564 NR Description: Dreg-2 like protein; protein id: At5g44730.1
MAQKYPCFGFHAKMPNIVWWKTCVRDSFVKAGYEYDEETFEKIFRRIYSTFGSAAPYSVFQDSQPFLRWARRKGLIVGLVSNAEYRYQEVILPSFGLSKAEWDFGVFSGIEGIEKPDPRIFTLALERAGNNIAPEEVLHIGDSMRKDYVPAKSIGMHALLVDRFKTEAAKDWIEAGAIVLPDLVAVQQLLESDKLKC

SEQ ID NO: 24855 - DNA, 1177 bp, Arabidopsis thaliana
  misc_feature (1)..(1177): Ceres Seq. ID no. 12738459
  misc_feature: MA Experiment ID: 108573 Result: Up-regulated in Transcription
  misc_feature: MA Experiment 108573 PARAMETER Experiment Name: At_Drought_cDNA_P Parameter: Timepoint (hr) Value: 6
  misc_feature: MA Experiment 108573 PARAMETER Experiment Name: At_Drought_cDNA_P Parameter: Tissue Value: Aerial
  misc_feature: MA Experiment 108573 PARAMETER Experiment Name: At_Drought_cDNA_P Parameter: Treatment Value: Drought vs. No Drought
  misc_feature: MA Experiment ID: 108579 Result: Up-regulated in Transcription
  misc_feature: MA Experiment 108579 PARAMETER Experiment Name: At_4deg_Cold_cDNA_P Parameter: Temperature (deg C) Value: 4 vs. 22
  misc_feature: MA Experiment 108579 PARAMETER Experiment Name: At_4deg_Cold_cDNA_P Parameter: Timepoint (hr) Value: 6
  misc_feature: MA Experiment 108579 PARAMETER Experiment Name: At_4deg_Cold_cDNA_P Parameter: Tissue Value: Aerial
  misc_feature: MA Experiment ID: 108585 Result: Up-regulated in Transcription
  misc_feature: MA Experiment 108585 PARAMETER Experiment Name: At_5mM_NaNP_cDNA_P Parameter: Timepoint (hr) Value: 6
  misc_feature: MA Experiment 108585 PARAMETER Experiment Name: At_5mM_NaNP_cDNA_P Parameter: Tissue Value: Aerial
  misc_feature: MA Experiment 108585 PARAMETER Experiment Name: At_5mM_NaNP_cDNA_P Parameter: Treatment Value: null
  misc_feature: MA Experiment ID: 108608 Result: Up-regulated in Transcription
  misc_feature: MA Experiment 108608 PARAMETER Experiment Name: At_100uM_ABA_cDNA_P Parameter: Timepoint (hr) Value: 1
  misc_feature: MA Experiment 108608 PARAMETER Experiment Name: At_100uM_ABA_cDNA_P Parameter: Tissue Value: Aerial
  misc_feature: MA Experiment 108608 PARAMETER Experiment Name: At_100uM_ABA_cDNA_P Parameter: Treatment Value: 100uM ABA vs. No Treatment
  misc_feature: MA Experiment ID: 108668 Result: Up-regulated in Transcription
  misc_feature: MA Experiment 108668 PARAMETER Experiment Name: At_2mM_SA_cDNA_P Parameter: Plant Line Value: WS
  misc_feature: MA Experiment 108668 PARAMETER Experiment Name: At_2mM_SA_cDNA_P Parameter: Timepoint (hr) Value: 6
  misc_feature: MA Experiment 108668 PARAMETER Experiment Name: At_2mM_SA_cDNA_P Parameter: Treatment Value: 2mM SA vs. No Treatment
  misc_feature: MA Experiment ID: 20000166 Result: Up-regulated in Transcription
  misc_feature: MA Experiment 20000166 PARAMETER Experiment Name: At_100uM_ABA_P Parameter: Age (day) Value: 14
  misc_feature: MA Experiment 20000166 PARAMETER Experiment Name: At_100uM_ABA_P Parameter: Organism Value: A. thaliana
  misc_feature: MA Experiment 20000166 PARAMETER Experiment Name: At_100uM_ABA_P Parameter: Plant Line Value: WS
  misc_feature: MA Experiment 20000166 PARAMETER Experiment Name: At_100uM_ABA_P Parameter: Timepoint (hr) Value: 1
  misc_feature: MA Experiment 20000166 PARAMETER Experiment Name: At_100uM_ABA_P Parameter: Tissue Value: Aerial
  misc_feature: MA Experiment 20000166 PARAMETER Experiment Name: At_100uM_ABA_P Parameter: Treatment Value: 100uM ABA vs. No Treatment
  misc_feature: MA Experiment ID: 20000173 Result: Up-regulated in Transcription
  misc_feature: MA Experiment 20000173 PARAMETER Experiment Name: At_42deg_Heat_P Parameter: Age (day) Value: 14
  misc_feature: MA Experiment 20000173 PARAMETER Experiment Name: At_42deg_Heat_P Parameter: Organism Value: A. thaliana
  misc_feature: MA Experiment 20000173 PARAMETER Experiment Name: At_42deg_Heat_P Parameter: Plant Line Value: WS
  misc_feature: MA Experiment 20000173 PARAMETER Experiment Name: At_42deg_Heat_P Parameter: Temperature (deg C) Value: 42 vs. 22
  misc_feature: MA Experiment 20000173 PARAMETER Experiment Name: At_42deg_Heat_P Parameter: Timepoint (hr) Value: 6
  misc_feature: MA Experiment 20000173 PARAMETER Experiment Name: At_42deg_Heat_P Parameter: Tissue Value: Aerial
  misc_feature: MA Experiment ID: 20000182 Result: Up-regulated in Transcription
  misc_feature: MA Experiment 20000182 PARAMETER Experiment Name: At_2mM_SA_P Parameter: Age (day) Value: 14
  misc_feature: MA Experiment 20000182 PARAMETER Experiment Name: At_2mM_SA_P Parameter: Organism Value: A. thaliana
  misc_feature: MA Experiment 20000182 PARAMETER Experiment Name: At_2mM_SA_P Parameter: Plant Line Value: WS
  misc_feature: MA Experiment 20000182 PARAMETER Experiment Name: At_2mM_SA_P Parameter: Timepoint (hr) Value: 6
  misc_feature: MA Experiment 20000182 PARAMETER Experiment Name: At_2mM_SA_P Parameter: Tissue Value: Aerial
  misc_feature: MA Experiment 20000182 PARAMETER Experiment Name: At_2mM_SA_P Parameter: Treatment Value: 2mM SA vs. No Treatment
  misc_feature: MA Experiment ID: 20000436 Result: Up-regulated in Transcription
  misc_feature: MA Experiment 20000436 PARAMETER Experiment Name: At_Drought_P Parameter: Age (day) Value: 7
  misc_feature: MA Experiment 20000436 PARAMETER Experiment Name: At_Drought_P Parameter: Organism Value: A. thaliana
  misc_feature: MA Experiment 20000436 PARAMETER Experiment Name: At_Drought_P Parameter: Plant Line Value: WS
  misc_feature: MA Experiment 20000436 PARAMETER Experiment Name: At_Drought_P Parameter: Timepoint (hr) Value: 12
  misc_feature: MA Experiment 20000436 PARAMETER Experiment Name: At_Drought_P Parameter: Tissue Value: Whole Plant
  misc_feature: MA Experiment 20000436 PARAMETER Experiment Name: At_Drought_P Parameter: Treatment Value: Drought vs. No Drought
  misc_feature: MA Experiment ID: 20000437 Result: Up-regulated in Transcription
  misc_feature: MA Experiment 20000437 PARAMETER Experiment Name: At_Drought_P Parameter: Age (day) Value: 8
  misc_feature: MA Experiment 20000437 PARAMETER Experiment Name: At_Drought_P Parameter: Organism Value: A. thaliana
  misc_feature: MA Experiment 20000437 PARAMETER Experiment Name: At_Drought_P Parameter: Plant Line Value: WS
  misc_feature: MA Experiment 20000437 PARAMETER Experiment Name: At_Drought_P Parameter: Timepoint (hr) Value: 24
  misc_feature: MA Experiment 20000437 PARAMETER Experiment Name: At_Drought_P Parameter: Tissue Value: Whole Plant
  misc_feature: MA Experiment 20000437 PARAMETER Experiment Name: At_Drought_P Parameter: Treatment Value: Drought vs. No Drought
  misc_feature: MA Experiment ID: 20001905 Result: Up-regulated in Transcription
  misc_feature: MA Experiment 20001905 PARAMETER Experiment Name: At_Drought_Reproduction_P Parameter: Age (day) Value: 40
  misc_feature: MA Experiment 20001905 PARAMETER Experiment Name: At_Drought_Reproduction_P Parameter: Organism Value: A. thaliana
  misc_feature: MA Experiment 20001905 PARAMETER Experiment Name: At_Drought_Reproduction_P Parameter: Plant Line Value: WS
  misc_feature: MA Experiment 20001905 PARAMETER Experiment Name: At_Drought_Reproduction_P Parameter: Timepoint (day) Value: 10
  misc_feature: MA Experiment 20001905 PARAMETER Experiment Name: At_Drought_Reproduction_P Parameter: Tissue Value: Rosettes
  misc_feature: MA Experiment 20001905 PARAMETER Experiment Name: At_Drought_Reproduction_P Parameter: Treatment Value: Drought vs. No Drought
  misc_feature: MA Experiment ID: 20001911 Result: Up-regulated in Transcription
  misc_feature: MA Experiment 20001911 PARAMETER Experiment Name: At_Drought_Reproduction_P Parameter: Age (day) Value: 40
  misc_feature: MA Experiment 20001911 PARAMETER Experiment Name: At_Drought_Reproduction_P Parameter: Organism Value: A. thaliana
  misc_feature: MA Experiment 20001911 PARAMETER Experiment Name: At_Drought_Reproduction_P Parameter: Plant Line Value: WS
  misc_feature: MA Experiment 20001911 PARAMETER Experiment Name: At_Drought_Reproduction_P Parameter: Timepoint (day) Value: 10
  misc_feature: MA Experiment 20001911 PARAMETER Experiment Name: At_Drought_Reproduction_P Parameter: Tissue Value: Flowers
  misc_feature: MA Experiment 20001911 PARAMETER Experiment Name: At_Drought_Reproduction_P Parameter: Treatment Value: Drought vs. No Drought
aaaaaggtaaaaactttgggaagcagctaaaatactgtgttctttatttcttccatcgaaatcgaaaaaagctaagatctttgcgttttgaaacgatggcggaagaacataagcatgatgaatctgtgatcgctcctgagccagctgttgaggttgtggagagagaatcgttgatggataagatatcggagaagatccatcacggtggtgattcttcttcgtcttcttcatcttctgatgatgaagacgagaagaagaagactaagaagccctcttctccttcgtcttctatgaaatcgaaagtttaccgcttgttcggacgagagcagcctgttcataaggttctcggcggtggaaagccggctgatatattcatgtggaagaacaagaagatgtctggtggtgtacttggtggtgctacagctgcttgggttgtgtttgaattgatggagtaccatcttctcactctgctttgccacgtgatgattgttgttctcgctgtgctgtttttgtggtctaatgccactatgttcattaacaagtccccaccaaagattcctgaagttcatatccctgaagaacctattcttcagcttgcgtctgggctcagaatcgagatcaaccgtggattctcttctctccgtgaaattgcatcaggaagggatctcaagaaattcctcattgctattgccgggttatgggttctctcaatcttgggcggttgcttcaacttcttgacattggcatacatagctcttgtgttgctcttcacggttcctcttgcctacgacaagtatgaagacaaagtcgacccattaggtgagaaagcaatgatcgagctcaagaagcagtatgcagtgttggatgagaaggtgttgagcaagatcccacttgggccgttgaagaacaagaagaaagattaggggtttacacaaggttgtccgtggctagcaaaacgggtgttgtgaaatggtatcgaagtaatgtgttttgggcgtttttttaggtggctctttcggttatgtgaatgaacttggaattttcctgactggtttgttctgttgtttatgtcattgttgatcagcgtcgagggataaaagtagtgatatttcttctctctctaagcctctatataactaagaatttcaagatatttgaattttgcaatctcgtggtc

SEQ ID NO: 24856 - protein, 306 aa, Arabidopsis thaliana
  peptide (1)..(306): Ceres Seq. ID no. 12738460
  misc_feature (84)..(306): Homolog of NCBI NO: 34897094 NR Description: unknown protein [Oryza sativa (japonica
  misc_feature (43)..(303): Homolog of NCBI NO: 15233147 NR Description: putative protein; protein id: At3g61560.1
  misc_feature (46)..(296): Homolog of NCBI NO: 15234108 NR Description: hypothetical protein; protein id: At4g01230.1
  misc_feature (43)..(305): Homolog of NCBI NO: 18406991 NR Description: expressed protein
  misc_feature (55)..(304): Homolog of NCBI NO: 34904202 NR Description: P0492F05.25 [Oryza sativa (japonica
  misc_feature (48)..(306): Homolog of NCBI NO: 15222616 NR Description: hypothetical protein
  misc_feature (53)..(304): Homolog of NCBI NO: 34909318 NR Description: OSJNBb0021A09.5 [Oryza sativa (japonica
  misc_feature (55)..(306): Homolog of NCBI NO: 15238125 NR Description: putative protein
  misc_feature (32)..(306): Homolog of NCBI NO: 15237093 NR Description: putative protein
  misc_feature (32)..(306): Homolog of NCBI NO: 15236556 NR Description: putative protein
KGKNFGKQLKYCVLYFFHRNRKKLRSLRFETMAEEHKHDESVIAPEPAVEVVERESLMDKISEKIHHGGDSSSSSSSSDDEDEKKKTKKPSSPSSSMKSKVYRLFGREQPVHKVLGGGKPADIFMWKNKKMSGGVLGGATAAWVVFELMEYHLLTLLCHVMIVVLAVLFLWSNATMFINKSPPKIPEVHIPEEPILQLASGLRIEINRGFSSLREIASGRDLKKFLIAIAGLWVLSILGGCFNFLTLAYIALVLLFTVPLAYDKYEDKVDPLGEKAMIELKKQYAVLDEKVLSKIPLGPLKNKKKD

SEQ ID NO: 24857 - protein, 275 aa, Arabidopsis thaliana
  peptide (1)..(275): Ceres Seq. ID no. 12738461
  misc_feature (53)..(275): Homolog of NCBI NO: 34897094 NR Description: unknown protein [Oryza sativa (japonica
  misc_feature (12)..(272): Homolog of NCBI NO: 15233147 NR Description: putative protein; protein id: At3g61560.1
  misc_feature (15)..(265): Homolog of NCBI NO: 15234108 NR Description: hypothetical protein; protein id: At4g01230.1
  misc_feature (12)..(274): Homolog of NCBI NO: 18406991 NR Description: expressed protein
  misc_feature (24)..(273): Homolog of NCBI NO: 34904202 NR Description: P0492F05.25 [Oryza sativa (japonica
  misc_feature (17)..(275): Homolog of NCBI NO: 15222616 NR Description: hypothetical protein
  misc_feature (22)..(273): Homolog of NCBI NO: 34909318 NR Description: OSJNBb0021A09.5 [Oryza sativa (japonica
  misc_feature (24)..(275): Homolog of NCBI NO: 15238125 NR Description: putative protein
  misc_feature (1)..(275): Homolog of NCBI NO: 15237093 NR Description: putative protein
  misc_feature (1)..(275): Homolog of NCBI NO: 15236556 NR Description: putative protein
MAEEHKHDESVIAPEPAVEVVERESLMDKISEKIHHGGDSSSSSSSSDDEDEKKKTKKPSSPSSSMKSKVYRLFGREQPVHKVLGGGKPADIFMWKNKKMSGGVLGGATAAWVVFELMEYHLLTLLCHVMIVVLAVLFLWSNATMFINKSPPKIPEVHIPEEPILQLASGLRIEINRGFSSLREIASGRDLKKFLIAIAGLWVLSILGGCFNFLTLAYIALVLLFTVPLAYDKYEDKVDPLGEKAMIELKKQYAVLDEKVLSKIPLGPLKNKKKD

SEQ ID NO: 24858 - protein, 249 aa, Arabidopsis thaliana
  peptide (1)..(249): Ceres Seq. ID no. 12738462
  misc_feature (27)..(249): Homolog of NCBI NO: 34897094 NR Description: unknown protein [Oryza sativa (japonica
  misc_feature (1)..(246): Homolog of NCBI NO: 15233147 NR Description: putative protein; protein id: At3g61560.1
  misc_feature (1)..(239): Homolog of NCBI NO: 15234108 NR Description: hypothetical protein; protein id: At4g01230.1
  misc_feature (1)..(248): Homolog of NCBI NO: 18406991 NR Description: expressed protein
  misc_feature (1)..(247): Homolog of NCBI NO: 34904202 NR Description: P0492F05.25 [Oryza sativa (japonica
  misc_feature (1)..(249): Homolog of NCBI NO: 15222616 NR Description: hypothetical protein
  misc_feature (1)..(247): Homolog of NCBI NO: 34909318 NR Description: OSJNBb0021A09.5 [Oryza sativa (japonica
  misc_feature (1)..(249): Homolog of NCBI NO: 15238125 NR Description: putative protein
  misc_feature (1)..(249): Homolog of NCBI NO: 15237093 NR Description: putative protein
  misc_feature (1)..(249): Homolog of NCBI NO: 15236556 NR Description: putative protein
MDKISEKIHHGGDSSSSSSSSDDEDEKKKTKKPSSPSSSMKSKVYRLFGREQPVHKVLGGGKPADIFMWKNKKMSGGVLGGATAAWVVFELMEYHLLTLLCHVMIVVLAVLFLWSNATMFINKSPPKIPEVHIPEEPILQLASGLRIEINRGFSSLREIASGRDLKKFLIAIAGLWVLSILGGCFNFLTLAYIALVLLFTVPLAYDKYEDKVDPLGEKAMIELKKQYAVLDEKVLSKIPLGPLKNKKKD

SEQ ID NO: 24859 - DNA, 1274 bp, Arabidopsis thaliana
  misc_feature (1)..(1274): Ceres Seq. ID no. 12701672
  misc_feature: MA Experiment ID: 108434 Result: Down-regulated in Transcription
  misc_feature: MA Experiment 108434 PARAMETER Experiment Name: At_Root_Tips_cDNA_P Parameter: Tissue Value: Root Tips
  misc_feature: MA Experiment ID: 108461 Result: Up-regulated in Transcription
  misc_feature: MA Experiment 108461 PARAMETER Experiment Name: At_Germinating_Seeds_cDNA_P Parameter: Age (day) Value: 1 vs. 0
  misc_feature: MA Experiment 108461 PARAMETER Experiment Name: At_Germinating_Seeds_cDNA_P Parameter: Tissue Value: Germinating Seeds
  misc_feature: MA Experiment ID: 108462 Result: Up-regulated in Transcription
  misc_feature: MA Experiment 108462 PARAMETER Experiment Name: At_Germinating_Seeds_cDNA_P Parameter: Age (day) Value: 2 vs. 0
  misc_feature: MA Experiment 108462 PARAMETER Experiment Name: At_Germinating_Seeds_cDNA_P Parameter: Tissue Value: Germinating Seeds
  misc_feature: MA Experiment ID: 108463 Result: Up-regulated in Transcription
  misc_feature: MA Experiment 108463 PARAMETER Experiment Name: At_Germinating_Seeds_cDNA_P Parameter: Age (day) Value: 3 vs. 0
  misc_feature: MA Experiment 108463 PARAMETER Experiment Name: At_Germinating_Seeds_cDNA_P Parameter: Tissue Value: Germinating Seeds
  misc_feature: MA Experiment ID: 108464 Result: Up-regulated in Transcription
  misc_feature: MA Experiment 108464 PARAMETER Experiment Name: At_Germinating_Seeds_cDNA_P Parameter: Age (day) Value: 4 vs. 0
  misc_feature: MA Experiment 108464 PARAMETER Experiment Name: At_Germinating_Seeds_cDNA_P Parameter: Tissue Value: Germinating Seeds
  misc_feature: MA Experiment ID: 108594 Result: Down-regulated in Transcription
  misc_feature: MA Experiment 108594 PARAMETER Experiment Name: At_Ler-rhl_Root_cDNA_P Parameter: Plant Line Value: null
  misc_feature: MA Experiment ID: 20000180 Result: Up-regulated in Transcription
  misc_feature: MA Experiment 20000180 PARAMETER Experiment Name: At_Germinating_Seeds_P Parameter: Age (hr) Value: 24 vs. 0
  misc_feature: MA Experiment 20000180 PARAMETER Experiment Name: At_Germinating_Seeds_P Parameter: Tissue Value: Germinating Seeds
  misc_feature: MA Experiment ID: 20000184 Result: Up-regulated in Transcription
  misc_feature: MA Experiment 20000184 PARAMETER Experiment Name: At_Shoots__P Parameter: Age (day) Value: 7
  misc_feature: MA Experiment 20000184 PARAMETER Experiment Name: At_Shoots__P Parameter: Tissue Value: Shoots vs. Whole Plant
  misc_feature: MA Experiment ID: 20000185 Result: Up-regulated in Transcription
  misc_feature: MA Experiment 20000185 PARAMETER Experiment Name: At_Roots__P Parameter: Age (day) Value: 7 vs. 21
  misc_feature: MA Experiment 20000185 PARAMETER Experiment Name: At_Roots__P Parameter: Organism Value: A. thaliana
  misc_feature: MA Experiment 20000185 PARAMETER Experiment Name: At_Roots__P Parameter: Tissue Value: Roots vs. Whole Plant
  misc_feature: MA Experiment ID: 20000227 Result: Up-regulated in Transcription
  misc_feature: MA Experiment 20000227 PARAMETER Experiment Name: At_Root-Tips-vs-Tops_P Parameter: Tissue Value: Root Tips vs. Root Tops
  misc_feature: MA Experiment ID: 20000439 Result: Up-regulated in Transcription
  misc_feature: MA Experiment 20000439 PARAMETER Experiment Name: At_Roots__P Parameter: Age (day) Value: 14 vs. 21
  misc_feature: MA Experiment 20000439 PARAMETER Experiment Name: At_Roots__P Parameter: Organism Value: A. thaliana
  misc_feature: MA Experiment 20000439 PARAMETER Experiment Name: At_Roots__P Parameter: Tissue Value: Roots vs. Whole Plant
  misc_feature: MA Experiment ID: 20000527 Result: Down-regulated in Transcription
  misc_feature: MA Experiment 20000527 PARAMETER Experiment Name: At_10percent_PEG_P Parameter: Age (day) Value: 20
  misc_feature: MA Experiment 20000527 PARAMETER Experiment Name: At_10percent_PEG_P Parameter: Organism Value: A. thaliana
  misc_feature: MA Experiment 20000527 PARAMETER Experiment Name: At_10percent_PEG_P Parameter: Plant Line Value: WS
  misc_feature: MA Experiment 20000527 PARAMETER Experiment Name: At_10percent_PEG_P Parameter: Timepoint (day) Value: 20
  misc_feature: MA Experiment 20000527 PARAMETER Experiment Name: At_10percent_PEG_P Parameter: Tissue Value: Whole Plant
  misc_feature: MA Experiment 20000527 PARAMETER Experiment Name: At_10percent_PEG_P Parameter: Treatment Value: 10percent PEG vs. No Treatment
acaaccctttccacaagaagttataaaccaatacatagaagaaaacttccaaccccaaaaaatgatgaagggtgccaagttttcatctcttcttgtgcttttctttatttttccgatcgcatttgctcaactgagagtcgggttttatagtcaatcatgccctcaagccgagactatcgtacgcaatctggtgcgccaacggtttggtgttaccccaaccgttaccgccgctttgctccgtatgcatttccacgactgtttcgttaagggctgtgacgcttctctcctcattgattcaaccaattccgagaaaactgctggaccaaacggaagcgtcagggaatttgacctgatagaccggatcaaggctcagctagaagctgcatgcccttccacagtctcatgtgctgacatcgtcacattggccacacgtgactcggtggccttagccggaggcccaagctacagcatccccacgggaaggcgtgacggtagggtctcaaacaatcttgatgtaaccttaccgggtccaacgatctccgtctctggagccgtgagtttattcacgaacaaagggatgaacacgttcgatgcagtagctcttttgggtgcacacactgttggtcaaggaaattgtggtctctttagtgacagaatcactagcttccaaggaactggacgaccggacccgtccatggaccccgctttggttaccagcctaaggaacacatgcagaaatagcgcgacggcggcactagaccagtcgagtccattgagattcgacaaccagttcttcaagcaaatccgtaaaaggagaggagtgttgcaagttgaccaacgcctcgcatccgacccacagactcgtgggattgtggctcggtatgctaataacaacgccttcttcaagcgtcagttcgttagagcaatggtgaagatgggagcagttgatgtgcttactggtcgtaacggtgagatcagaaggaactgcaggagattcaactaatgaactacagaagcgtggatataatattacatttgatacaatatatttcaaatcttctttatatttttactaattcatttttggttttggttggggttttcttgcataaataaggcttttcttaaattggatggtttcgattttcgagaaagattactatatattatattgttggtctgcatttggtggatgtatcttaagtttacaaataatttgtgatattgaaatattgatatgtatctttatcatggttaatcatatatatatatat

SEQ ID NO: 24860 - protein, 333 aa, Arabidopsis thaliana
  peptide (1)..(333): Ceres Seq. ID no. 12701673
  misc_feature (60)..(297): Pfam Name: Peroxidase Pfam Description: Peroxidase
  misc_feature (22)..(333): Homolog of NCBI NO: 21593692 NR Description: putative peroxidase [Arabidopsis thaliana]
  misc_feature (22)..(333): Homolog of NCBI NO: 21593467 NR Description: peroxidase ATP13a [Arabidopsis thaliana]
  misc_feature (45)..(333): Homolog of NCBI NO: 129808 NR Description: Cationic peroxidase 2 precursor (PNPC2)
  misc_feature (34)..(333): Homolog of NCBI NO: 15218665 NR Description: peroxidase, putative; protein id: At1g34510.1
  misc_feature (29)..(333): Homolog of NCBI NO: 18416663 NR Description: peroxidase, putative
  misc_feature (22)..(333): Homolog of NCBI NO: 15228606 NR Description: peroxidase, putative
  misc_feature (29)..(333): Homolog of NCBI NO: 7433094 NR Description: peroxidase homolog F20B18.120 - Arabidopsis
  misc_feature (45)..(333): Homolog of NCBI NO: 1232069 NR Description: cationic peroxidase [Stylosanthes humilis]
  misc_feature (30)..(333): Homolog of NCBI NO: 7433068 NR Description: probable peroxidase (EC 1.11.1.7), cationic -
  misc_feature (21)..(333): Homolog of NCBI NO: 15238030 NR Description: peroxidase, putative
QPFPQEVINQYIEENFQPQKMMKGAKFSSLLVLFFIFPIAFAQLRVGFYSQSCPQAETIVRNLVRQRFGVTPTVTAALLRMHFHDCFVKGCDASLLIDSTNSEKTAGPNGSVREFDLIDRIKAQLEAACPSTVSCADIVTLATRDSVALAGGPSYSIPTGRRDGRVSNNLDVTLPGPTISVSGAVSLFTNKGMNTFDAVALLGAHTVGQGNCGLFSDRITSFQGTGRPDPSMDPALVTSLRNTCRNSATAALDQSSPLRFDNQFFKQIRKRRGVLQVDQRLASDPQTRGIVARYANNNAFFKRQFVRAMVKMGAVDVLTGRNGEIRRNCRRFN

SEQ ID NO: 24861 - protein, 313 aa, Arabidopsis thaliana
  peptide (1)..(313): Ceres Seq. ID no. 12701674
  misc_feature (40)..(277): Pfam Name: Peroxidase Pfam Description: Peroxidase
  misc_feature (10)..(313): Homolog of NCBI NO: 7433068 NR Description: probable peroxidase (EC 1.11.1.7), cationic -
  misc_feature (25)..(313): Homolog of NCBI NO: 129808 NR Description: Cationic peroxidase 2 precursor (PNPC2)
  misc_feature (25)..(313): Homolog of NCBI NO: 1232069 NR Description: cationic peroxidase [Stylosanthes humilis]
  misc_feature (14)..(313): Homolog of NCBI NO: 15218665 NR Description: peroxidase, putative; protein id: At1g34510.1
  misc_feature (9)..(313): Homolog of NCBI NO: 7433094 NR Description: peroxidase homolog F20B18.120 - Arabidopsis
  misc_feature (9)..(313): Homolog of NCBI NO: 18416663 NR Description: peroxidase, putative
  misc_feature (2)..(313): Homolog of NCBI NO: 15228606 NR Description: peroxidase, putative
  misc_feature (2)..(313): Homolog of NCBI NO: 21593692 NR Description: putative peroxidase [Arabidopsis thaliana]
  misc_feature (2)..(313): Homolog of NCBI NO: 21593467 NR Description: peroxidase ATP13a [Arabidopsis thaliana]
  misc_feature (1)..(313): Homolog of NCBI NO: 15238030 NR Description: peroxidase, putative
MMKGAKFSSLLVLFFIFPIAFAQLRVGFYSQSCPQAETIVRNLVRQRFGVTPTVTAALLRMHFHDCFVKGCDASLLIDSTNSEKTAGPNGSVREFDLIDRIKAQLEAACPSTVSCADIVTLATRDSVALAGGPSYSIPTGRRDGRVSNNLDVTLPGPTISVSGAVSLFTNKGMNTFDAVALLGAHTVGQGNCGLFSDRITSFQGTGRPDPSMDPALVTSLRNTCRNSATAALDQSSPLRFDNQFFKQIRKRRGVLQVDQRLASDPQTRGIVARYANNNAFFKRQFVRAMVKMGAVDVLTGRNGEIRRNCRRFN

SEQ ID NO: 24862 - protein, 312 aa, Arabidopsis thaliana
  peptide (1)..(312): Ceres Seq. ID no. 12701675
  misc_feature (39)..(276): Pfam Name: Peroxidase Pfam Description: Peroxidase
  misc_feature (9)..(312): Homolog of NCBI NO: 7433068 NR Description: probable peroxidase (EC 1.11.1.7), cationic -
  misc_feature (24)..(312): Homolog of NCBI NO: 129808 NR Description: Cationic peroxidase 2 precursor (PNPC2)
  misc_feature (24)..(312): Homolog of NCBI NO: 1232069 NR Description: cationic peroxidase [Stylosanthes humilis]
  misc_feature (13)..(312): Homolog of NCBI NO: 15218665 NR Description: peroxidase, putative; protein id: At1g34510.1
  misc_feature (8)..(312): Homolog of NCBI NO: 7433094 NR Description: peroxidase homolog F20B18.120 - Arabidopsis
  misc_feature (8)..(312): Homolog of NCBI NO: 18416663 NR Description: peroxidase, putative
  misc_feature (1)..(312): Homolog of NCBI NO: 15228606 NR Description: peroxidase, putative
  misc_feature (1)..(312): Homolog of NCBI NO: 21593692 NR Description: putative peroxidase [Arabidopsis thaliana]
  misc_feature (1)..(312): Homolog of NCBI NO: 21593467 NR Description: peroxidase ATP13a [Arabidopsis thaliana]
  misc_feature (1)..(312): Homolog of NCBI NO: 15238030 NR Description: peroxidase, putative
MKGAKFSSLLVLFFIFPIAFAQLRVGFYSQSCPQAETIVRNLVRQRFGVTPTVTAALLRMHFHDCFVKGCDASLLIDSTNSEKTAGPNGSVREFDLIDRIKAQLEAACPSTVSCADIVTLATRDSVALAGGPSYSIPTGRRDGRVSNNLDVTLPGPTISVSGAVSLFTNKGMNTFDAVALLGAHTVGQGNCGLFSDRITSFQGTGRPDPSMDPALVTSLRNTCRNSATAALDQSSPLRFDNQFFKQIRKRRGVLQVDQRLASDPQTRGIVARYANNNAFFKRQFVRAMVKMGAVDVLTGRNGEIRRNCRRFN

SEQ ID NO: 24863 - DNA, 925 bp, Arabidopsis thaliana
  misc_feature (1)..(925): Ceres Seq. ID no. 12321898
  misc_feature: MA Experiment ID: 108434 Result: Up-regulated in Transcription
  misc_feature: MA Experiment 108434 PARAMETER Experiment Name: At_Root_Tips_cDNA_P Parameter: Tissue Value: Root Tips
  misc_feature: MA Experiment ID: 108461 Result: Down-regulated in Transcription
  misc_feature: MA Experiment 108461 PARAMETER Experiment Name: At_Germinating_Seeds_cDNA_P Parameter: Age (day) Value: 1 vs. 0
  misc_feature: MA Experiment 108461 PARAMETER Experiment Name: At_Germinating_Seeds_cDNA_P Parameter: Tissue Value: Germinating Seeds
  misc_feature: MA Experiment ID: 108462 Result: Down-regulated in Transcription
  misc_feature: MA Experiment 108462 PARAMETER Experiment Name: At_Germinating_Seeds_cDNA_P Parameter: Age (day) Value: 2 vs. 0
  misc_feature: MA Experiment 108462 PARAMETER Experiment Name: At_Germinating_Seeds_cDNA_P Parameter: Tissue Value: Germinating Seeds
  misc_feature: MA Experiment ID: 108463 Result: Down-regulated in Transcription
  misc_feature: MA Experiment 108463 PARAMETER Experiment Name: At_Germinating_Seeds_cDNA_P Parameter: Age (day) Value: 3 vs. 0
  misc_feature: MA Experiment 108463 PARAMETER Experiment Name: At_Germinating_Seeds_cDNA_P Parameter: Tissue Value: Germinating Seeds
  misc_feature: MA Experiment ID: 108464 Result: Down-regulated in Transcription
  misc_feature: MA Experiment 108464 PARAMETER Experiment Name: At_Germinating_Seeds_cDNA_P Parameter: Age (day) Value: 4 vs. 0
  misc_feature: MA Experiment 108464 PARAMETER Experiment Name: At_Germinating_Seeds_cDNA_P Parameter: Tissue Value: Germinating Seeds
  misc_feature: MA Experiment ID: 20000180 Result: Down-regulated in Transcription
  misc_feature: MA Experiment 20000180 PARAMETER Experiment Name: At_Germinating_Seeds_P Parameter: Age (hr) Value: 24 vs. 0
  misc_feature: MA Experiment 20000180 PARAMETER Experiment Name: At_Germinating_Seeds_P Parameter: Tissue Value: Germinating Seeds
  misc_feature: MA Experiment ID: 20001905 Result: Down-regulated in Transcription
  misc_feature: MA Experiment 20001905 PARAMETER Experiment Name: At_Drought_Reproduction_P Parameter: Age (day) Value: 40
  misc_feature: MA Experiment 20001905 PARAMETER Experiment Name: At_Drought_Reproduction_P Parameter: Organism Value: A. thaliana
  misc_feature: MA Experiment 20001905 PARAMETER Experiment Name: At_Drought_Reproduction_P Parameter: Plant Line Value: WS
  misc_feature: MA Experiment 20001905 PARAMETER Experiment Name: At_Drought_Reproduction_P Parameter: Timepoint (day) Value: 10
  misc_feature: MA Experiment 20001905 PARAMETER Experiment Name: At_Drought_Reproduction_P Parameter: Tissue Value: Rosettes
  misc_feature: MA Experiment 20001905 PARAMETER Experiment Name: At_Drought_Reproduction_P Parameter: Treatment Value: Drought vs. No Drought
actcacagaagaagagagaatcaatcaaatcaaatcaccatggctttagcttggtgcgttgtacgcaggtcagcatctaagtttgcttccgtttatggtggccgagtccgatctatctccgccgttgcgaaccgcgcctctctagctcgcaacccatcttcaattcgtccattcgtctctcgcgccttaaattactcgacggctattgatcgaattagctccgagcaaacgcttatccgagttattgactccgaaatcaactctgctttgcaatccgataatatcgattcggatgaagagatgactccaggaagctttccttttagaattgaagacaaacctggaaatcagaatgttacattgactagagactacaatggggaacatattaaagttgttgtaagcatgcctagtcttgtttcagatgaaaatgatgatgatgatgatgatgatgaaggtcctagtaatgaatcgagtattccactagttgtgactgttactaagaagagtggactcactctagagtttagctgtatggcttttcctgatgagattgctatagatgctttatctgtgaaacatcctggggactctttggaggatcaactggctaatgaagggcctgattttgaagacttggacgagaatctgaagaagacgttctacaagtttttggagatcagaggagtgaaagctagcacgacgaatttcctgcacgagtacatgacgaggaaagtgaaccgagagtactttttatggttgaagaatgttaaggagttcatggaacagtgaaacgttaggttgatagctaagtacctaagaatgagattgtgaggttcttttcttgtgttcattgttagctttcaaatgtagcacaatctttgagaatttatggttaagagtttccagttctgattcaacttgc

SEQ ID NO: 24864 - protein, 263 aa, Arabidopsis thaliana
  peptide (1)..(263): Ceres Seq. ID no. 12321899
  misc_feature (82)..(261): Pfam Name: Mitochondrial glycoprotein Pfam Description: Mitochondrial glycoprotein
  misc_feature (54)..(263): Homolog of NCBI NO: 15241669 NR Description: putative protein
  misc_feature (14)..(192): Homolog of NCBI NO: 7487698 NR Description: hypothetical protein At2g39790 [imported] -
  misc_feature (14)..(261): Homolog of NCBI NO: 34895730 NR Description: P0019D06.23 [Oryza sativa (japonica
  misc_feature (20)..(262): Homolog of NCBI NO: 15239320 NR Description: putative protein
  misc_feature (14)..(262): Homolog of NCBI NO: 18405162 NR Description: hypothetical protein; protein id: At2g39790.1
  misc_feature (25)..(263): Homolog of NCBI NO: 11357566 NR Description: hypothetical protein F1I16.10 - Arabidopsis
  misc_feature (14)..(263): Homolog of NCBI NO: 18410318 NR Description: Expressed protein
  misc_feature (23)..(263): Homolog of NCBI NO: 7487698 NR Description: hypothetical protein At2g39790 [imported] -
  misc_feature (14)..(263): Homolog of NCBI NO: 21593469 NR Description: unknown [Arabidopsis thaliana]
  misc_feature (14)..(263): Homolog of NCBI NO: 18405164 NR Description: Expressed protein
THRRRENQSNQITMALAWCVVRRSASKFASVYGGRVRSISAVANRASLARNPSSIRPFVSRALNYSTAIDRISSEQTLIRVIDSEINSALQSDNIDSDEEMTPGSFPFRIEDKPGNQNVTLTRDYNGEHIKVVVSMPSLVSDENDDDDDDDEGPSNESSIPLVVTVTKKSGLTLEFSCMAFPDEIAIDALSVKHPGDSLEDQLANEGPDFEDLDENLKKTFYKFLEIRGVKASTTNFLHEYMTRKVNREYFLWLKNVKEFMEQ

SEQ ID NO: 24865 - protein, 250 aa, Arabidopsis thaliana
  peptide (1)..(250): Ceres Seq. ID no. 12321900
  misc_feature (69)..(248): Pfam Name: Mitochondrial glycoprotein Pfam Description: Mitochondrial glycoprotein
  misc_feature (41)..(250): Homolog of NCBI NO: 15241669 NR Description: putative protein
  misc_feature (1)..(179): Homolog of NCBI NO: 7487698 NR Description: hypothetical protein At2g39790 [imported] -
  misc_feature (1)..(248): Homolog of NCBI NO: 34895730 NR Description: P0019D06.23 [Oryza sativa (japonica
  misc_feature (7)..(249): Homolog of NCBI NO: 15239320 NR Description: putative protein
  misc_feature (1)..(249): Homolog of NCBI NO: 18405162 NR Description: hypothetical protein; protein id: At2g39790.1
  misc_feature (12)..(250): Homolog of NCBI NO: 11357566 NR Description: hypothetical protein F1I16.10 - Arabidopsis
  misc_feature (1)..(250): Homolog of NCBI NO: 18410318 NR Description: Expressed protein
  misc_feature (10)..(250): Homolog of NCBI NO: 7487698 NR Description: hypothetical protein At2g39790 [imported] -
  misc_feature (1)..(250): Homolog of NCBI NO: 21593469 NR Description: unknown [Arabidopsis thaliana]
  misc_feature (1)..(250): Homolog of NCBI NO: 18405164 NR Description: Expressed protein
MALAWCVVRRSASKFASVYGGRVRSISAVANRASLARNPSSIRPFVSRALNYSTAIDRISSEQTLIRVIDSEINSALQSDNIDSDEEMTPGSFPFRIEDKPGNQNVTLTRDYNGEHIKVVVSMPSLVSDENDDDDDDDEGPSNESSIPLVVTVTKKSGLTLEFSCMAFPDEIAIDALSVKHPGDSLEDQLANEGPDFEDLDENLKKTFYKFLEIRGVKASTTNFLHEYMTRKVNREYFLWLKNVKEFMEQ

SEQ ID NO: 24866 - protein, 163 aa, Arabidopsis thaliana
  peptide (1)..(163): Ceres Seq. ID no. 12321901
  misc_feature (1)..(161): Pfam Name: Mitochondrial glycoprotein Pfam Description: Mitochondrial glycoprotein
  misc_feature (1)..(163): Homolog of NCBI NO: 15241669 NR Description: putative protein
  misc_feature (1)..(92): Homolog of NCBI NO: 7487698 NR Description: hypothetical protein At2g39790 [imported] -
  misc_feature (1)..(161): Homolog of NCBI NO: 34895730 NR Description: P0019D06.23 [Oryza sativa (japonica
  misc_feature (1)..(162): Homolog of NCBI NO: 15239320 NR Description: putative protein
  misc_feature (1)..(162): Homolog of NCBI NO: 18405162 NR Description: hypothetical protein; protein id: At2g39790.1
  misc_feature (1)..(163): Homolog of NCBI NO: 11357566 NR Description: hypothetical protein F1I16.10 - Arabidopsis
  misc_feature (1)..(163): Homolog of NCBI NO: 18410318 NR Description: Expressed protein
  misc_feature (1)..(163): Homolog of NCBI NO: 7487698 NR Description: hypothetical protein At2g39790 [imported] -
  misc_feature (1)..(163): Homolog of NCBI NO: 21593469 NR Description: unknown [Arabidopsis thaliana]
  misc_feature (1)..(163): Homolog of NCBI NO: 18405164 NR Description: Expressed protein
MTPGSFPFRIEDKPGNQNVTLTRDYNGEHIKVVVSMPSLVSDENDDDDDDDEGPSNESSIPLVVTVTKKSGLTLEFSCMAFPDEIAIDALSVKHPGDSLEDQLANEGPDFEDLDENLKKTFYKFLEIRGVKASTTNFLHEYMTRKVNREYFLWLKNVKEFMEQ

SEQ ID NO: 24867 - DNA, 1635 bp, Arabidopsis thaliana
  misc_feature (1)..(1635): Ceres Seq. ID no. 12336117
  misc_feature: MA Experiment ID: 108435 Result: Up-regulated in Transcription
  misc_feature: MA Experiment 108435 PARAMETER Experiment Name: At_stm_Mutants_cDNA_P Parameter: Plant Line Value: wt Landsburg vs stm
  misc_feature: MA Experiment 108435 PARAMETER Experiment Name: At_stm_Mutants_cDNA_P Parameter: Tissue Value: Shoot Apical Meristem Region
  misc_feature: MA Experiment ID: 108462 Result: Down-regulated in Transcription
  misc_feature: MA Experiment 108462 PARAMETER Experiment Name: At_Germinating_Seeds_cDNA_P Parameter: Age (day) Value: 2 vs. 0
  misc_feature: MA Experiment 108462 PARAMETER Experiment Name: At_Germinating_Seeds_cDNA_P Parameter: Tissue Value: Germinating Seeds
  misc_feature: MA Experiment ID: 108463 Result: Down-regulated in Transcription
  misc_feature: MA Experiment 108463 PARAMETER Experiment Name: At_Germinating_Seeds_cDNA_P Parameter: Age (day) Value: 3 vs. 0
  misc_feature: MA Experiment 108463 PARAMETER Experiment Name: At_Germinating_Seeds_cDNA_P Parameter: Tissue Value: Germinating Seeds
  misc_feature: MA Experiment ID: 108464 Result: Down-regulated in Transcription
  misc_feature: MA Experiment 108464 PARAMETER Experiment Name: At_Germinating_Seeds_cDNA_P Parameter: Age (day) Value: 4 vs. 0
  misc_feature: MA Experiment 108464 PARAMETER Experiment Name: At_Germinating_Seeds_cDNA_P Parameter: Tissue Value: Germinating Seeds
  misc_feature: MA Experiment ID: 108501 Result: Up-regulated in Transcription
  misc_feature: MA Experiment 108501 PARAMETER Experiment Name: At_ap2_floral_buds_cDNA_P Parameter: Plant Line Value: ap2 (Ler.)
  misc_feature: MA Experiment 108501 PARAMETER Experiment Name: At_ap2_floral_buds_cDNA_P Parameter: Tissue Value: Closed Flower
  misc_feature: MA Experiment ID: 108577 Result: Down-regulated in Transcription
  misc_feature: MA Experiment 108577 PARAMETER Experiment Name: At_42deg_Heat_cDNA_P Parameter: Temperature (deg C) Value: 42 vs. 22
  misc_feature: MA Experiment 108577 PARAMETER Experiment Name: At_42deg_Heat_cDNA_P Parameter: Timepoint (hr) Value: 6
  misc_feature: MA Experiment 108577 PARAMETER Experiment Name: At_42deg_Heat_cDNA_P Parameter: Tissue Value: Aerial
  misc_feature: MA Experiment ID: 108595 Result: Up-regulated in Transcription
  misc_feature: MA Experiment 108595 PARAMETER Experiment Name: At_Ler-pi_Ovule_cDNA_P Parameter: Plant Line Value: null
  misc_feature: MA Experiment ID: 20000113 Result: Down-regulated in Transcription
  misc_feature: MA Experiment 20000113 PARAMETER Experiment Name: At_42deg_Heat_cDNA_P Parameter: Temperature (deg C) Value: 42 vs. 22
  misc_feature: MA Experiment 20000113 PARAMETER Experiment Name: At_42deg_Heat_cDNA_P Parameter: Timepoint (hr) Value: 8
  misc_feature: MA Experiment 20000113 PARAMETER Experiment Name: At_42deg_Heat_cDNA_P Parameter: Tissue Value: Aerial
  misc_feature: MA Experiment ID: 20000264 Result: Up-regulated in Transcription
  misc_feature: MA Experiment 20000264 PARAMETER Experiment Name: At_Open_Flower_P Parameter: Age (day) Value: 21
  misc_feature: MA Experiment 20000264 PARAMETER Experiment Name: At_Open_Flower_P Parameter: Plant Line Value: WS
  misc_feature: MA Experiment 20000264 PARAMETER Experiment Name: At_Open_Flower_P Parameter: Tissue Value: Open Flower vs. Whole Plant
  misc_feature: MA Experiment ID: 20000286 Result: Up-regulated in Transcription
  misc_feature: MA Experiment 20000286 PARAMETER Experiment Name: At_Open_Flower_P Parameter: Age (day) Value: 21
  misc_feature: MA Experiment 20000286 PARAMETER Experiment Name: At_Open_Flower_P Parameter: Plant Line Value: WS
  misc_feature: MA Experiment 20000286 PARAMETER Experiment Name: At_Open_Flower_P Parameter: Tissue Value: Half Open vs. Whole Plant
  misc_feature: MA Experiment ID: 20000443 Result: Down-regulated in Transcription
  misc_feature: MA Experiment 20000443 PARAMETER Experiment Name: At_1uM_BR-BRZ__P Parameter: Tissue Value: Shoot Apices
  misc_feature: MA Experiment 20000443 PARAMETER Experiment Name: At_1uM_BR-BRZ__P Parameter: Treatment Value: 1uM BRZ vs. No Treatment
  misc_feature: MA Experiment ID: 20001911 Result: Down-regulated in Transcription
  misc_feature: MA Experiment 20001911 PARAMETER Experiment Name: At_Drought_Reproduction_P Parameter: Age (day) Value: 40
  misc_feature: MA Experiment 20001911 PARAMETER Experiment Name: At_Drought_Reproduction_P Parameter: Organism Value: A. thaliana
  misc_feature: MA Experiment 20001911 PARAMETER Experiment Name: At_Drought_Reproduction_P Parameter: Plant Line Value: WS
  misc_feature: MA Experiment 20001911 PARAMETER Experiment Name: At_Drought_Reproduction_P Parameter: Timepoint (day) Value: 10
  misc_feature: MA Experiment 20001911 PARAMETER Experiment Name: At_Drought_Reproduction_P Parameter: Tissue Value: Flowers
  misc_feature: MA Experiment 20001911 PARAMETER Experiment Name: At_Drought_Reproduction_P Parameter: Treatment Value: Drought vs. No Drought
atctgctcttcatttcgataaataattgaaaagaacaaaagaaacaaaagagacgagaaagagttttggcgatgaagaagaacgcactttggctactgtgcattctggtgttaccggcgatagcctgtggtaggaaaccggagaagaaggtaacaatttcatcctctgggaggaaggaagatgaccttgtaaccggtttgcccggccaaccaccggttaacttcaaacactacgccggttacgtgaatctggggcctgaacagaagcaaaaggcacttttctattggttcttcgaagctcaacaaaactcttctcgtcgtcctctcgtcctttggctcaatggaggaccgggttgctcatcaatagcctatggagctgcacaagaactaggcccttttcttgttcacgacaacggtggcaaacttacctacaatcatttctcttggaacaaagaggccaatatgttgttcttggaagcgccggttggggttgggttctcgtataccaataactcaatggatcttcaaaagcttggagatgaagttactgcatcggactctcttgctttcctgatcaactggttcatgaaattccccgagttccgatccagcgagttctacatctctggcgagagttacgccggtcactatgttcctcagctcgcggaggtaatttacgacaggaacaagaaggttacgaaagactctagcattaatctcaagggattcatgatagggaacgcggtgatcaatgaggcaacagacatggcaggactagtggactacgcatggagccacgctataatatcggacgaggtccacaccagcatccatggctcgtgcagttttgaggaagataccaccaacaagaccgaacaatgctacaacaatttcaaagggttcatggatgcttacaatgatatcgatatatacagtatctacactcccgtttgcctctcctctttgttgtcatcttctccaagaaaacctaaaatcgtcgtgtctcctcgtctccttacttttgacgatttgtgggacaagtttccggccgggtacgatccatgcactgaaagttatgccgagaattactttaaccggaaagatgtgcaggttgcactccatgcgaacgtcaccaaccttccttatccgtactctccttgcagcggagtaataaagagatggagtgatgctccatccaccatgattcccatcatacaaaagcttttgacgggtggcctccgtatctggatctatagtggagatacggatgggagagttccggtaacatctacacgttatagcataaaaaagatgggacttaaggtcgagtcaccgtggaggtcatggttccacaagagtcaagtagctggatgggttgagacttatgccggtggactaaattttgtcacggtgagaggagccggtcaccaggttccggccttggctccggcgcaatctctcacattattctctcacttcatttcttctgtccccttgccttcaaaacggttctgatatcagtaccgtcaagtcatgatggcaagttgttgttgttgttttggaaccttcgtttagcactctcccaattgattttatgaatttcaattgatgaataaagattcttcaacttttagct

SEQ ID NO: 24868 - protein, 480 aa, Arabidopsis thaliana
  peptide (1)..(480): Ceres Seq. ID no. 12336118
  misc_feature (9)..(480): Homolog of NCBI NO: 37536528 NR Description: putative serine carboxypeptidase
  misc_feature (30)..(476): Homolog of NCBI NO: 15234795 NR Description: SERINE CARBOXYPEPTIDASE II-like protein
  misc_feature (30)..(476): Homolog of NCBI NO: 13877871 NR Description: putative serine carboxypeptidase II [Arabidopsis
  misc_feature (329)..(479): Homolog of NCBI NO: 11967861 NR Description: putative serine carboxypeptidase [Pisum sativum]
  misc_feature (30)..(312): Homolog of NCBI NO: 11967861 NR Description: putative serine carboxypeptidase [Pisum sativum]
  misc_feature (327)..(479): Homolog of NCBI NO: 15220282 NR Description: Serine carboxypeptidase isolog; protein id:
  misc_feature (4)..(291): Homolog of NCBI NO: 15220282 NR Description: Serine carboxypeptidase isolog; protein id:
  misc_feature (31)..(417): Homolog of NCBI NO: 38344436 NR Description: OSJNBa0038O10.8 [Oryza sativa (japonica
  misc_feature (38)..(480): Homolog of NCBI NO: 10177810 NR Description: serine carboxypeptidase II-like protein
  misc_feature (1)..(480): Homolog of NCBI NO: 15241571 NR Description: serine-type carboxypeptidase II-like protein
  misc_feature (9)..(480): Homolog of NCBI NO: 37536528 NR Description: putative serine carboxypeptidase
  misc_feature (30)..(476): Homolog of NCBI NO: 15234795 NR Description: SERINE CARBOXYPEPTIDASE II-like protein
  misc_feature (30)..(476): Homolog of NCBI NO: 13877871 NR Description: putative serine carboxypeptidase II [Arabidopsis
  misc_feature (329)..(479): Homolog of NCBI NO: 11967861 NR Description: putative serine carboxypeptidase [Pisum sativum]
  misc_feature (30)..(312): Homolog of NCBI NO: 11967861 NR Description: putative serine carboxypeptidase [Pisum sativum]
  misc_feature (327)..(479): Homolog of NCBI NO: 15220282 NR Description: Serine carboxypeptidase isolog; protein id:
  misc_feature (4)..(291): Homolog of NCBI NO: 15220282 NR Description: Serine carboxypeptidase isolog; protein id:
  misc_feature (31)..(417): Homolog of NCBI NO: 38344436 NR Description: OSJNBa0038O10.8 [Oryza sativa (japonica
  misc_feature (38)..(480): Homolog of NCBI NO: 10177810 NR Description: serine carboxypeptidase II-like protein
  misc_feature (1)..(480): Homolog of NCBI NO: 15241571 NR Description: serine-type carboxypeptidase II-like protein
MKKNALWLLCILVLPAIACGRKPEKKVTISSSGRKEDDLVTGLPGQPPVNFKHYAGYVNLGPEQKQKALFYWFFEAQQNSSRRPLVLWLNGGPGCSSIAYGAAQELGPFLVHDNGGKLTYNHFSWNKEANMLFLEAPVGVGFSYTNNSMDLQKLGDEVTASDSLAFLINWFMKFPEFRSSEFYISGESYAGHYVPQLAEVIYDRNKKVTKDSSINLKGFMIGNAVINEATDMAGLVDYAWSHAIISDEVHTSIHGSCSFEEDTTNKTEQCYNNFKGFMDAYNDIDIYSIYTPVCLSSLLSSSPRKPKIVVSPRLLTFDDLWDKFPAGYDPCTESYAENYFNRKDVQVALHANVTNLPYPYSPCSGVIKRWSDAPSTMIPIIQKLLTGGLRIWIYSGDTDGRVPVTSTRYSIKKMGLKVESPWRSWFHKSQVAGWVETYAGGLNFVTVRGAGHQVPALAPAQSLTLFSHFISSVPLPSKRF

SEQ ID NO: 24869 - protein, 350 aa, Arabidopsis thaliana
  peptide (1)..(350): Ceres Seq. ID no. 12336119
  misc_feature (199)..(349): Homolog of NCBI NO: 11967861 NR Description: putative serine carboxypeptidase [Pisum sativum]
  misc_feature (1)..(182): Homolog of NCBI NO: 11967861 NR Description: putative serine carboxypeptidase [Pisum sativum]
  misc_feature (197)..(349): Homolog of NCBI NO: 15220282 NR Description: Serine carboxypeptidase isolog; protein id:
  misc_feature (1)..(161): Homolog of NCBI NO: 15220282 NR Description: Serine carboxypeptidase isolog; protein id:
  misc_feature (1)..(287): Homolog of NCBI NO: 38344436 NR Description: OSJNBa0038O10.8 [Oryza sativa (japonica
  misc_feature (1)..(350): Homolog of NCBI NO: 10177810 NR Description: serine carboxypeptidase II-like protein
  misc_feature (1)..(350): Homolog of NCBI NO: 15241571 NR Description: serine-type carboxypeptidase II-like protein
  misc_feature (1)..(350): Homolog of NCBI NO: 37536528 NR Description: putative serine carboxypeptidase
  misc_feature (1)..(346): Homolog of NCBI NO: 15234795 NR Description: SERINE CARBOXYPEPTIDASE II-like protein
  misc_feature (1)..(346): Homolog of NCBI NO: 13877871 NR Description: putative serine carboxypeptidase II [Arabidopsis
  misc_feature (1)..(350): Homolog of NCBI NO: 37536528 NR Description: putative serine carboxypeptidase
  misc_feature (1)..(346): Homolog of NCBI NO: 15234795 NR Description: SERINE CARBOXYPEPTIDASE II-like protein
  misc_feature (1)..(346): Homolog of NCBI NO: 13877871 NR Description: putative serine carboxypeptidase II [Arabidopsis
  misc_feature (199)..(349): Homolog of NCBI NO: 11967861 NR Description: putative serine carboxypeptidase [Pisum sativum]
  misc_feature (1)..(182): Homolog of NCBI NO: 11967861 NR Description: putative serine carboxypeptidase [Pisum sativum]
  misc_feature (197)..(349): Homolog of NCBI NO: 15220282 NR Description: Serine carboxypeptidase isolog; protein id:
  misc_feature (1)..(161): Homolog of NCBI NO: 15220282 NR Description: Serine carboxypeptidase isolog; protein id:
  misc_feature (1)..(287): Homolog of NCBI NO: 38344436 NR Description: OSJNBa0038O10.8 [Oryza sativa (japonica
  misc_feature (1)..(350): Homolog of NCBI NO: 10177810 NR Description: serine carboxypeptidase II-like protein
  misc_feature (1)..(350): Homolog of NCBI NO: 15241571 NR Description: serine-type carboxypeptidase II-like protein
MLFLEAPVGVGFSYTNNSMDLQKLGDEVTASDSLAFLINWFMKFPEFRSSEFYISGESYAGHYVPQLAEVIYDRNKKVTKDSSINLKGFMIGNAVINEATDMAGLVDYAWSHAIISDEVHTSIHGSCSFEEDTTNKTEQCYNNFKGFMDAYNDIDIYSIYTPVCLSSLLSSSPRKPKIVVSPRLLTFDDLWDKFPAGYDPCTESYAENYFNRKDVQVALHANVTNLPYPYSPCSGVIKRWSDAPSTMIPIIQKLLTGGLRIWIYSGDTDGRVPVTSTRYSIKKMGLKVESPWRSWFHKSQVAGWVETYAGGLNFVTVRGAGHQVPALAPAQSLTLFSHFISSVPLPSKRF

SEQ ID NO: 24870 - protein, 332 aa, Arabidopsis thaliana
  peptide (1)..(332): Ceres Seq. ID no. 12336120
  misc_feature (1)..(332): Homolog of NCBI NO: 37536528 NR Description: putative serine carboxypeptidase
  misc_feature (1)..(328): Homolog of NCBI NO: 15234795 NR Description: SERINE CARBOXYPEPTIDASE II-like protein
  misc_feature (1)..(328): Homolog of NCBI NO: 13877871 NR Description: putative serine carboxypeptidase II [Arabidopsis
  misc_feature (181)..(331): Homolog of NCBI NO: 11967861 NR Description: putative serine carboxypeptidase [Pisum sativum]
  misc_feature (1)..(164): Homolog of NCBI NO: 11967861 NR Description: putative serine carboxypeptidase [Pisum sativum]
  misc_feature (179)..(331): Homolog of NCBI NO: 15220282 NR Description: Serine carboxypeptidase isolog; protein id:
  misc_feature (1)..(143): Homolog of NCBI NO: 15220282 NR Description: Serine carboxypeptidase isolog; protein id:
  misc_feature (1)..(269): Homolog of NCBI NO: 38344436 NR Description: OSJNBa0038O10.8 [Oryza sativa (japonica
  misc_feature (1)..(332): Homolog of NCBI NO: 10177810 NR Description: serine carboxypeptidase II-like protein
  misc_feature (1)..(332): Homolog of NCBI NO: 15241571 NR Description: serine-type carboxypeptidase II-like protein
  misc_feature (1)..(332): Homolog of NCBI NO: 37536528 NR Description: putative serine carboxypeptidase
  misc_feature (1)..(328): Homolog of NCBI NO: 15234795 NR Description: SERINE CARBOXYPEPTIDASE II-like protein
  misc_feature (1)..(328): Homolog of NCBI NO: 13877871 NR Description: putative serine carboxypeptidase II [Arabidopsis
  misc_feature (181)..(331): Homolog of NCBI NO: 11967861 NR Description: putative serine carboxypeptidase [Pisum sativum]
  misc_feature (1)..(164): Homolog of NCBI NO: 11967861 NR Description: putative serine carboxypeptidase [Pisum sativum]
  misc_feature (179)..(331): Homolog of NCBI NO: 15220282 NR Description: Serine carboxypeptidase isolog; protein id:
  misc_feature (1)..(143): Homolog of NCBI NO: 15220282 NR Description: Serine carboxypeptidase isolog; protein id:
  misc_feature (1)..(269): Homolog of NCBI NO: 38344436 NR Description: OSJNBa0038O10.8 [Oryza sativa (japonica
  misc_feature (1)..(332): Homolog of NCBI NO: 10177810 NR Description: serine carboxypeptidase II-like protein
  misc_feature (1)..(332): Homolog of NCBI NO: 15241571 NR Description: serine-type carboxypeptidase II-like protein
MDLQKLGDEVTASDSLAFLINWFMKFPEFRSSEFYISGESYAGHYVPQLAEVIYDRNKKVTKDSSINLKGFMIGNAVINEATDMAGLVDYAWSHAIISDEVHTSIHGSCSFEEDTTNKTEQCYNNFKGFMDAYNDIDIYSIYTPVCLSSLLSSSPRKPKIVVSPRLLTFDDLWDKFPAGYDPCTESYAENYFNRKDVQVALHANVTNLPYPYSPCSGVIKRWSDAPSTMIPIIQKLLTGGLRIWIYSGDTDGRVPVTSTRYSIKKMGLKVESPWRSWFHKSQVAGWVETYAGGLNFVTVRGAGHQVPALAPAQSLTLFSHFISSVPLPSKRF

SEQ ID NO: 24871 - DNA, 2824 bp, Arabidopsis thaliana
  misc_feature (1)..(2824): Ceres Seq. ID no. 12321906
  misc_feature: MA Experiment ID: 108577 Result: Down-regulated in Transcription
  misc_feature: MA Experiment 108577 PARAMETER Experiment Name: At_42deg_Heat_cDNA_P Parameter: Temperature (deg C) Value: 42 vs. 22
  misc_feature: MA Experiment 108577 PARAMETER Experiment Name: At_42deg_Heat_cDNA_P Parameter: Timepoint (hr) Value: 6
  misc_feature: MA Experiment 108577 PARAMETER Experiment Name: At_42deg_Heat_cDNA_P Parameter: Tissue Value: Aerial
  misc_feature: MA Experiment ID: 20000112 Result: Down-regulated in Transcription
  misc_feature: MA Experiment 20000112 PARAMETER Experiment Name: At_42deg_Heat_cDNA_P Parameter: Temperature (deg C) Value: 42 vs. 22
  misc_feature: MA Experiment 20000112 PARAMETER Experiment Name: At_42deg_Heat_cDNA_P Parameter: Timepoint (hr) Value: 2
  misc_feature: MA Experiment 20000112 PARAMETER Experiment Name: At_42deg_Heat_cDNA_P Parameter: Tissue Value: Aerial
  misc_feature: MA Experiment ID: 20000113 Result: Down-regulated in Transcription
  misc_feature: MA Experiment 20000113 PARAMETER Experiment Name: At_42deg_Heat_cDNA_P Parameter: Temperature (deg C) Value: 42 vs. 22
  misc_feature: MA Experiment 20000113 PARAMETER Experiment Name: At_42deg_Heat_cDNA_P Parameter: Timepoint (hr) Value: 8
  misc_feature: MA Experiment 20000113 PARAMETER Experiment Name: At_42deg_Heat_cDNA_P Parameter: Tissue Value: Aerial
  misc_feature: MA Experiment ID: 20000144 Result: Down-regulated in Transcription
  misc_feature: MA Experiment 20000144 PARAMETER Experiment Name: At_42deg_Heat_cDNA_P Parameter: Temperature (deg C) Value: 42 vs. 22
  misc_feature: MA Experiment 20000144 PARAMETER Experiment Name: At_42deg_Heat_cDNA_P Parameter: Timepoint (hr) Value: 1
  misc_feature: MA Experiment 20000144 PARAMETER Experiment Name: At_42deg_Heat_cDNA_P Parameter: Tissue Value: Aerial
  misc_feature: MA Experiment ID: 20001911 Result: Down-regulated in Transcription
  misc_feature: MA Experiment 20001911 PARAMETER Experiment Name: At_Drought_Reproduction_P Parameter: Age (day) Value: 40
  misc_feature: MA Experiment 20001911 PARAMETER Experiment Name: At_Drought_Reproduction_P Parameter: Organism Value: A. thaliana
  misc_feature: MA Experiment 20001911 PARAMETER Experiment Name: At_Drought_Reproduction_P Parameter: Plant Line Value: WS
  misc_feature: MA Experiment 20001911 PARAMETER Experiment Name: At_Drought_Reproduction_P Parameter: Timepoint (day) Value: 10
  misc_feature: MA Experiment 20001911 PARAMETER Experiment Name: At_Drought_Reproduction_P Parameter: Tissue Value: Flowers
  misc_feature: MA Experiment 20001911 PARAMETER Experiment Name: At_Drought_Reproduction_P Parameter: Treatment Value: Drought vs. No Drought
atgggtattgaaaagtttgaaactttcatcttgatttcaacgatttcgatcttgctttgtatctgccatggattcacacctgtggataattacttgatcaactgtggatcaccaaccaatggaacactaatgggtcgaatctttctgtctgataagctctcttcgaagttacttacttcgtccaaagagattctcgcaagcgtaggcggtaactctggctcagacatttaccacacggcaagagtcttcaccgaagtctctagctacaaattctcggtcactcgtggtcgtcattgggttcgtctctatttcaatccttttgactaccaaaacttcaaaatgggttcagctaaattcgcggtttcttcacaaagtcatgtccttttgagtgatttcactgttacgagttcaaaagttgtcaaagagtactctttgaacgtgactactaatgatttagtgctcacctttactccctctagtggttcgtttgcgtttgtgaatgctatcgaggttatatcgattccagatactttgattactggtagtccaaggtttgtaggcaaccctgcgcagtttccggatatgtcaatgcaaggtcttgaaaccattcatagagtcaacatgggtggtccgcttgttgcgtctaacaacgatacgttaacgagaacttgggtgcctgactcggagtttctgcttgagaagaatttagctaagagtatgtctaagttttcaactgttaactttgttccaggttatgcaacagaggactctgctccaagaactgtctatggtagttgtactgagatgaattccgctgataacccgaatagcattttcaatgtgacttgggagttcgatgttgacccgggttttcagtactatttccgctttcatttctgcgatatcgttagcttgtcgttaaaccagctatatttcaatctttatgttgactcaatggttgctgctacggatattgatcttagcactcttgtggataacactttggctggtgcatattcgatggactttgtcacgcagacgccaaagggtagtaataaagtccgtgtgagcatcggtccgtcgactgttcacaccgattatccaaacgcgattgtgaatggattggagattatgaagatgaataactctaagggtcagttaagcactgggacatttgtgcctggtagtagttcaagcagtaagagtaatctcgggttgattgtaggttcagccattggttcgttgctcgcggtagtcttcttgggaagttgctttgtgttgtataagaagcggaaacgtggccaagacggtcattcaaagacttggatgccgttttcgataaatggaacttcgatgggaagcaaatactccaatggaactacgcttacaagtataactaccaatgccaattaccgtattccctttgcagcggttaaagacgctacaaataactttgacgagagccgcaacatcggtgtaggcggttttggtaaagtctacaaaggagagcttaatgacggtacaaaggtagctgtgaaaagagggaacccaaaatctcagcaagggcttgcggaattcaggacagaaatcgagatgttatctcagtttcgtcaccgccatttggtttctctgatcggttattgtgacgagaacaatgagatgatactaatttacgagtatatggagaatggaacggtaaagagtcatctttatggctcaggtctacctagcttgacttggaaacaacggcttgagatctgcattggtgcagctagaggcttgcattaccttcacacgggtgactcgaaaccggtcattcacagagacgtgaaatctgcaaacatattgcttgacgagaacttcatggctaaagttgcagactttggactgtccaagactggacccgagcttgatcagactcatgtaagtactgctgtcaaaggaagttttggttatcttgaccccgagtacttcagaaggcaacagctcacagataaatccgatgtttattccttcggagttgttctcttcgaggttttatgtgctagacctgttatagacccaacacttccaagagagatggtgaatcttgcagaatgggctatgaaatggcagaagaaagggcaactggatcagatcatcgaccagtcgcttcgcggaaatatcagacccgattcgttaaggaaatttgcggaaacaggtgagaaatgtttagcggattatggagttgataggccatctatgggagatgtgttgtggaatcttgaatacgctctgcagcttcaagaagcagtcattgatggtgaaccagaagataatagcacgaatatgattggtgaattacctccgcagatcaataatttcagtcagggagacactagtgttaacgttccgggcacagcggggcgattcgaggaatctagtattgatgatctctctggcgtttccatgagtaaagtattctcacaactggtgaaatctgaaggaagatagtgaaagatttgagcaatgcagtgccaagaaaatccaaagatctgatctttttgatagaaacagagcaagcaaagtatgtaaccaggaaaaaagcatcaggttattttcagataggatctttgtctttgcttgatctgtttctactgcagatttttcatcagtgattaaacggttactttgaaaatttaccttattttgttcctctctcccttatcctgagtttgtattttattgatgttcattttgaaattgtctgaaatttgtttgttctttttactatatggatgtttaacactcttgttgtttcaattgtattgtaagtttagaagtt

SEQ ID NO: 24872 - protein, 830 aa, Arabidopsis thaliana
  peptide (1)..(830): Ceres Seq. ID no. 12321907
  misc_feature (25)..(830): Homolog of NCBI NO: 25553554 NR Description: OSJNBa0038F22.1 [Oryza sativa (japonica
  misc_feature (11)..(830): Homolog of NCBI NO: 15237872 NR Description: receptor-protein kinase-like protein; protein id:
  misc_feature (796)..(830): Homolog of NCBI NO: 15225078 NR Description: putative protein kinase
  misc_feature (18)..(771): Homolog of NCBI NO: 15225078 NR Description: putative protein kinase
  misc_feature (70)..(767): Homolog of NCBI NO: 24796812 NR Description: putative receptor-like protein kinase
  misc_feature (24)..(830): Homolog of NCBI NO: 15226565 NR Description: putative protein kinase; protein id: At2g21480.1
  misc_feature (24)..(830): Homolog of NCBI NO: 15234944 NR Description: putative receptor-like protein kinase; protein
  misc_feature (25)..(451): Homolog of NCBI NO: 15239630 NR Description: receptor-protein kinase-like protein; protein id:
  misc_feature (385)..(830): Homolog of NCBI NO: 15239630 NR Description: receptor-protein kinase-like protein; protein id:
  misc_feature (319)..(830): Homolog of NCBI NO: 11346432 NR Description: receptor-like protein kinase homolog -
MGIEKFETFILISTISILLCICHGFTPVDNYLINCGSPTNGTLMGRIFLSDKLSSKLLTSSKEILASVGGNSGSDIYHTARVFTEVSSYKFSVTRGRHWVRLYFNPFDYQNFKMGSAKFAVSSQSHVLLSDFTVTSSKVVKEYSLNVTTNDLVLTFTPSSGSFAFVNAIEVISIPDTLITGSPRFVGNPAQFPDMSMQGLETIHRVNMGGPLVASNNDTLTRTWVPDSEFLLEKNLAKSMSKFSTVNFVPGYATEDSAPRTVYGSCTEMNSADNPNSIFNVTWEFDVDPGFQYYFRFHFCDIVSLSLNQLYFNLYVDSMVAATDIDLSTLVDNTLAGAYSMDFVTQTPKGSNKVRVSIGPSTVHTDYPNAIVNGLEIMKMNNSKGQLSTGTFVPGSSSSSKSNLGLIVGSAIGSLLAVVFLGSCFVLYKKRKRGQDGHSKTWMPFSINGTSMGSKYSNGTTLTSITTNANYRIPFAAVKDATNNFDESRNIGVGGFGKVYKGELNDGTKVAVKRGNPKSQQGLAEFRTEIEMLSQFRHRHLVSLIGYCDENNEMILIYEYMENGTVKSHLYGSGLPSLTWKQRLEICIGAARGLHYLHTGDSKPVIHRDVKSANILLDENFMAKVADFGLSKTGPELDQTHVSTAVKGSFGYLDPEYFRRQQLTDKSDVYSFGVVLFEVLCARPVIDPTLPREMVNLAEWAMKWQKKGQLDQIIDQSLRGNIRPDSLRKFAETGEKCLADYGVDRPSMGDVLWNLEYALQLQEAVIDGEPEDNSTNMIGELPPQINNFSQGDTSVNVPGTAGRFEESSIDDLSGVSMSKVFSQLVKSEGR

SEQ ID NO: 24873 - protein, 787 aa, Arabidopsis thaliana
  peptide (1)..(787): Ceres Seq. ID no. 12321908
  misc_feature (1)..(787): Homolog of NCBI NO: 25553554 NR Description: OSJNBa0038F22.1 [Oryza sativa (japonica
  misc_feature (1)..(787): Homolog of NCBI NO: 15237872 NR Description: receptor-protein kinase-like protein; protein id:
  misc_feature (753)..(787): Homolog of NCBI NO: 15225078 NR Description: putative protein kinase
  misc_feature (1)..(728): Homolog of NCBI NO: 15225078 NR Description: putative protein kinase
  misc_feature (27)..(724): Homolog of NCBI NO: 24796812 NR Description: putative receptor-like protein kinase
  misc_feature (1)..(787): Homolog of NCBI NO: 15226565 NR Description: putative protein kinase; protein id: At2g21480.1
  misc_feature (1)..(787): Homolog of NCBI NO: 15234944 NR Description: putative receptor-like protein kinase; protein
  misc_feature (1)..(408): Homolog of NCBI NO: 15239630 NR Description: receptor-protein kinase-like protein; protein id:
  misc_feature (342)..(787): Homolog of NCBI NO: 15239630 NR Description: receptor-protein kinase-like protein; protein id:
  misc_feature (276)..(787): Homolog of NCBI NO: 11346432 NR Description: receptor-like protein kinase homolog -
MGRIFLSDKLSSKLLTSSKEILASVGGNSGSDIYHTARVFTEVSSYKFSVTRGRHWVRLYFNPFDYQNFKMGSAKFAVSSQSHVLLSDFTVTSSKVVKEYSLNVTTNDLVLTFTPSSGSFAFVNAIEVISIPDTLITGSPRFVGNPAQFPDMSMQGLETIHRVNMGGPLVASNNDTLTRTWVPDSEFLLEKNLAKSMSKFSTVNFVPGYATEDSAPRTVYGSCTEMNSADNPNSIFNVTWEFDVDPGFQYYFRFHFCDIVSLSLNQLYFNLYVDSMVAATDIDLSTLVDNTLAGAYSMDFVTQTPKGSNKVRVSIGPSTVHTDYPNAIVNGLEIMKMNNSKGQLSTGTFVPGSSSSSKSNLGLIVGSAIGSLLAVVFLGSCFVLYKKRKRGQDGHSKTWMPFSINGTSMGSKYSNGTTLTSITTNANYRIPFAAVKDATNNFDESRNIGVGGFGKVYKGELNDGTKVAVKRGNPKSQQGLAEFRTEIEMLSQFRHRHLVSLIGYCDENNEMILIYEYMENGTVKSHLYGSGLPSLTWKQRLEICIGAARGLHYLHTGDSKPVIHRDVKSANILLDENFMAKVADFGLSKTGPELDQTHVSTAVKGSFGYLDPEYFRRQQLTDKSDVYSFGVVLFEVLCARPVIDPTLPREMVNLAEWAMKWQKKGQLDQIIDQSLRGNIRPDSLRKFAETGEKCLADYGVDRPSMGDVLWNLEYALQLQEAVIDGEPEDNSTNMIGELPPQINNFSQGDTSVNVPGTAGRFEESSIDDLSGVSMSKVFSQLVKSEGR

SEQ ID NO: 24874 - protein, 717 aa, Arabidopsis thaliana
  peptide (1)..(717): Ceres Seq. ID no. 12321909
  misc_feature (1)..(717): Homolog of NCBI NO: 25553554 NR Description: OSJNBa0038F22.1 [Oryza sativa (japonica
  misc_feature (1)..(717): Homolog of NCBI NO: 15237872 NR Description: receptor-protein kinase-like protein; protein id:
  misc_feature (683)..(717): Homolog of NCBI NO: 15225078 NR Description: putative protein kinase
  misc_feature (1)..(658): Homolog of NCBI NO: 15225078 NR Description: putative protein kinase
  misc_feature (1)..(654): Homolog of NCBI NO: 24796812 NR Description: putative receptor-like protein kinase
  misc_feature (1)..(717): Homolog of NCBI NO: 15226565 NR Description: putative protein kinase; protein id: At2g21480.1
  misc_feature (1)..(717): Homolog of NCBI NO: 15234944 NR Description: putative receptor-like protein kinase; protein
  misc_feature (1)..(338): Homolog of NCBI NO: 15239630 NR Description: receptor-protein kinase-like protein; protein id:
  misc_feature (272)..(717): Homolog of NCBI NO: 15239630 NR Description: receptor-protein kinase-like protein; protein id:
  misc_feature (206)..(717): Homolog of NCBI NO: 11346432 NR Description: receptor-like protein kinase homolog -
MGSAKFAVSSQSHVLLSDFTVTSSKVVKEYSLNVTTNDLVLTFTPSSGSFAFVNAIEVISIPDTLITGSPRFVGNPAQFPDMSMQGLETIHRVNMGGPLVASNNDTLTRTWVPDSEFLLEKNLAKSMSKFSTVNFVPGYATEDSAPRTVYGSCTEMNSADNPNSIFNVTWEFDVDPGFQYYFRFHFCDIVSLSLNQLYFNLYVDSMVAATDIDLSTLVDNTLAGAYSMDFVTQTPKGSNKVRVSIGPSTVHTDYPNAIVNGLEIMKMNNSKGQLSTGTFVPGSSSSSKSNLGLIVGSAIGSLLAVVFLGSCFVLYKKRKRGQDGHSKTWMPFSINGTSMGSKYSNGTTLTSITTNANYRIPFAAVKDATNNFDESRNIGVGGFGKVYKGELNDGTKVAVKRGNPKSQQGLAEFRTEIEMLSQFRHRHLVSLIGYCDENNEMILIYEYMENGTVKSHLYGSGLPSLTWKQRLEICIGAARGLHYLHTGDSKPVIHRDVKSANILLDENFMAKVADFGLSKTGPELDQTHVSTAVKGSFGYLDPEYFRRQQLTDKSDVYSFGVVLFEVLCARPVIDPTLPREMVNLAEWAMKWQKKGQLDQIIDQSLRGNIRPDSLRKFAETGEKCLADYGVDRPSMGDVLWNLEYALQLQEAVIDGEPEDNSTNMIGELPPQINNFSQGDTSVNVPGTAGRFEESSIDDLSGVSMSKVFSQLVKSEGR

SEQ ID NO: 24875 - DNA, 760 bp, Arabidopsis thaliana
  misc_feature (1)..(760): Ceres Seq. ID no. 12385459
  misc_feature: MA Experiment ID: 108461 Result: Down-regulated in Transcription
  misc_feature: MA Experiment 108461 PARAMETER Experiment Name: At_Germinating_Seeds_cDNA_P Parameter: Age (day) Value: 1 vs. 0
  misc_feature: MA Experiment 108461 PARAMETER Experiment Name: At_Germinating_Seeds_cDNA_P Parameter: Tissue Value: Germinating Seeds
  misc_feature: MA Experiment ID: 108462 Result: Down-regulated in Transcription
  misc_feature: MA Experiment 108462 PARAMETER Experiment Name: At_Germinating_Seeds_cDNA_P Parameter: Age (day) Value: 2 vs. 0
  misc_feature: MA Experiment 108462 PARAMETER Experiment Name: At_Germinating_Seeds_cDNA_P Parameter: Tissue Value: Germinating Seeds
  misc_feature: MA Experiment ID: 108463 Result: Down-regulated in Transcription
  misc_feature: MA Experiment 108463 PARAMETER Experiment Name: At_Germinating_Seeds_cDNA_P Parameter: Age (day) Value: 3 vs. 0
  misc_feature: MA Experiment 108463 PARAMETER Experiment Name: At_Germinating_Seeds_cDNA_P Parameter: Tissue Value: Germinating Seeds
  misc_feature: MA Experiment ID: 108464 Result: Down-regulated in Transcription
  misc_feature: MA Experiment 108464 PARAMETER Experiment Name: At_Germinating_Seeds_cDNA_P Parameter: Age (day) Value: 4 vs. 0
  misc_feature: MA Experiment 108464 PARAMETER Experiment Name: At_Germinating_Seeds_cDNA_P Parameter: Tissue Value: Germinating Seeds
atttcccgattcctcgccgccgttcatcaatctctccgtcgtgtttctgccactagctctccaccaaactttctctctcgcattagttgtttagggataaacatggcaggagaaggtgaagaagatgtacctagagatgctaagattgtgaaatctctgcttaagtcgatgggtgtagaagactacgagcctcgtgtgatacatcagtttctggagttatggtaccggtatgtggtcgaagtgttgacagatgctcaggtttactcagagcatgctagcaaacccaacattgactgtgatgatgtgaagctcgctattcaatccaaagttaatttcagcttctcacagcctcctccaagagaggttctgcttgagcttgctgcaagtaggaacaagatacctctgccaaaatcgatagcaggacccggtgttccactcccacctgaacaggacacattgctgagcccaaattatcagctcgtgataccgaagaagtcggtttcaacagaacctgaagaaaccgaggacgatgaagaaatgacagatcctggacagtcctctcaagaacaacaacagcagcaacaacaaacctcagaccttccaagccaaactcctcaaagggtctctttcccactctctagacgacccaaataagtacccaaataagtagatagaccaaaaaatctataatatttatgtatcaacaagtagaaatgtaacacaatcaaaaattaatgaccagagccagtttttatggacc

SEQ ID NO: 24876 - protein, 217 aa, Arabidopsis thaliana
  peptide (1)..(217): Ceres Seq. ID no. 12385460
  misc_feature (35)..(161): Pfam Name: Transcription initiation factor IID, 31kD subunit Pfam Description: Transcription initiation factor IID, 31kD
  misc_feature (41)..(209): Homolog of NCBI NO: 4507351 NR Description: TBP-associated factor 9
  misc_feature (41)..(160): Homolog of NCBI NO: 30186181 NR Description: Similar to TAF9-like RNA polymerase II, TATA box
  misc_feature (41)..(209): Homolog of NCBI NO: 33086648 NR Description: Cb1-739 [Rattus norvegicus]
  misc_feature (41)..(160): Homolog of NCBI NO: 19424332 NR Description: TAF9-like RNA polymerase II, TATA box binding
  misc_feature (41)..(213): Homolog of NCBI NO: 20070280 NR Description: TBP-associated factor 9L
  misc_feature (41)..(213): Homolog of NCBI NO: 4689154 NR Description: neuronal cell death-related protein [Homo sapiens]
  misc_feature (42)..(167): Homolog of NCBI NO: 28828470 NR Description: similar to F55B11.3.p
  misc_feature (36)..(121): Homolog of NCBI NO: 30017563 NR Description: putative transcription initiation factor
  misc_feature (122)..(213): Homolog of NCBI NO: 30017563 NR Description: putative transcription initiation factor
  misc_feature (35)..(217): Homolog of NCBI NO: 15221048 NR Description: transcriptional activation factor TAFII32,
ISRFLAAVHQSLRRVSATSSPPNFLSRISCLGINMAGEGEEDVPRDAKIVKSLLKSMGVEDYEPRVIHQFLELWYRYVVEVLTDAQVYSEHASKPNIDCDDVKLAIQSKVNFSFSQPPPREVLLELAASRNKIPLPKSIAGPGVPLPPEQDTLLSPNYQLVIPKKSVSTEPEETEDDEEMTDPGQSSQEQQQQQQQTSDLPSQTPQRVSFPLSRRPK

SEQ ID NO: 24877 - protein, 183 aa, Arabidopsis thaliana
  peptide (1)..(183): Ceres Seq. ID no. 12385461
  misc_feature (1)..(127): Pfam Name: Transcription initiation factor IID, 31kD subunit Pfam Description: Transcription initiation factor IID, 31kD
  misc_feature (7)..(175): Homolog of NCBI NO: 4507351 NR Description: TBP-associated factor 9
  misc_feature (7)..(126): Homolog of NCBI NO: 30186181 NR Description: Similar to TAF9-like RNA polymerase II, TATA box
  misc_feature (7)..(175): Homolog of NCBI NO: 33086648 NR Description: Cb1-739 [Rattus norvegicus]
  misc_feature (7)..(126): Homolog of NCBI NO: 19424332 NR Description: TAF9-like RNA polymerase II, TATA box binding
  misc_feature (7)..(179): Homolog of NCBI NO: 20070280 NR Description: TBP-associated factor 9L
  misc_feature (7)..(179): Homolog of NCBI NO: 4689154 NR Description: neuronal cell death-related protein [Homo sapiens]
  misc_feature (8)..(133): Homolog of NCBI NO: 28828470 NR Description: similar to F55B11.3.p
  misc_feature (2)..(87): Homolog of NCBI NO: 30017563 NR Description: putative transcription initiation factor
  misc_feature (88)..(179): Homolog of NCBI NO: 30017563 NR Description: putative transcription initiation factor
  misc_feature (1)..(183): Homolog of NCBI NO: 15221048 NR Description: transcriptional activation factor TAFII32,
MAGEGEEDVPRDAKIVKSLLKSMGVEDYEPRVIHQFLELWYRYVVEVLTDAQVYSEHASKPNIDCDDVKLAIQSKVNFSFSQPPPREVLLELAASRNKIPLPKSIAGPGVPLPPEQDTLLSPNYQLVIPKKSVSTEPEETEDDEEMTDPGQSSQEQQQQQQQTSDLPSQTPQRVSFPLSRRPK

SEQ ID NO: 24878 - protein, 161 aa, Arabidopsis thaliana
  peptide (1)..(161): Ceres Seq. ID no. 12385462
  misc_feature (1)..(105): Pfam Name: Transcription initiation factor IID, 31kD subunit Pfam Description: Transcription initiation factor IID, 31kD
  misc_feature (1)..(153): Homolog of NCBI NO: 4507351 NR Description: TBP-associated factor 9
  misc_feature (1)..(104): Homolog of NCBI NO: 30186181 NR Description: Similar to TAF9-like RNA polymerase II, TATA box
  misc_feature (1)..(153): Homolog of NCBI NO: 33086648 NR Description: Cb1-739 [Rattus norvegicus]
  misc_feature (1)..(104): Homolog of NCBI NO: 19424332 NR Description: TAF9-like RNA polymerase II, TATA box binding
  misc_feature (1)..(157): Homolog of NCBI NO: 20070280 NR Description: TBP-associated factor 9L
  misc_feature (1)..(157): Homolog of NCBI NO: 4689154 NR Description: neuronal cell death-related protein [Homo sapiens]
  misc_feature (1)..(111): Homolog of NCBI NO: 28828470 NR Description: similar to F55B11.3.p
  misc_feature (1)..(65): Homolog of NCBI NO: 30017563 NR Description: putative transcription initiation factor
  misc_feature (66)..(157): Homolog of NCBI NO: 30017563 NR Description: putative transcription initiation factor
  misc_feature (1)..(161): Homolog of NCBI NO: 15221048 NR Description: transcriptional activation factor TAFII32,
MGVEDYEPRVIHQFLELWYRYVVEVLTDAQVYSEHASKPNIDCDDVKLAIQSKVNFSFSQPPPREVLLELAASRNKIPLPKSIAGPGVPLPPEQDTLLSPNYQLVIPKKSVSTEPEETEDDEEMTDPGQSSQEQQQQQQQTSDLPSQTPQRVSFPLSRRPK

SEQ ID NO: 24879 - DNA, 1190 bp, Arabidopsis thaliana
  misc_feature (1)..(1190): Ceres Seq. ID no. 12321145
  misc_feature: MA Experiment ID: 108434 Result: Up-regulated in Transcription
  misc_feature: MA Experiment 108434 PARAMETER Experiment Name: At_Root_Tips_cDNA_P Parameter: Tissue Value: Root Tips
  misc_feature: MA Experiment ID: 108462 Result: Down-regulated in Transcription
  misc_feature: MA Experiment 108462 PARAMETER Experiment Name: At_Germinating_Seeds_cDNA_P Parameter: Age (day) Value: 2 vs. 0
  misc_feature: MA Experiment 108462 PARAMETER Experiment Name: At_Germinating_Seeds_cDNA_P Parameter: Tissue Value: Germinating Seeds
  misc_feature: MA Experiment ID: 108463 Result: Down-regulated in Transcription
  misc_feature: MA Experiment 108463 PARAMETER Experiment Name: At_Germinating_Seeds_cDNA_P Parameter: Age (day) Value: 3 vs. 0
  misc_feature: MA Experiment 108463 PARAMETER Experiment Name: At_Germinating_Seeds_cDNA_P Parameter: Tissue Value: Germinating Seeds
  misc_feature: MA Experiment ID: 108464 Result: Down-regulated in Transcription
  misc_feature: MA Experiment 108464 PARAMETER Experiment Name: At_Germinating_Seeds_cDNA_P Parameter: Age (day) Value: 4 vs. 0
  misc_feature: MA Experiment 108464 PARAMETER Experiment Name: At_Germinating_Seeds_cDNA_P Parameter: Tissue Value: Germinating Seeds
  misc_feature: MA Experiment ID: 20001557 Result: Up-regulated in Transcription
  misc_feature: MA Experiment 20001557 PARAMETER Experiment Name: At_Drought_Soil_Dry_P Parameter: Age (day) Value: 27
  misc_feature: MA Experiment 20001557 PARAMETER Experiment Name: At_Drought_Soil_Dry_P Parameter: Organism Value: A. thaliana
  misc_feature: MA Experiment 20001557 PARAMETER Experiment Name: At_Drought_Soil_Dry_P Parameter: Plant Line Value: WS
  misc_feature: MA Experiment 20001557 PARAMETER Experiment Name: At_Drought_Soil_Dry_P Parameter: Post Timepoint (hr) Value: 3
  misc_feature: MA Experiment 20001557 PARAMETER Experiment Name: At_Drought_Soil_Dry_P Parameter: Post-Treatment Value: Re-Water vs. No Drought
  misc_feature: MA Experiment 20001557 PARAMETER Experiment Name: At_Drought_Soil_Dry_P Parameter: Timepoint (day) Value: 13
  misc_feature: MA Experiment 20001557 PARAMETER Experiment Name: At_Drought_Soil_Dry_P Parameter: Treatment Value: Drought vs. No Drought
  misc_feature: MA Experiment ID: 20001558 Result: Up-regulated in Transcription
  misc_feature: MA Experiment 20001558 PARAMETER Experiment Name: At_Drought_Soil_Dry_P Parameter: Age (day) Value: 27
  misc_feature: MA Experiment 20001558 PARAMETER Experiment Name: At_Drought_Soil_Dry_P Parameter: Organism Value: A. thaliana
  misc_feature: MA Experiment 20001558 PARAMETER Experiment Name: At_Drought_Soil_Dry_P Parameter: Plant Line Value: WS
  misc_feature: MA Experiment 20001558 PARAMETER Experiment Name: At_Drought_Soil_Dry_P Parameter: Post Timepoint (hr) Value: 6
  misc_feature: MA Experiment 20001558 PARAMETER Experiment Name: At_Drought_Soil_Dry_P Parameter: Post-Treatment Value: Re-Water vs. No Drought
  misc_feature: MA Experiment 20001558 PARAMETER Experiment Name: At_Drought_Soil_Dry_P Parameter: Timepoint (day) Value: 13
  misc_feature: MA Experiment 20001558 PARAMETER Experiment Name: At_Drought_Soil_Dry_P Parameter: Treatment Value: Drought vs. No Drought
gaaggaatcaaaacggtgcgttccggttacggagcacacacagataagataggaaaccctaaaagtgcttcttcttcttcgtcttcttcttcagttttaggttacgatcgaagcaaaagcggcgcatctgaatcccaaacgagtgacgatgacgatcgattcgcagcaaaaaacgagcaaattcagatggggggaaatggacgaagacgaagatctggatttcttgctccctcccaagcaggtgattggtccagatgagaatggtttgaagacgacgatcgagtacaaattcaacgatgaagaaaataaggttaagataacgactaggacacgtgtccgcaagctagcttctgctcgactcaacaaacgagccatggagaggaggaactggcctaagttcggagacgcagccaatgaggaagctggtagccatctcactatggtttctaccgaagagatccttctcgaacgaccccgagctcctggtaccaaagcggatgaatcaaaggcaacaggagatggcttgtctcagctgggtaaaggtggtgcagttctcatggtgtgcaggatatgccacaagaaaggagatcactggacatcaaaatgtccatacaaggatctagctgcaccaaccgatgtcttcattgacaagccacccacaggggaatcatctaccatgtctgctgcacctggaactggcaaggccgcgtatgtcccgcctagcatgagagcaggtgcagacagaagcgctgtgggttcagacatgaggaggaggaacgatgagaactctgtgcgtgtaaccaatctgtccgaggatacccgtgaacctgacttgatggagctgttccacccgtttggagctgtcacacgtgtctatgtggccattgatcagaaaactggagtgagcagaggatttggtttcgtcaatttcgtgagcagagaagacgctcaaagagcaatcaacaaattgaatggttatggttatgataacctcatcctcagggttgaatgggcaactccaagaccaacctagaaagaaatgtctgatgttgagaccttaaaactcttctcattctcgtctttcttgttatggatttttgtttatcgaccagtttgtttgttggtttggtttctgtatgaatagatgagaatttgttcaatttctctttaatacataaggcatgcttttt

SEQ ID NO: 24880 - protein, 294 aa, Arabidopsis thaliana
  peptide (1)..(294): Ceres Seq. ID no. 12321146
  misc_feature (215)..(286): Pfam Name: RNA recognition motif. (a.k.a. RRM, RBD, or RNP domain) Pfam Description: RNA recognition motif. (a.k.a. RRM, RBD, or RNP
  misc_feature (5)..(289): Homolog of NCBI NO: 40738468 NR Description: hypothetical protein AN6017.2 [Aspergillus
  misc_feature (19)..(292): Homolog of NCBI NO: 19112519 NR Description: eukaryotic translation initiation factor 3
  misc_feature (26)..(291): Homolog of NCBI NO: 4503517 NR Description: eukaryotic translation initiation factor 3,
  misc_feature (26)..(291): Homolog of NCBI NO: 30583983 NR Description: Homo sapiens eukaryotic translation initiation
  misc_feature (26)..(291): Homolog of NCBI NO: 23503064 NR Description: Eukaryotic translation initiation factor 3
  misc_feature (10)..(291): Homolog of NCBI NO: 29124629 NR Description: Similar to eukaryotic translation initiation
  misc_feature (32)..(292): Homolog of NCBI NO: 30681225 NR Description: eukaryotic translation initiation factor 3,
  misc_feature (1)..(292): Homolog of NCBI NO: 10177573 NR Description: eukaryotic translation initiation factor 3
  misc_feature (1)..(294): Homolog of NCBI NO: 12407751 NR Description: initiation factor 3g [Arabidopsis thaliana]
  misc_feature (1)..(294): Homolog of NCBI NO: 15229743 NR Description: eukaryotic translation initiation factor 3
MTIDSQQKTSKFRWGEMDEDEDLDFLLPPKQVIGPDENGLKTTIEYKFNDEENKVKITTRTRVRKLASARLNKRAMERRNWPKFGDAANEEAGSHLTMVSTEEILLERPRAPGTKADESKATGDGLSQLGKGGAVLMVCRICHKKGDHWTSKCPYKDLAAPTDVFIDKPPTGESSTMSAAPGTGKAAYVPPSMRAGADRSAVGSDMRRRNDENSVRVTNLSEDTREPDLMELFHPFGAVTRVYVAIDQKTGVSRGFGFVNFVSREDAQRAINKLNGYGYDNLILRVEWATPRPT

SEQ ID NO: 24881 - protein, 278 aa, Arabidopsis thaliana
  peptide (1)..(278): Ceres Seq. ID no. 12321147
  misc_feature (199)..(270): Pfam Name: RNA recognition motif. (a.k.a. RRM, RBD, or RNP domain) Pfam Description: RNA recognition motif. (a.k.a. RRM, RBD, or RNP
  misc_feature (1)..(273): Homolog of NCBI NO: 40738468 NR Description: hypothetical protein AN6017.2 [Aspergillus
  misc_feature (3)..(276): Homolog of NCBI NO: 19112519 NR Description: eukaryotic translation initiation factor 3
  misc_feature (10)..(275): Homolog of NCBI NO: 4503517 NR Description: eukaryotic translation initiation factor 3,
  misc_feature (10)..(275): Homolog of NCBI NO: 30583983 NR Description: Homo sapiens eukaryotic translation initiation
  misc_feature (10)..(275): Homolog of NCBI NO: 23503064 NR Description: Eukaryotic translation initiation factor 3
  misc_feature (1)..(275): Homolog of NCBI NO: 29124629 NR Description: Similar to eukaryotic translation initiation
  misc_feature (16)..(276): Homolog of NCBI NO: 30681225 NR Description: eukaryotic translation initiation factor 3,
  misc_feature (1)..(276): Homolog of NCBI NO: 10177573 NR Description: eukaryotic translation initiation factor 3
  misc_feature (1)..(278): Homolog of NCBI NO: 12407751 NR Description: initiation factor 3g [Arabidopsis thaliana]
  misc_feature (1)..(278): Homolog of NCBI NO: 15229743 NR Description: eukaryotic translation initiation factor 3
MDEDEDLDFLLPPKQVIGPDENGLKTTIEYKFNDEENKVKITTRTRVRKLASARLNKRAMERRNWPKFGDAANEEAGSHLTMVSTEEILLERPRAPGTKADESKATGDGLSQLGKGGAVLMVCRICHKKGDHWTSKCPYKDLAAPTDVFIDKPPTGESSTMSAAPGTGKAAYVPPSMRAGADRSAVGSDMRRRNDENSVRVTNLSEDTREPDLMELFHPFGAVTRVYVAIDQKTGVSRGFGFVNFVSREDAQRAINKLNGYGYDNLILRVEWATPRPT

SEQ ID NO: 24882 - protein, 219 aa, Arabidopsis thaliana
  peptide (1)..(219): Ceres Seq. ID no. 12321148
  misc_feature (140)..(211): Pfam Name: RNA recognition motif. (a.k.a. RRM, RBD, or RNP domain) Pfam Description: RNA recognition motif. (a.k.a. RRM, RBD, or RNP
  misc_feature (1)..(214): Homolog of NCBI NO: 40738468 NR Description: hypothetical protein AN6017.2 [Aspergillus
  misc_feature (1)..(217): Homolog of NCBI NO: 19112519 NR Description: eukaryotic translation initiation factor 3
  misc_feature (1)..(216): Homolog of NCBI NO: 4503517 NR Description: eukaryotic translation initiation factor 3,
  misc_feature (1)..(216): Homolog of NCBI NO: 30583983 NR Description: Homo sapiens eukaryotic translation initiation
  misc_feature (1)..(216): Homolog of NCBI NO: 23503064 NR Description: Eukaryotic translation initiation factor 3
  misc_feature (1)..(216): Homolog of NCBI NO: 29124629 NR Description: Similar to eukaryotic translation initiation
  misc_feature (1)..(217): Homolog of NCBI NO: 30681225 NR Description: eukaryotic translation initiation factor 3,
  misc_feature (1)..(217): Homolog of NCBI NO: 10177573 NR Description: eukaryotic translation initiation factor 3
  misc_feature (1)..(219): Homolog of NCBI NO: 12407751 NR Description: initiation factor 3g [Arabidopsis thaliana]
  misc_feature (1)..(219): Homolog of NCBI NO: 15229743 NR Description: eukaryotic translation initiation factor 3
MERRNWPKFGDAANEEAGSHLTMVSTEEILLERPRAPGTKADESKATGDGLSQLGKGGAVLMVCRICHKKGDHWTSKCPYKDLAAPTDVFIDKPPTGESSTMSAAPGTGKAAYVPPSMRAGADRSAVGSDMRRRNDENSVRVTNLSEDTREPDLMELFHPFGAVTRVYVAIDQKTGVSRGFGFVNFVSREDAQRAINKLNGYGYDNLILRVEWATPRPT

SEQ ID NO: 24883 - DNA, 385 bp, Arabidopsis thaliana
  misc_feature (1)..(385): Ceres Seq. ID no. 12421931
  misc_feature: MA Experiment ID: 108434 Result: Down-regulated in Transcription
  misc_feature: MA Experiment 108434 PARAMETER Experiment Name: At_Root_Tips_cDNA_P Parameter: Tissue Value: Root Tips
  misc_feature: MA Experiment ID: 108463 Result: Up-regulated in Transcription
  misc_feature: MA Experiment 108463 PARAMETER Experiment Name: At_Germinating_Seeds_cDNA_P Parameter: Age (day) Value: 3 vs. 0
  misc_feature: MA Experiment 108463 PARAMETER Experiment Name: At_Germinating_Seeds_cDNA_P Parameter: Tissue Value: Germinating Seeds
  misc_feature: MA Experiment ID: 108464 Result: Up-regulated in Transcription
  misc_feature: MA Experiment 108464 PARAMETER Experiment Name: At_Germinating_Seeds_cDNA_P Parameter: Age (day) Value: 4 vs. 0
  misc_feature: MA Experiment 108464 PARAMETER Experiment Name: At_Germinating_Seeds_cDNA_P Parameter: Tissue Value: Germinating Seeds
  misc_feature: MA Experiment ID: 108569 Result: Up-regulated in Transcription
  misc_feature: MA Experiment 108569 PARAMETER Experiment Name: At_0.001%_MeJA__cDNA_P Parameter: Timepoint (hr) Value: 6
  misc_feature: MA Experiment 108569 PARAMETER Experiment Name: At_0.001%_MeJA__cDNA_P Parameter: Tissue Value: Aerial
  misc_feature: MA Experiment 108569 PARAMETER Experiment Name: At_0.001%_MeJA__cDNA_P Parameter: Treatment Value: 0.001% MeJA vs. No Treatment
  misc_feature: MA Experiment ID: 108573 Result: Up-regulated in Transcription
  misc_feature: MA Experiment 108573 PARAMETER Experiment Name: At_Drought_cDNA_P Parameter: Timepoint (hr) Value: 6
  misc_feature: MA Experiment 108573 PARAMETER Experiment Name: At_Drought_cDNA_P Parameter: Tissue Value: Aerial
  misc_feature: MA Experiment 108573 PARAMETER Experiment Name: At_Drought_cDNA_P Parameter: Treatment Value: Drought vs. No Drought
  misc_feature: MA Experiment ID: 108574 Result: Up-regulated in Transcription
  misc_feature: MA Experiment 108574 PARAMETER Experiment Name: At_Wounding__cDNA_P Parameter: Timepoint (hr) Value: 1
  misc_feature: MA Experiment 108574 PARAMETER Experiment Name: At_Wounding__cDNA_P Parameter: Tissue Value: Aerial
  misc_feature: MA Experiment 108574 PARAMETER Experiment Name: At_Wounding__cDNA_P Parameter: Treatment Value: Wounding vs. No Wounding
  misc_feature: MA Experiment ID: 108577 Result: Down-regulated in Transcription
  misc_feature: MA Experiment 108577 PARAMETER Experiment Name: At_42deg_Heat_cDNA_P Parameter: Temperature (deg C) Value: 42 vs. 22
  misc_feature: MA Experiment 108577 PARAMETER Experiment Name: At_42deg_Heat_cDNA_P Parameter: Timepoint (hr) Value: 6
  misc_feature: MA Experiment 108577 PARAMETER Experiment Name: At_42deg_Heat_cDNA_P Parameter: Tissue Value: Aerial
  misc_feature: MA Experiment ID: 108595 Result: Up-regulated in Transcription
  misc_feature: MA Experiment 108595 PARAMETER Experiment Name: At_Ler-pi_Ovule_cDNA_P Parameter: Plant Line Value: null
  misc_feature: MA Experiment ID: 108667 Result: Up-regulated in Transcription
  misc_feature: MA Experiment 108667 PARAMETER Experiment Name: At_2mM_SA_cDNA_P Parameter: Plant Line Value: WS
  misc_feature: MA Experiment 108667 PARAMETER Experiment Name: At_2mM_SA_cDNA_P Parameter: Timepoint (hr) Value: 1
  misc_feature: MA Experiment 108667 PARAMETER Experiment Name: At_2mM_SA_cDNA_P Parameter: Treatment Value: 2mM SA vs. No Treatment
  misc_feature: MA Experiment ID: 20000030 Result: Down-regulated in Transcription
  misc_feature: MA Experiment 20000030 PARAMETER Experiment Name: At_CS6630_Roots_cDNA_P Parameter: Plant Line Value: CS6630 vs. WS
  misc_feature: MA Experiment 20000030 PARAMETER Experiment Name: At_CS6630_Roots_cDNA_P Parameter: Tissue Value: Roots
  misc_feature: MA Experiment ID: 20000068 Result: Down-regulated in Transcription
  misc_feature: MA Experiment ID: 20000113 Result: Down-regulated in Transcription
  misc_feature: MA Experiment 20000113 PARAMETER Experiment Name: At_42deg_Heat_cDNA_P Parameter: Temperature (deg C) Value: 42 vs. 22
  misc_feature: MA Experiment 20000113 PARAMETER Experiment Name: At_42deg_Heat_cDNA_P Parameter: Timepoint (hr) Value: 8
  misc_feature: MA Experiment 20000113 PARAMETER Experiment Name: At_42deg_Heat_cDNA_P Parameter: Tissue Value: Aerial
actttgtagtttgtgttttgtccttatcggcggagacatgacggcggcacaagaaactctaacgagactctgttttcttcttacaagatgggaagattcgatctctctcatcgagtggttctggcgccgatgacgcggtgcagggcgttgaacggagtaccaaacgcggcgttggcagagtattatgctcaacggaccactcccggcggttttctcatctccgaaggcaccatggtctctcccggatccgcagggttcccacatgtgcctggaatctattcagatgaacaagtagaagcatggaagcaagttgtggaagcagttcacgctaagggaggtttcatcttttgtcaattatggcatgttggacgtgcttctcatgcag

SEQ ID NO: 24884 - protein, 99 aa, Arabidopsis thaliana
  peptide (1)..(99): Ceres Seq. ID no. 12421932
  misc_feature (1)..(98): Pfam Name: NADH:flavin oxidoreductase / NADH oxidase family Pfam Description: NADH:flavin oxidoreductase / NADH oxidase family
  misc_feature (1)..(98): Homolog of NCBI NO: 40645459 NR Description: LEDI-5c protein [Lithospermum erythrorhizon]
  misc_feature (1)..(98): Homolog of NCBI NO: 21593388 NR Description: 12-oxophytodienoate reductase (OPR1) [Arabidopsis
  misc_feature (1)..(98): Homolog of NCBI NO: 15223138 NR Description: 12-oxophytodienoate reductase (OPR1)
  misc_feature (1)..(98): Homolog of NCBI NO: 2765083 NR Description: 12-oxophytodienoate reductase [Arabidopsis
  misc_feature (1)..(98): Homolog of NCBI NO: 12056507 NR Description: 12-oxophytodienoate reductase 3 [Lycopersicon
  misc_feature (1)..(98): Homolog of NCBI NO: 10242314 NR Description: 12-oxo-phytodienoate reductase [Arabidopsis
  misc_feature (1)..(98): Homolog of NCBI NO: 15225045 NR Description: 12-oxophytodienoate reductase (OPR3)(DDE1)
  misc_feature (1)..(98): Homolog of NCBI NO: 7688991 NR Description: 12-oxo-phytodienoate reductase [Arabidopsis
  misc_feature (1)..(98): Homolog of NCBI NO: 6707797 NR Description: 12-oxo-phytodienoate reductase [Arabidopsis
  misc_feature (1)..(98): Homolog of NCBI NO: 5059115 NR Description: OPDA-reductase homolog [Arabidopsis thaliana]
MGRFDLSHRVVLAPMTRCRALNGVPNAALAEYYAQRTTPGGFLISEGTMVSPGSAGFPHVPGIYSDEQVEAWKQVVEAVHAKGGFIFCQLWHVGRASHA

SEQ ID NO: 24885 - protein, 85 aa, Arabidopsis thaliana
  peptide (1)..(85): Ceres Seq. ID no. 12421933
  misc_feature (1)..(84): Pfam Name: NADH:flavin oxidoreductase / NADH oxidase family Pfam Description: NADH:flavin oxidoreductase / NADH oxidase family
  misc_feature (1)..(84): Homolog of NCBI NO: 40645459 NR Description: LEDI-5c protein [Lithospermum erythrorhizon]
  misc_feature (1)..(84): Homolog of NCBI NO: 21593388 NR Description: 12-oxophytodienoate reductase (OPR1) [Arabidopsis
  misc_feature (1)..(84): Homolog of NCBI NO: 15223138 NR Description: 12-oxophytodienoate reductase (OPR1)
  misc_feature (1)..(84): Homolog of NCBI NO: 2765083 NR Description: 12-oxophytodienoate reductase [Arabidopsis
  misc_feature (1)..(84): Homolog of NCBI NO: 12056507 NR Description: 12-oxophytodienoate reductase 3 [Lycopersicon
  misc_feature (1)..(84): Homolog of NCBI NO: 6707797 NR Description: 12-oxo-phytodienoate reductase [Arabidopsis
  misc_feature (1)..(84): Homolog of NCBI NO: 10242314 NR Description: 12-oxo-phytodienoate reductase [Arabidopsis
  misc_feature (1)..(84): Homolog of NCBI NO: 15225045 NR Description: 12-oxophytodienoate reductase (OPR3)(DDE1)
  misc_feature (1)..(84): Homolog of NCBI NO: 7688991 NR Description: 12-oxo-phytodienoate reductase [Arabidopsis
  misc_feature (1)..(84): Homolog of NCBI NO: 5059115 NR Description: OPDA-reductase homolog [Arabidopsis thaliana]
MTRCRALNGVPNAALAEYYAQRTTPGGFLISEGTMVSPGSAGFPHVPGIYSDEQVEAWKQVVEAVHAKGGFIFCQLWHVGRASHA

SEQ ID NO: 24886 - protein, 51 aa, Arabidopsis thaliana
  peptide (1)..(51): Ceres Seq. ID no. 12421934
  misc_feature (1)..(50): Homolog of NCBI NO: 40645459 NR Description: LEDI-5c protein [Lithospermum erythrorhizon]
  misc_feature (1)..(50): Homolog of NCBI NO: 21593388 NR Description: 12-oxophytodienoate reductase (OPR1) [Arabidopsis
  misc_feature (1)..(50): Homolog of NCBI NO: 15223138 NR Description: 12-oxophytodienoate reductase (OPR1)
  misc_feature (1)..(50): Homolog of NCBI NO: 2765083 NR Description: 12-oxophytodienoate reductase [Arabidopsis
  misc_feature (1)..(50): Homolog of NCBI NO: 12056507 NR Description: 12-oxophytodienoate reductase 3 [Lycopersicon
  misc_feature (1)..(50): Homolog of NCBI NO: 6707797 NR Description: 12-oxo-phytodienoate reductase [Arabidopsis
  misc_feature (1)..(50): Homolog of NCBI NO: 15225045 NR Description: 12-oxophytodienoate reductase (OPR3)(DDE1)
  misc_feature (1)..(50): Homolog of NCBI NO: 7688991 NR Description: 12-oxo-phytodienoate reductase [Arabidopsis
  misc_feature (1)..(50): Homolog of NCBI NO: 10242314 NR Description: 12-oxo-phytodienoate reductase [Arabidopsis
  misc_feature (1)..(50): Homolog of NCBI NO: 5059115 NR Description: OPDA-reductase homolog [Arabidopsis thaliana]
MVSPGSAGFPHVPGIYSDEQVEAWKQVVEAVHAKGGFIFCQLWHVGRASHA

SEQ ID NO: 24887 - DNA, 1158 bp, Arabidopsis thaliana
  misc_feature (1)..(1158): Ceres Seq. ID no. 12324872
  misc_feature: MA Experiment ID: 108462 Result: Up-regulated in Transcription
  misc_feature: MA Experiment 108462 PARAMETER Experiment Name: At_Germinating_Seeds_cDNA_P Parameter: Age (day) Value: 2 vs. 0
  misc_feature: MA Experiment 108462 PARAMETER Experiment Name: At_Germinating_Seeds_cDNA_P Parameter: Tissue Value: Germinating Seeds
  misc_feature: MA Experiment ID: 108463 Result: Up-regulated in Transcription
  misc_feature: MA Experiment 108463 PARAMETER Experiment Name: At_Germinating_Seeds_cDNA_P Parameter: Age (day) Value: 3 vs. 0
  misc_feature: MA Experiment 108463 PARAMETER Experiment Name: At_Germinating_Seeds_cDNA_P Parameter: Tissue Value: Germinating Seeds
  misc_feature: MA Experiment ID: 108464 Result: Up-regulated in Transcription
  misc_feature: MA Experiment 108464 PARAMETER Experiment Name: At_Germinating_Seeds_cDNA_P Parameter: Age (day) Value: 4 vs. 0
  misc_feature: MA Experiment 108464 PARAMETER Experiment Name: At_Germinating_Seeds_cDNA_P Parameter: Tissue Value: Germinating Seeds
  misc_feature: MA Experiment ID: 108474 Result: Down-regulated in Transcription
  misc_feature: MA Experiment 108474 PARAMETER Experiment Name: At_Drought_Flowers_cDNA_P Parameter: Timepoint (hr) Value: null
  misc_feature: MA Experiment 108474 PARAMETER Experiment Name: At_Drought_Flowers_cDNA_P Parameter: Treatment Value: Drought vs. No Drought
  misc_feature: MA Experiment ID: 108573 Result: Up-regulated in Transcription
  misc_feature: MA Experiment 108573 PARAMETER Experiment Name: At_Drought_cDNA_P Parameter: Timepoint (hr) Value: 6
  misc_feature: MA Experiment 108573 PARAMETER Experiment Name: At_Drought_cDNA_P Parameter: Tissue Value: Aerial
  misc_feature: MA Experiment 108573 PARAMETER Experiment Name: At_Drought_cDNA_P Parameter: Treatment Value: Drought vs. No Drought
  misc_feature: MA Experiment ID: 108576 Result: Up-regulated in Transcription
  misc_feature: MA Experiment 108576 PARAMETER Experiment Name: At_42deg_Heat_cDNA_P Parameter: Temperature (deg C) Value: 42 vs. 22
  misc_feature: MA Experiment 108576 PARAMETER Experiment Name: At_42deg_Heat_cDNA_P Parameter: Timepoint (hr) Value: 1
  misc_feature: MA Experiment 108576 PARAMETER Experiment Name: At_42deg_Heat_cDNA_P Parameter: Tissue Value: Aerial
  misc_feature: MA Experiment ID: 108577 Result: Up-regulated in Transcription
  misc_feature: MA Experiment 108577 PARAMETER Experiment Name: At_42deg_Heat_cDNA_P Parameter: Temperature (deg C) Value: 42 vs. 22
  misc_feature: MA Experiment 108577 PARAMETER Experiment Name: At_42deg_Heat_cDNA_P Parameter: Timepoint (hr) Value: 6
  misc_feature: MA Experiment 108577 PARAMETER Experiment Name: At_42deg_Heat_cDNA_P Parameter: Tissue Value: Aerial
  misc_feature: MA Experiment ID: 108579 Result: Up-regulated in Transcription
  misc_feature: MA Experiment 108579 PARAMETER Experiment Name: At_4deg_Cold_cDNA_P Parameter: Temperature (deg C) Value: 4 vs. 22
  misc_feature: MA Experiment 108579 PARAMETER Experiment Name: At_4deg_Cold_cDNA_P Parameter: Timepoint (hr) Value: 6
  misc_feature: MA Experiment 108579 PARAMETER Experiment Name: At_4deg_Cold_cDNA_P Parameter: Tissue Value: Aerial
  misc_feature: MA Experiment ID: 108607 Result: Up-regulated in Transcription
  misc_feature: MA Experiment 108607 PARAMETER Experiment Name: At_100uM_ABA_cDNA_P Parameter: Timepoint (hr) Value: 4
  misc_feature: MA Experiment 108607 PARAMETER Experiment Name: At_100uM_ABA_cDNA_P Parameter: Tissue Value: Aerial
  misc_feature: MA Experiment 108607 PARAMETER Experiment Name: At_100uM_ABA_cDNA_P Parameter: Treatment Value: 100uM ABA vs. No Treatment
  misc_feature: MA Experiment ID: 20000087 Result: Down-regulated in Transcription
  misc_feature: MA Experiment 20000087 PARAMETER Experiment Name: At_100uM_ABA_Mutants_cDNA_P Parameter: Plant Line Value: WS
  misc_feature: MA Experiment 20000087 PARAMETER Experiment Name: At_100uM_ABA_Mutants_cDNA_P Parameter: Timepoint (hr) Value: 6
  misc_feature: MA Experiment 20000087 PARAMETER Experiment Name: At_100uM_ABA_Mutants_cDNA_P Parameter: Tissue Value: Aerial
  misc_feature: MA Experiment 20000087 PARAMETER Experiment Name: At_100uM_ABA_Mutants_cDNA_P Parameter: Treatment Value: 100uM ABA vs. No Treatment
  misc_feature: MA Experiment ID: 20000088 Result: Up-regulated in Transcription
  misc_feature: MA Experiment 20000088 PARAMETER Experiment Name: At_100uM_ABA_Mutants_cDNA_P Parameter: Plant Line Value: Landsberg
  misc_feature: MA Experiment 20000088 PARAMETER Experiment Name: At_100uM_ABA_Mutants_cDNA_P Parameter: Timepoint (hr) Value: 6
  misc_feature: MA Experiment 20000088 PARAMETER Experiment Name: At_100uM_ABA_Mutants_cDNA_P Parameter: Tissue Value: Aerial
  misc_feature: MA Experiment 20000088 PARAMETER Experiment Name: At_100uM_ABA_Mutants_cDNA_P Parameter: Treatment Value: 100uM ABA vs. No Treatment
  misc_feature: MA Experiment ID: 20000093 Result: Up-regulated in Transcription
  misc_feature: MA Experiment 20000093 PARAMETER Experiment Name: At_42deg_Heat_cDNA_P Parameter: Temperature (deg C) Value: 42 vs. 22
  misc_feature: MA Experiment 20000093 PARAMETER Experiment Name: At_42deg_Heat_cDNA_P Parameter: Timepoint (hr) Value: 0.5
  misc_feature: MA Experiment 20000093 PARAMETER Experiment Name: At_42deg_Heat_cDNA_P Parameter: Tissue Value: Aerial
  misc_feature: MA Experiment ID: 20000111 Result: Up-regulated in Transcription
  misc_feature: MA Experiment 20000111 PARAMETER Experiment Name: At_42deg_Heat_cDNA_P Parameter: Temperature (deg C) Value: 42 vs. 22
  misc_feature: MA Experiment 20000111 PARAMETER Experiment Name: At_42deg_Heat_cDNA_P Parameter: Timepoint (hr) Value: 6
  misc_feature: MA Experiment 20000111 PARAMETER Experiment Name: At_42deg_Heat_cDNA_P Parameter: Tissue Value: Aerial
  misc_feature: MA Experiment ID: 20000112 Result: Up-regulated in Transcription
  misc_feature: MA Experiment 20000112 PARAMETER Experiment Name: At_42deg_Heat_cDNA_P Parameter: Temperature (deg C) Value: 42 vs. 22
  misc_feature: MA Experiment 20000112 PARAMETER Experiment Name: At_42deg_Heat_cDNA_P Parameter: Timepoint (hr) Value: 2
  misc_feature: MA Experiment 20000112 PARAMETER Experiment Name: At_42deg_Heat_cDNA_P Parameter: Tissue Value: Aerial
  misc_feature: MA Experiment ID: 20000144 Result: Up-regulated in Transcription
  misc_feature: MA Experiment 20000144 PARAMETER Experiment Name: At_42deg_Heat_cDNA_P Parameter: Temperature (deg C) Value: 42 vs. 22
  misc_feature: MA Experiment 20000144 PARAMETER Experiment Name: At_42deg_Heat_cDNA_P Parameter: Timepoint (hr) Value: 1
  misc_feature: MA Experiment 20000144 PARAMETER Experiment Name: At_42deg_Heat_cDNA_P Parameter: Tissue Value: Aerial
  misc_feature: MA Experiment ID: 20000171 Result: Up-regulated in Transcription
  misc_feature: MA Experiment 20000171 PARAMETER Experiment Name: At_42deg_Heat_P Parameter: Age (day) Value: 14
  misc_feature: MA Experiment 20000171 PARAMETER Experiment Name: At_42deg_Heat_P Parameter: Organism Value: A. thaliana
  misc_feature: MA Experiment 20000171 PARAMETER Experiment Name: At_42deg_Heat_P Parameter: Plant Line Value: WS
  misc_feature: MA Experiment 20000171 PARAMETER Experiment Name: At_42deg_Heat_P Parameter: Temperature (deg C) Value: 42 vs. 22
  misc_feature: MA Experiment 20000171 PARAMETER Experiment Name: At_42deg_Heat_P Parameter: Timepoint (hr) Value: 1
  misc_feature: MA Experiment 20000171 PARAMETER Experiment Name: At_42deg_Heat_P Parameter: Tissue Value: Aerial
  misc_feature: MA Experiment ID: 20000173 Result: Up-regulated in Transcription
  misc_feature: MA Experiment 20000173 PARAMETER Experiment Name: At_42deg_Heat_P Parameter: Age (day) Value: 14
  misc_feature: MA Experiment 20000173 PARAMETER Experiment Name: At_42deg_Heat_P Parameter: Organism Value: A. thaliana
  misc_feature: MA Experiment 20000173 PARAMETER Experiment Name: At_42deg_Heat_P Parameter: Plant Line Value: WS
  misc_feature: MA Experiment 20000173 PARAMETER Experiment Name: At_42deg_Heat_P Parameter: Temperature (deg C) Value: 42 vs. 22
  misc_feature: MA Experiment 20000173 PARAMETER Experiment Name: At_42deg_Heat_P Parameter: Timepoint (hr) Value: 6
  misc_feature: MA Experiment 20000173 PARAMETER Experiment Name: At_42deg_Heat_P Parameter: Tissue Value: Aerial
  misc_feature: MA Experiment ID: 20000182 Result: Up-regulated in Transcription
  misc_feature: MA Experiment 20000182 PARAMETER Experiment Name: At_2mM_SA_P Parameter: Age (day) Value: 14
  misc_feature: MA Experiment 20000182 PARAMETER Experiment Name: At_2mM_SA_P Parameter: Organism Value: A. thaliana
  misc_feature: MA Experiment 20000182 PARAMETER Experiment Name: At_2mM_SA_P Parameter: Plant Line Value: WS
  misc_feature: MA Experiment 20000182 PARAMETER Experiment Name: At_2mM_SA_P Parameter: Timepoint (hr) Value: 6
  misc_feature: MA Experiment 20000182 PARAMETER Experiment Name: At_2mM_SA_P Parameter: Tissue Value: Aerial
  misc_feature: MA Experiment 20000182 PARAMETER Experiment Name: At_2mM_SA_P Parameter: Treatment Value: 2mM SA vs. No Treatment
  misc_feature: MA Experiment ID: 20000184 Result: Up-regulated in Transcription
  misc_feature: MA Experiment 20000184 PARAMETER Experiment Name: At_Shoots__P Parameter: Age (day) Value: 7
  misc_feature: MA Experiment 20000184 PARAMETER Experiment Name: At_Shoots__P Parameter: Tissue Value: Shoots vs. Whole Plant
  misc_feature: MA Experiment ID: 20000185 Result: Down-regulated in Transcription
  misc_feature: MA Experiment 20000185 PARAMETER Experiment Name: At_Roots__P Parameter: Age (day) Value: 7 vs. 21
  misc_feature: MA Experiment 20000185 PARAMETER Experiment Name: At_Roots__P Parameter: Organism Value: A. thaliana
  misc_feature: MA Experiment 20000185 PARAMETER Experiment Name: At_Roots__P Parameter: Tissue Value: Roots vs. Whole Plant
  misc_feature: MA Experiment ID: 20000264 Result: Up-regulated in Transcription
  misc_feature: MA Experiment 20000264 PARAMETER Experiment Name: At_Open_Flower_P Parameter: Age (day) Value: 21
  misc_feature: MA Experiment 20000264 PARAMETER Experiment Name: At_Open_Flower_P Parameter: Plant Line Value: WS
  misc_feature: MA Experiment 20000264 PARAMETER Experiment Name: At_Open_Flower_P Parameter: Tissue Value: Open Flower vs. Whole Plant
  misc_feature: MA Experiment ID: 20000265 Result: Up-regulated in Transcription
  misc_feature: MA Experiment 20000265 PARAMETER Experiment Name: At_Open_Flower_P Parameter: Age (day) Value: 21
  misc_feature: MA Experiment 20000265 PARAMETER Experiment Name: At_Open_Flower_P Parameter: Plant Line Value: WS
  misc_feature: MA Experiment 20000265 PARAMETER Experiment Name: At_Open_Flower_P Parameter: Tissue Value: Closed Flower vs. Whole Plant
  misc_feature: MA Experiment ID: 20000267 Result: Up-regulated in Transcription
  misc_feature: MA Experiment 20000267 PARAMETER Experiment Name: At_Drought_P Parameter: Age (day) Value: 7
  misc_feature: MA Experiment 20000267 PARAMETER Experiment Name: At_Drought_P Parameter: Organism Value: A. thaliana
  misc_feature: MA Experiment 20000267 PARAMETER Experiment Name: At_Drought_P Parameter: Plant Line Value: WS
  misc_feature: MA Experiment 20000267 PARAMETER Experiment Name: At_Drought_P Parameter: Timepoint (hr) Value: 6
  misc_feature: MA Experiment 20000267 PARAMETER Experiment Name: At_Drought_P Parameter: Tissue Value: Whole Plant
  misc_feature: MA Experiment 20000267 PARAMETER Experiment Name: At_Drought_P Parameter: Treatment Value: Drought vs. No Drought
  misc_feature: MA Experiment ID: 20000268 Result: Up-regulated in Transcription
  misc_feature: MA Experiment 20000268 PARAMETER Experiment Name: At_100mM_NaCl__P Parameter: Age (day) Value: 14
  misc_feature: MA Experiment 20000268 PARAMETER Experiment Name: At_100mM_NaCl__P Parameter: Organism Value: A. thaliana
  misc_feature: MA Experiment 20000268 PARAMETER Experiment Name: At_100mM_NaCl__P Parameter: Plant Line Value: WS
  misc_feature: MA Experiment 20000268 PARAMETER Experiment Name: At_100mM_NaCl__P Parameter: Timepoint (hr) Value: 6
  misc_feature: MA Experiment 20000268 PARAMETER Experiment Name: At_100mM_NaCl__P Parameter: Tissue Value: Whole Plant
  misc_feature: MA Experiment 20000268 PARAMETER Experiment Name: At_100mM_NaCl__P Parameter: Treatment Value: 100mM NaCl vs. No Treatment
  misc_feature: MA Experiment ID: 20000286 Result: Up-regulated in Transcription
  misc_feature: MA Experiment 20000286 PARAMETER Experiment Name: At_Open_Flower_P Parameter: Age (day) Value: 21
  misc_feature: MA Experiment 20000286 PARAMETER Experiment Name: At_Open_Flower_P Parameter: Plant Line Value: WS
  misc_feature: MA Experiment 20000286 PARAMETER Experiment Name: At_Open_Flower_P Parameter: Tissue Value: Half Open vs. Whole Plant
  misc_feature: MA Experiment ID: 20000436 Result: Up-regulated in Transcription
  misc_feature: MA Experiment 20000436 PARAMETER Experiment Name: At_Drought_P Parameter: Age (day) Value: 7
  misc_feature: MA Experiment 20000436 PARAMETER Experiment Name: At_Drought_P Parameter: Organism Value: A. thaliana
  misc_feature: MA Experiment 20000436 PARAMETER Experiment Name: At_Drought_P Parameter: Plant Line Value: WS
  misc_feature: MA Experiment 20000436 PARAMETER Experiment Name: At_Drought_P Parameter: Timepoint (hr) Value: 12
  misc_feature: MA Experiment 20000436 PARAMETER Experiment Name: At_Drought_P Parameter: Tissue Value: Whole Plant
  misc_feature: MA Experiment 20000436 PARAMETER Experiment Name: At_Drought_P Parameter: Treatment Value: Drought vs. No Drought
  misc_feature: MA Experiment ID: 20000438 Result: Up-regulated in Transcription
  misc_feature: MA Experiment 20000438 PARAMETER Experiment Name: At_Shoots__P Parameter: Age (day) Value: 14
  misc_feature: MA Experiment 20000438 PARAMETER Experiment Name: At_Shoots__P Parameter: Tissue Value: Shoots vs. Whole Plant
  misc_feature: MA Experiment ID: 20000445 Result: Up-regulated in Transcription
  misc_feature: MA Experiment 20000445 PARAMETER Experiment Name: At_100uM_NAA__P Parameter: Age (day) Value: 14
  misc_feature: MA Experiment 20000445 PARAMETER Experiment Name: At_100uM_NAA__P Parameter: Organism Value: A. thaliana
  misc_feature: MA Experiment 20000445 PARAMETER Experiment Name: At_100uM_NAA__P Parameter: Plant Line Value: WS
  misc_feature: MA Experiment 20000445 PARAMETER Experiment Name: At_100uM_NAA__P Parameter: Timepoint (hr) Value: 6
  misc_feature: MA Experiment 20000445 PARAMETER Experiment Name: At_100uM_NAA__P Parameter: Tissue Value: Aerial
  misc_feature: MA Experiment 20000445 PARAMETER Experiment Name: At_100uM_NAA__P Parameter: Treatment Value: 100uM NAA vs. No Treatment
  misc_feature: MA Experiment ID: 20000451 Result: Down-regulated in Transcription
  misc_feature: MA Experiment 20000451 PARAMETER Experiment Name: At_CS6879_Shoots-Roots_P Parameter: Age (day) Value: 14
  misc_feature: MA Experiment 20000451 PARAMETER Experiment Name: At_CS6879_Shoots-Roots_P Parameter: Organism Value: A. thaliana
  misc_feature: MA Experiment 20000451 PARAMETER Experiment Name: At_CS6879_Shoots-Roots_P Parameter: Plant Line Value: CS6879 vs. WS
  misc_feature: MA Experiment 20000451 PARAMETER Experiment Name: At_CS6879_Shoots-Roots_P Parameter: Tissue Value: Roots
  misc_feature: MA Experiment ID: 20000495 Result: Down-regulated in Transcription
  misc_feature: MA Experiment 20000495 PARAMETER Experiment Name: At_Guard_Cells_P Parameter: Harvest Date Value: 8/2/2002
  misc_feature: MA Experiment 20000495 PARAMETER Experiment Name: At_Guard_Cells_P Parameter: Organism Value: A. thaliana
  misc_feature: MA Experiment 20000495 PARAMETER Experiment Name: At_Guard_Cells_P Parameter: Tissue Value: Guard Cells vs. Leaves
  misc_feature: MA Experiment ID: 20000573 Result: Down-regulated in Transcription
  misc_feature: MA Experiment 20000573 PARAMETER Experiment Name: At_100uM_ABA_Mutants__P Parameter: Organism Value: A. thaliana
  misc_feature: MA Experiment 20000573 PARAMETER Experiment Name: At_100uM_ABA_Mutants__P Parameter: Plant Line Value: CS22 vs. Ler wt
  misc_feature: MA Experiment 20000573 PARAMETER Experiment Name: At_100uM_ABA_Mutants__P Parameter: Timepoint (hr) Value: N/A
  misc_feature: MA Experiment 20000573 PARAMETER Experiment Name: At_100uM_ABA_Mutants__P Parameter: Tissue Value: Whole Plant
  misc_feature: MA Experiment 20000573 PARAMETER Experiment Name: At_100uM_ABA_Mutants__P Parameter: Treatment Value: None
  misc_feature: MA Experiment ID: 20000574 Result: Down-regulated in Transcription
  misc_feature: MA Experiment 20000574 PARAMETER Experiment Name: At_100uM_ABA_Mutants__P Parameter: Organism Value: A. thaliana
  misc_feature: MA Experiment 20000574 PARAMETER Experiment Name: At_100uM_ABA_Mutants__P Parameter: Plant Line Value: CS23 vs. Ler wt
  misc_feature: MA Experiment 20000574 PARAMETER Experiment Name: At_100uM_ABA_Mutants__P Parameter: Timepoint (hr) Value: N/A
  misc_feature: MA Experiment 20000574 PARAMETER Experiment Name: At_100uM_ABA_Mutants__P Parameter: Tissue Value: Whole Plant
  misc_feature: MA Experiment 20000574 PARAMETER Experiment Name: At_100uM_ABA_Mutants__P Parameter: Treatment Value: None
  misc_feature: MA Experiment ID: 20000794 Result: Up-regulated in Transcription
  misc_feature: MA Experiment 20000794 PARAMETER Experiment Name: At_Petals_P Parameter: Age (day) Value: 23-25 days
  misc_feature: MA Experiment 20000794 PARAMETER Experiment Name: At_Petals_P Parameter: Plant Line Value: WS
  misc_feature: MA Experiment 20000794 PARAMETER Experiment Name: At_Petals_P Parameter: Tissue Value: Petals vs. Whole plant
  misc_feature: MA Experiment ID: 20001248 Result: Down-regulated in Transcription
  misc_feature: MA Experiment 20001248 PARAMETER Experiment Name: At_Far-red-induction_P Parameter: Age (day) Value: 7
  misc_feature: MA Experiment 20001248 PARAMETER Experiment Name: At_Far-red-induction_P Parameter: Light Value: Far-red vs. White
  misc_feature: MA Experiment 20001248 PARAMETER Experiment Name: At_Far-red-induction_P Parameter: Organism Value: A. thaliana
  misc_feature: MA Experiment 20001248 PARAMETER Experiment Name: At_Far-red-induction_P Parameter: Plant Line Value: Columbia
  misc_feature: MA Experiment 20001248 PARAMETER Experiment Name: At_Far-red-induction_P Parameter: Timepoint (hr) Value: 4
  misc_feature: MA Experiment 20001248 PARAMETER Experiment Name: At_Far-red-induction_P Parameter: Tissue Value: Whole Plant
  misc_feature: MA Experiment ID: 20001450 Result: Down-regulated in Transcription
  misc_feature: MA Experiment 20001450 PARAMETER Experiment Name: At_Far-red-induction_P Parameter: Age (day) Value: 7
  misc_feature: MA Experiment 20001450 PARAMETER Experiment Name: At_Far-red-induction_P Parameter: Light Value: Far-red vs. White
  misc_feature: MA Experiment 20001450 PARAMETER Experiment Name: At_Far-red-induction_P Parameter: Organism Value: A. thaliana
  misc_feature: MA Experiment 20001450 PARAMETER Experiment Name: At_Far-red-induction_P Parameter: Plant Line Value: Columbia
  misc_feature: MA Experiment 20001450 PARAMETER Experiment Name: At_Far-red-induction_P Parameter: Timepoint (hr) Value: 8
  misc_feature: MA Experiment 20001450 PARAMETER Experiment Name: At_Far-red-induction_P Parameter: Tissue Value: Whole Plant
  misc_feature: MA Experiment ID: 20001451 Result: Down-regulated in Transcription
  misc_feature: MA Experiment 20001451 PARAMETER Experiment Name: At_Far-red-induction_P Parameter: Age (day) Value: 7
  misc_feature: MA Experiment 20001451 PARAMETER Experiment Name: At_Far-red-induction_P Parameter: Light Value: Far-red vs. White
  misc_feature: MA Experiment 20001451 PARAMETER Experiment Name: At_Far-red-induction_P Parameter: Organism Value: A. thaliana
  misc_feature: MA Experiment 20001451 PARAMETER Experiment Name: At_Far-red-induction_P Parameter: Plant Line Value: Columbia
  misc_feature: MA Experiment 20001451 PARAMETER Experiment Name: At_Far-red-induction_P Parameter: Timepoint (hr) Value: 24
  misc_feature: MA Experiment 20001451 PARAMETER Experiment Name: At_Far-red-induction_P Parameter: Tissue Value: Whole Plant
  misc_feature: MA Experiment ID: 20001560 Result: Down-regulated in Transcription
  misc_feature: MA Experiment 20001560 PARAMETER Experiment Name: At_Drought_Soil_Dry_P Parameter: Age (day) Value: 28
  misc_feature: MA Experiment 20001560 PARAMETER Experiment Name: At_Drought_Soil_Dry_P Parameter: Organism Value: A. thaliana
  misc_feature: MA Experiment 20001560 PARAMETER Experiment Name: At_Drought_Soil_Dry_P Parameter: Plant Line Value: WS
  misc_feature: MA Experiment 20001560 PARAMETER Experiment Name: At_Drought_Soil_Dry_P Parameter: Post Timepoint (hr) Value: None
  misc_feature: MA Experiment 20001560 PARAMETER Experiment Name: At_Drought_Soil_Dry_P Parameter: Post-Treatment Value: None
  misc_feature: MA Experiment 20001560 PARAMETER Experiment Name: At_Drought_Soil_Dry_P Parameter: Timepoint (day) Value: 14
  misc_feature: MA Experiment 20001560 PARAMETER Experiment Name: At_Drought_Soil_Dry_P Parameter: Treatment Value: Drought vs. No Drought
gaagaacaaacacaaaaatggcgacggtaccattgttcacccagtttccctgcaaaaccctaaatccaagctcatcaaacactaaacaccaatcgaaatctccgatcctactaccgattaactcaataaatcgatcggagattggagtctctgttcatcggccagatttcaaaatccgagcgacggacatcgacgacgaatggggtcaagatggagtggagagagtatttgcctcatcttcaaccgtatcggtagcagataaagcaatcgaatccgtggaggagacggagaggctaaagagatcactagcggattcgttgtacggaacagatcgaggtttaagcgtatcgagtgatacgagagctgagatcagcgagctcatcacacagctcgagtctaagaaccctactccagctcctaacgaagctctgtttctcctcaacggcaaatggatcctcgcctacacgtcgttcgtggggttgttcccattgctctcacgaagaattgaaccgttggttaaagtggatgagatctcacaaaccattgattccgatagcttcaccgttcaaaactctgtccggttcgctggtccgttttccacaacgtcgtttagcaccaacgctaagtttgaaatccgaagtcctaaacgtgtccagattaagttcgagcaaggtgttatagggactcctcagctaacggattcgattgaaataccggaatccgtggaggttcttggtcagaaaatcgatctcaatcccattaaaggtttacttacatcagtccaagacactgcttcttcagtggctagaaccatttcaaaccaaccaccattgaagttttctctgcctagtgacaacacgcagtcgtggctgctcacaacttatctcgacaaggaccttcggatctcgagaggcgatggtggaagcgtctatgtgctcatcaaagaaggaagctctctcttaaacccttaaatcatcataactctcatcacatccatagtaacatatatacaagtatagacccatctgtctatgtttactagtgttgtaactgttatatagcttctttacctgttggagagttataaacttataatggatgttactcttggtatactgtactacaatacatatacataactacatacttgaacaggcc

SEQ ID NO: 24888 - protein, 322 aa, Arabidopsis thaliana
  peptide (1)..(322): Ceres Seq. ID no. 12324873
  misc_feature (96)..(313): Pfam Name: PAP_fibrillin Pfam Description: PAP_fibrillin
  misc_feature (6)..(322): Homolog of NCBI NO: 22261807 NR Description: Light-induced protein, chloroplast precursor
  misc_feature (86)..(322): Homolog of NCBI NO: 4139097 NR Description: fibrillin [Brassica napus]
  misc_feature (6)..(322): Homolog of NCBI NO: 21618237 NR Description: fibrillin precursor-like protein [Arabidopsis
  misc_feature (6)..(322): Homolog of NCBI NO: 14248550 NR Description: plastid-lipid associated protein PAP2 [Brassica
  misc_feature (6)..(322): Homolog of NCBI NO: 18377868 NR Description: AT4g22240/T10I14_70 [Arabidopsis thaliana]
  misc_feature (6)..(322): Homolog of NCBI NO: 14248556 NR Description: plastid-lipid associated protein PAP2 [Brassica
  misc_feature (6)..(322): Homolog of NCBI NO: 15235575 NR Description: fibrillin precursor-like protein
  misc_feature (8)..(322): Homolog of NCBI NO: 14248548 NR Description: plastid-lipid associated protein PAP1 [Brassica
  misc_feature (8)..(322): Homolog of NCBI NO: 14248554 NR Description: plastid-lipid associated protein PAP1 [Brassica
  misc_feature (6)..(322): Homolog of NCBI NO: 15233357 NR Description: putative fibrillin
RTNTKMATVPLFTQFPCKTLNPSSSNTKHQSKSPILLPINSINRSEIGVSVHRPDFKIRATDIDDEWGQDGVERVFASSSTVSVADKAIESVEETERLKRSLADSLYGTDRGLSVSSDTRAEISELITQLESKNPTPAPNEALFLLNGKWILAYTSFVGLFPLLSRRIEPLVKVDEISQTIDSDSFTVQNSVRFAGPFSTTSFSTNAKFEIRSPKRVQIKFEQGVIGTPQLTDSIEIPESVEVLGQKIDLNPIKGLLTSVQDTASSVARTISNQPPLKFSLPSDNTQSWLLTTYLDKDLRISRGDGGSVYVLIKEGSSLLNP

SEQ ID NO: 24889 - protein, 317 aa, Arabidopsis thaliana
  peptide (1)..(317): Ceres Seq. ID no. 12324874
  misc_feature (91)..(308): Pfam Name: PAP_fibrillin Pfam Description: PAP_fibrillin
  misc_feature (1)..(317): Homolog of NCBI NO: 22261807 NR Description: Light-induced protein, chloroplast precursor
  misc_feature (81)..(317): Homolog of NCBI NO: 4139097 NR Description: fibrillin [Brassica napus]
  misc_feature (1)..(317): Homolog of NCBI NO: 21618237 NR Description: fibrillin precursor-like protein [Arabidopsis
  misc_feature (1)..(317): Homolog of NCBI NO: 14248550 NR Description: plastid-lipid associated protein PAP2 [Brassica
  misc_feature (1)..(317): Homolog of NCBI NO: 18377868 NR Description: AT4g22240/T10I14_70 [Arabidopsis thaliana]
  misc_feature (1)..(317): Homolog of NCBI NO: 14248556 NR Description: plastid-lipid associated protein PAP2 [Brassica
  misc_feature (1)..(317): Homolog of NCBI NO: 15235575 NR Description: fibrillin precursor-like protein
  misc_feature (3)..(317): Homolog of NCBI NO: 14248548 NR Description: plastid-lipid associated protein PAP1 [Brassica
  misc_feature (3)..(317): Homolog of NCBI NO: 14248554 NR Description: plastid-lipid associated protein PAP1 [Brassica
  misc_feature (1)..(317): Homolog of NCBI NO: 15233357 NR Description: putative fibrillin
MATVPLFTQFPCKTLNPSSSNTKHQSKSPILLPINSINRSEIGVSVHRPDFKIRATDIDDEWGQDGVERVFASSSTVSVADKAIESVEETERLKRSLADSLYGTDRGLSVSSDTRAEISELITQLESKNPTPAPNEALFLLNGKWILAYTSFVGLFPLLSRRIEPLVKVDEISQTIDSDSFTVQNSVRFAGPFSTTSFSTNAKFEIRSPKRVQIKFEQGVIGTPQLTDSIEIPESVEVLGQKIDLNPIKGLLTSVQDTASSVARTISNQPPLKFSLPSDNTQSWLLTTYLDKDLRISRGDGGSVYVLIKEGSSLLNP

SEQ ID NO: 24890 - DNA, 933 bp, Arabidopsis thaliana
  misc_feature (1)..(933): Ceres Seq. ID no. 12327528
  misc_feature: MA Experiment ID: 108462 Result: Down-regulated in Transcription
  misc_feature: MA Experiment 108462 PARAMETER Experiment Name: At_Germinating_Seeds_cDNA_P Parameter: Age (day) Value: 2 vs. 0
  misc_feature: MA Experiment 108462 PARAMETER Experiment Name: At_Germinating_Seeds_cDNA_P Parameter: Tissue Value: Germinating Seeds
  misc_feature: MA Experiment ID: 108463 Result: Down-regulated in Transcription
  misc_feature: MA Experiment 108463 PARAMETER Experiment Name: At_Germinating_Seeds_cDNA_P Parameter: Age (day) Value: 3 vs. 0
  misc_feature: MA Experiment 108463 PARAMETER Experiment Name: At_Germinating_Seeds_cDNA_P Parameter: Tissue Value: Germinating Seeds
  misc_feature: MA Experiment ID: 108464 Result: Down-regulated in Transcription
  misc_feature: MA Experiment 108464 PARAMETER Experiment Name: At_Germinating_Seeds_cDNA_P Parameter: Age (day) Value: 4 vs. 0
  misc_feature: MA Experiment 108464 PARAMETER Experiment Name: At_Germinating_Seeds_cDNA_P Parameter: Tissue Value: Germinating Seeds
  misc_feature: MA Experiment ID: 20000235 Result: Up-regulated in Transcription
  misc_feature: MA Experiment 20000235 PARAMETER Experiment Name: At_Siliques_P Parameter: Age (day) Value: 21
  misc_feature: MA Experiment 20000235 PARAMETER Experiment Name: At_Siliques_P Parameter: Organism Value: A. thaliana
  misc_feature: MA Experiment 20000235 PARAMETER Experiment Name: At_Siliques_P Parameter: Plant Line Value: WS
  misc_feature: MA Experiment 20000235 PARAMETER Experiment Name: At_Siliques_P Parameter: Tissue Value: 5-10mm Siliques vs. Whole Plant
aaaaggcgttacagagaagaagaagaagaagaagaagaaggagaaatgtcagacgacgacgagagaggcgaagagtacctcttcaagattgttatcatcggtgattccgccgtcggcaaatccaatctcctcactcgctacgcccgtaacgagttcaatcccaattccaaagccactatcggcgtcgagtttcagactcagagcatgctcatcgacggcaaagaggtcaaagctcagatttgggataccgccggtcaggaacgcttccgcgccgttacatctgcttattaccgtggcgccgttggagccctcgtcgtctacgatatcactcgtagctccactttcgaaaacgtcggtcgctggctcgatgagctcaacactcattctgatacaacagtagcaaaaatgcttattgggaacaaatgtgatctcgagagcataagagcggtgagtgttgaggaaggcaagagtcttgctgagtctgaaggtttgtttttcatggagacctctgcgttggactcgaccaatgtaaagacggctttcgagatggttattcgggagatctatagcaacattagtcgaaagcaattgaactctgattcttacaaagaggagctgactgtgaatcgtgttagcttggttaagaacgagaacgaagggacaaagacattctcttgctgttcgaggtaacatctttgtaacggtttctctttgtcctgaggattggtttcgggttgaattgtgttcctggtaaacttatagaaaggcagagatatattcttatagttctcagttaaagtaaaagaagaagagagaaagatgttttgagtttctttgttacgcatacagaaaaagtttggttagtgtataagttatgttctcatttgtaacttttgtaaacttatgattgttaaatcaattttgatattttcc

SEQ ID NO: 24891 - protein, 229 aa, Arabidopsis thaliana
  peptide (1)..(229): Ceres Seq. ID no. 12327529
  misc_feature (29)..(190): Pfam Name: Ras family Pfam Description: Ras family
  misc_feature (16)..(228): Homolog of NCBI NO: 1076457 NR Description: GTP-binding protein bra - rape
  misc_feature (16)..(228): Homolog of NCBI NO: 21553627 NR Description: putative RAS superfamily GTP-binding protein
  misc_feature (16)..(228): Homolog of NCBI NO: 17380746 NR Description: putative RAS-related protein ARA-1 [Arabidopsis
  misc_feature (16)..(228): Homolog of NCBI NO: 29893534 NR Description: putative RAS-related protein ARA-1 [Arabidopsis
  misc_feature (17)..(228): Homolog of NCBI NO: 1370154 NR Description: RAB11G [Lotus japonicus]
  misc_feature (16)..(228): Homolog of NCBI NO: 18390575 NR Description: RAS-related GTP-binding protein (ARA-1)
  misc_feature (16)..(228): Homolog of NCBI NO: 15225121 NR Description: GTP-binding protein, putative
  misc_feature (16)..(229): Homolog of NCBI NO: 15224226 NR Description: Ras-related GTP-binding protein (ARA-4)
KRRYREEEEEEEEGEMSDDDERGEEYLFKIVIIGDSAVGKSNLLTRYARNEFNPNSKATIGVEFQTQSMLIDGKEVKAQIWDTAGQERFRAVTSAYYRGAVGALVVYDITRSSTFENVGRWLDELNTHSDTTVAKMLIGNKCDLESIRAVSVEEGKSLAESEGLFFMETSALDSTNVKTAFEMVIREIYSNISRKQLNSDSYKEELTVNRVSLVKNENEGTKTFSCCSR

SEQ ID NO: 24892 - protein, 214 aa, Arabidopsis thaliana
  peptide (1)..(214): Ceres Seq. ID no. 12327530
  misc_feature (14)..(175): Pfam Name: Ras family Pfam Description: Ras family
  misc_feature (2)..(213): Homolog of NCBI NO: 1370154 NR Description: RAB11G [Lotus japonicus]
  misc_feature (1)..(213): Homolog of NCBI NO: 1076457 NR Description: GTP-binding protein bra - rape
  misc_feature (1)..(213): Homolog of NCBI NO: 21553627 NR Description: putative RAS superfamily GTP-binding protein
  misc_feature (1)..(213): Homolog of NCBI NO: 17380746 NR Description: putative RAS-related protein ARA-1 [Arabidopsis
  misc_feature (1)..(213): Homolog of NCBI NO: 29893534 NR Description: putative RAS-related protein ARA-1 [Arabidopsis
  misc_feature (1)..(213): Homolog of NCBI NO: 18390575 NR Description: RAS-related GTP-binding protein (ARA-1)
  misc_feature (1)..(213): Homolog of NCBI NO: 15225121 NR Description: GTP-binding protein, putative
  misc_feature (1)..(214): Homolog of NCBI NO: 15224226 NR Description: Ras-related GTP-binding protein (ARA-4)
MSDDDERGEEYLFKIVIIGDSAVGKSNLLTRYARNEFNPNSKATIGVEFQTQSMLIDGKEVKAQIWDTAGQERFRAVTSAYYRGAVGALVVYDITRSSTFENVGRWLDELNTHSDTTVAKMLIGNKCDLESIRAVSVEEGKSLAESEGLFFMETSALDSTNVKTAFEMVIREIYSNISRKQLNSDSYKEELTVNRVSLVKNENEGTKTFSCCSR

SEQ ID NO: 24893 - protein, 161 aa, Arabidopsis thaliana
  peptide (1)..(161): Ceres Seq. ID no. 12327531
  misc_feature (1)..(122): Pfam Name: Ras family Pfam Description: Ras family
  misc_feature (1)..(160): Homolog of NCBI NO: 1370154 NR Description: RAB11G [Lotus japonicus]
  misc_feature (1)..(160): Homolog of NCBI NO: 1076457 NR Description: GTP-binding protein bra - rape
  misc_feature (1)..(160): Homolog of NCBI NO: 21553627 NR Description: putative RAS superfamily GTP-binding protein
  misc_feature (1)..(160): Homolog of NCBI NO: 17380746 NR Description: putative RAS-related protein ARA-1 [Arabidopsis
  misc_feature (1)..(160): Homolog of NCBI NO: 29893534 NR Description: putative RAS-related protein ARA-1 [Arabidopsis
  misc_feature (1)..(160): Homolog of NCBI NO: 18390575 NR Description: RAS-related GTP-binding protein (ARA-1)
  misc_feature (1)..(160): Homolog of NCBI NO: 15225121 NR Description: GTP-binding protein, putative
  misc_feature (1)..(161): Homolog of NCBI NO: 15224226 NR Description: Ras-related GTP-binding protein (ARA-4)
MLIDGKEVKAQIWDTAGQERFRAVTSAYYRGAVGALVVYDITRSSTFENVGRWLDELNTHSDTTVAKMLIGNKCDLESIRAVSVEEGKSLAESEGLFFMETSALDSTNVKTAFEMVIREIYSNISRKQLNSDSYKEELTVNRVSLVKNENEGTKTFSCCSR

SEQ ID NO: 24894 - DNA, 838 bp, Arabidopsis thaliana
  misc_feature (1)..(838): Ceres Seq. ID no. 12482922
  misc_feature: MA Experiment ID: 108569 Result: Up-regulated in Transcription
  misc_feature: MA Experiment 108569 PARAMETER Experiment Name: At_0.001%_MeJA__cDNA_P Parameter: Timepoint (hr) Value: 6
  misc_feature: MA Experiment 108569 PARAMETER Experiment Name: At_0.001%_MeJA__cDNA_P Parameter: Tissue Value: Aerial
  misc_feature: MA Experiment 108569 PARAMETER Experiment Name: At_0.001%_MeJA__cDNA_P Parameter: Treatment Value: 0.001% MeJA vs. No Treatment
  misc_feature: MA Experiment ID: 108594 Result: Down-regulated in Transcription
  misc_feature: MA Experiment 108594 PARAMETER Experiment Name: At_Ler-rhl_Root_cDNA_P Parameter: Plant Line Value: null
  misc_feature: MA Experiment ID: 20000439 Result: Down-regulated in Transcription
  misc_feature: MA Experiment 20000439 PARAMETER Experiment Name: At_Roots__P Parameter: Age (day) Value: 14 vs. 21
  misc_feature: MA Experiment 20000439 PARAMETER Experiment Name: At_Roots__P Parameter: Organism Value: A. thaliana
  misc_feature: MA Experiment 20000439 PARAMETER Experiment Name: At_Roots__P Parameter: Tissue Value: Roots vs. Whole Plant
  misc_feature: MA Experiment ID: 20001248 Result: Down-regulated in Transcription
  misc_feature: MA Experiment 20001248 PARAMETER Experiment Name: At_Far-red-induction_P Parameter: Age (day) Value: 7
  misc_feature: MA Experiment 20001248 PARAMETER Experiment Name: At_Far-red-induction_P Parameter: Light Value: Far-red vs. White
  misc_feature: MA Experiment 20001248 PARAMETER Experiment Name: At_Far-red-induction_P Parameter: Organism Value: A. thaliana
  misc_feature: MA Experiment 20001248 PARAMETER Experiment Name: At_Far-red-induction_P Parameter: Plant Line Value: Columbia
  misc_feature: MA Experiment 20001248 PARAMETER Experiment Name: At_Far-red-induction_P Parameter: Timepoint (hr) Value: 4
  misc_feature: MA Experiment 20001248 PARAMETER Experiment Name: At_Far-red-induction_P Parameter: Tissue Value: Whole Plant
  misc_feature: MA Experiment ID: 20001905 Result: Up-regulated in Transcription
  misc_feature: MA Experiment 20001905 PARAMETER Experiment Name: At_Drought_Reproduction_P Parameter: Age (day) Value: 40
  misc_feature: MA Experiment 20001905 PARAMETER Experiment Name: At_Drought_Reproduction_P Parameter: Organism Value: A. thaliana
  misc_feature: MA Experiment 20001905 PARAMETER Experiment Name: At_Drought_Reproduction_P Parameter: Plant Line Value: WS
  misc_feature: MA Experiment 20001905 PARAMETER Experiment Name: At_Drought_Reproduction_P Parameter: Timepoint (day) Value: 10
  misc_feature: MA Experiment 20001905 PARAMETER Experiment Name: At_Drought_Reproduction_P Parameter: Tissue Value: Rosettes
  misc_feature: MA Experiment 20001905 PARAMETER Experiment Name: At_Drought_Reproduction_P Parameter: Treatment Value: Drought vs. No Drought
  misc_feature: Phenotype: FERTILITY Fertility-Reduced
  misc_feature: Phenotype: ROSETTE LEAVES Shape-Serrate
  misc_feature: Phenotype: ROSETTE LEAVES Other
  misc_feature: Phenotype: WHOLE PLANT Color-Dark Green
  misc_feature: Phenotype: WHOLE PLANT Size-Small
  misc_feature: Phenotype: INFLORESCENCE Flowering Time-Late Flowering
  misc_feature: Phenotype: ROSETTE LEAVES Shape-Serrate
  misc_feature: Phenotype: ROSETTE LEAVES Other
  misc_feature: Phenotype: WHOLE PLANT Color-Dark Green
  misc_feature: Phenotype: WHOLE PLANT Size-Small
  misc_feature: Phenotype: INFLORESCENCE Flowering Time-Late Flowering
  misc_feature: Phenotype: FERTILITY Fertility-Reduced
  misc_feature: Phenotype: FERTILITY Fertility-Reduced
ttttttcgttcgactcatctccaaagagaagcttcaaaaaatggcttgcaaaacgattttgcgttccgttttcgtatcggaatcacgacggacttccggcgcacgtagatgcttctttctccctccttctccagcatcagttccagtccatggtttgttcccggcgccaaagagtctatgtttcaatggttttgcatctgttcccgagcgggctactcggcttaattgcagccataacgatcaatccgatcaaggtccgcctcaagaagctgttctcaaggcaatctcagaagtgtcaaagactgatgggagggttgggaaaactactaacatgattattggaggcactgtggctgatgattctgctaaagattggctcgaacttgaccaaaaggtcaatacatacccaacagaaagagggtttactgcaattgggactggtggcaatgactttgtgcatgctatggttgttgctgttgaatctgttattgaccgacaaattccagaggactgtgtaaagcagactttatcaagcaaaggaaaatatgtgtcggtgaatattggccctatccaagtcgtctctagtgagcaggttcaagctgtgtataatgcaatgaggagagacgaaagaatgaaatacttcttgtaggtttgaagtgtgtagaatcacgggtcttctcttttctatcttctccattgcgactatgtaaattatgcagtgtaaggccaccattaattattatttatacttatctacactaacttctgttagacactccttagacagtgtcttatgcatctgaaggaattagtggatatatcaaaaaatgacttatac

SEQ ID NO: 24895 - protein, 215 aa, Arabidopsis thaliana
  peptide (1)..(215): Ceres Seq. ID no. 12482923
  misc_feature (124)..(215): Pfam Name: Protein of unknown function (DUF493) Pfam Description: Protein of unknown function (DUF493)
  misc_feature (197)..(215): Homolog of NCBI NO: 38347226 NR Description: OSJNBa0044M19.8 [Oryza sativa (japonica
  misc_feature (68)..(173): Homolog of NCBI NO: 38347226 NR Description: OSJNBa0044M19.8 [Oryza sativa (japonica
  misc_feature (14)..(215): Homolog of NCBI NO: 18396311 NR Description: Expressed protein
FFVRLISKEKLQKMACKTILRSVFVSESRRTSGARRCFFLPPSPASVPVHGLFPAPKSLCFNGFASVPERATRLNCSHNDQSDQGPPQEAVLKAISEVSKTDGRVGKTTNMIIGGTVADDSAKDWLELDQKVNTYPTERGFTAIGTGGNDFVHAMVVAVESVIDRQIPEDCVKQTLSSKGKYVSVNIGPIQVVSSEQVQAVYNAMRRDERMKYFL

SEQ ID NO: 24896 - protein, 202 aa, Arabidopsis thaliana
  peptide (1)..(202): Ceres Seq. ID no. 12482924
  misc_feature (111)..(202): Pfam Name: Protein of unknown function (DUF493) Pfam Description: Protein of unknown function (DUF493)
  misc_feature (184)..(202): Homolog of NCBI NO: 38347226 NR Description: OSJNBa0044M19.8 [Oryza sativa (japonica
  misc_feature (55)..(160): Homolog of NCBI NO: 38347226 NR Description: OSJNBa0044M19.8 [Oryza sativa (japonica
  misc_feature (1)..(202): Homolog of NCBI NO: 18396311 NR Description: Expressed protein
MACKTILRSVFVSESRRTSGARRCFFLPPSPASVPVHGLFPAPKSLCFNGFASVPERATRLNCSHNDQSDQGPPQEAVLKAISEVSKTDGRVGKTTNMIIGGTVADDSAKDWLELDQKVNTYPTERGFTAIGTGGNDFVHAMVVAVESVIDRQIPEDCVKQTLSSKGKYVSVNIGPIQVVSSEQVQAVYNAMRRDERMKYFL

SEQ ID NO: 24897 - protein, 110 aa, Arabidopsis thaliana
  peptide (1)..(110): Ceres Seq. ID no. 12482925
FSFDSSPKRSFKKWLAKRFCVPFSYRNHDGLPAHVDASFSLLLQHQFQSMVCSRRQRVYVSMVLHLFPSGLLGLIAAITINPIKVRLKKLFSRQSQKCQRLMGGLGKLLT

SEQ ID NO: 24898 - DNA, 1232 bp, Arabidopsis thaliana
  misc_feature (1)..(1232): Ceres Seq. ID no. 12324850
  misc_feature: MA Experiment ID: 108434 Result: Down-regulated in Transcription
  misc_feature: MA Experiment 108434 PARAMETER Experiment Name: At_Root_Tips_cDNA_P Parameter: Tissue Value: Root Tips
  misc_feature: MA Experiment ID: 108461 Result: Up-regulated in Transcription
  misc_feature: MA Experiment 108461 PARAMETER Experiment Name: At_Germinating_Seeds_cDNA_P Parameter: Age (day) Value: 1 vs. 0
  misc_feature: MA Experiment 108461 PARAMETER Experiment Name: At_Germinating_Seeds_cDNA_P Parameter: Tissue Value: Germinating Seeds
  misc_feature: MA Experiment ID: 108462 Result: Up-regulated in Transcription
  misc_feature: MA Experiment 108462 PARAMETER Experiment Name: At_Germinating_Seeds_cDNA_P Parameter: Age (day) Value: 2 vs. 0
  misc_feature: MA Experiment 108462 PARAMETER Experiment Name: At_Germinating_Seeds_cDNA_P Parameter: Tissue Value: Germinating Seeds
  misc_feature: MA Experiment ID: 108561 Result: Up-regulated in Transcription
  misc_feature: MA Experiment 108561 PARAMETER Experiment Name: At_100uM_ABA_cDNA_P Parameter: Timepoint (hr) Value: 6
  misc_feature: MA Experiment 108561 PARAMETER Experiment Name: At_100uM_ABA_cDNA_P Parameter: Tissue Value: Aerial
  misc_feature: MA Experiment 108561 PARAMETER Experiment Name: At_100uM_ABA_cDNA_P Parameter: Treatment Value: 100uM ABA vs. No Treatment
  misc_feature: MA Experiment ID: 108573 Result: Up-regulated in Transcription
  misc_feature: MA Experiment 108573 PARAMETER Experiment Name: At_Drought_cDNA_P Parameter: Timepoint (hr) Value: 6
  misc_feature: MA Experiment 108573 PARAMETER Experiment Name: At_Drought_cDNA_P Parameter: Tissue Value: Aerial
  misc_feature: MA Experiment 108573 PARAMETER Experiment Name: At_Drought_cDNA_P Parameter: Treatment Value: Drought vs. No Drought
  misc_feature: MA Experiment ID: 108595 Result: Up-regulated in Transcription
  misc_feature: MA Experiment 108595 PARAMETER Experiment Name: At_Ler-pi_Ovule_cDNA_P Parameter: Plant Line Value: null
  misc_feature: MA Experiment ID: 108607 Result: Up-regulated in Transcription
  misc_feature: MA Experiment 108607 PARAMETER Experiment Name: At_100uM_ABA_cDNA_P Parameter: Timepoint (hr) Value: 4
  misc_feature: MA Experiment 108607 PARAMETER Experiment Name: At_100uM_ABA_cDNA_P Parameter: Tissue Value: Aerial
  misc_feature: MA Experiment 108607 PARAMETER Experiment Name: At_100uM_ABA_cDNA_P Parameter: Treatment Value: 100uM ABA vs. No Treatment
  misc_feature: MA Experiment ID: 20000069 Result: Up-regulated in Transcription
  misc_feature: MA Experiment 20000069 PARAMETER Experiment Name: At_100uM_ABA_Mutants_cDNA_P Parameter: Plant Line Value: CS23
  misc_feature: MA Experiment 20000069 PARAMETER Experiment Name: At_100uM_ABA_Mutants_cDNA_P Parameter: Timepoint (hr) Value: 6
  misc_feature: MA Experiment 20000069 PARAMETER Experiment Name: At_100uM_ABA_Mutants_cDNA_P Parameter: Tissue Value: Aerial
  misc_feature: MA Experiment 20000069 PARAMETER Experiment Name: At_100uM_ABA_Mutants_cDNA_P Parameter: Treatment Value: 100uM ABA vs. No Treatment
  misc_feature: MA Experiment ID: 20000070 Result: Up-regulated in Transcription
  misc_feature: MA Experiment 20000070 PARAMETER Experiment Name: At_100uM_ABA_Mutants_cDNA_P Parameter: Plant Line Value: CS24
  misc_feature: MA Experiment 20000070 PARAMETER Experiment Name: At_100uM_ABA_Mutants_cDNA_P Parameter: Timepoint (hr) Value: 6
  misc_feature: MA Experiment 20000070 PARAMETER Experiment Name: At_100uM_ABA_Mutants_cDNA_P Parameter: Tissue Value: Aerial
  misc_feature: MA Experiment 20000070 PARAMETER Experiment Name: At_100uM_ABA_Mutants_cDNA_P Parameter: Treatment Value: 100uM ABA vs. No Treatment
  misc_feature: MA Experiment ID: 20000071 Result: Up-regulated in Transcription
  misc_feature: MA Experiment 20000071 PARAMETER Experiment Name: At_100uM_ABA_Mutants_cDNA_P Parameter: Plant Line Value: CS8104
  misc_feature: MA Experiment 20000071 PARAMETER Experiment Name: At_100uM_ABA_Mutants_cDNA_P Parameter: Timepoint (hr) Value: 6
  misc_feature: MA Experiment 20000071 PARAMETER Experiment Name: At_100uM_ABA_Mutants_cDNA_P Parameter: Tissue Value: Aerial
  misc_feature: MA Experiment 20000071 PARAMETER Experiment Name: At_100uM_ABA_Mutants_cDNA_P Parameter: Treatment Value: 100uM ABA vs. No Treatment
  misc_feature: MA Experiment ID: 20000072 Result: Up-regulated in Transcription
  misc_feature: MA Experiment 20000072 PARAMETER Experiment Name: At_100uM_ABA_Mutants_cDNA_P Parameter: Plant Line Value: CS8105
  misc_feature: MA Experiment 20000072 PARAMETER Experiment Name: At_100uM_ABA_Mutants_cDNA_P Parameter: Timepoint (hr) Value: 6
  misc_feature: MA Experiment 20000072 PARAMETER Experiment Name: At_100uM_ABA_Mutants_cDNA_P Parameter: Tissue Value: Aerial
  misc_feature: MA Experiment 20000072 PARAMETER Experiment Name: At_100uM_ABA_Mutants_cDNA_P Parameter: Treatment Value: 100uM ABA vs. No Treatment
  misc_feature: MA Experiment ID: 20000088 Result: Up-regulated in Transcription
  misc_feature: MA Experiment 20000088 PARAMETER Experiment Name: At_100uM_ABA_Mutants_cDNA_P Parameter: Plant Line Value: Landsberg
  misc_feature: MA Experiment 20000088 PARAMETER Experiment Name: At_100uM_ABA_Mutants_cDNA_P Parameter: Timepoint (hr) Value: 6
  misc_feature: MA Experiment 20000088 PARAMETER Experiment Name: At_100uM_ABA_Mutants_cDNA_P Parameter: Tissue Value: Aerial
  misc_feature: MA Experiment 20000088 PARAMETER Experiment Name: At_100uM_ABA_Mutants_cDNA_P Parameter: Treatment Value: 100uM ABA vs. No Treatment
  misc_feature: MA Experiment ID: 20000111 Result: Down-regulated in Transcription
  misc_feature: MA Experiment 20000111 PARAMETER Experiment Name: At_42deg_Heat_cDNA_P Parameter: Temperature (deg C) Value: 42 vs. 22
  misc_feature: MA Experiment 20000111 PARAMETER Experiment Name: At_42deg_Heat_cDNA_P Parameter: Timepoint (hr) Value: 6
  misc_feature: MA Experiment 20000111 PARAMETER Experiment Name: At_42deg_Heat_cDNA_P Parameter: Tissue Value: Aerial
  misc_feature: MA Experiment ID: 20000117 Result: Up-regulated in Transcription
  misc_feature: MA Experiment 20000117 PARAMETER Experiment Name: At_100uM_ABA_Mutants_cDNA_P Parameter: Plant Line Value: Columbia
  misc_feature: MA Experiment 20000117 PARAMETER Experiment Name: At_100uM_ABA_Mutants_cDNA_P Parameter: Timepoint (hr) Value: 6
  misc_feature: MA Experiment 20000117 PARAMETER Experiment Name: At_100uM_ABA_Mutants_cDNA_P Parameter: Tissue Value: Aerial
  misc_feature: MA Experiment 20000117 PARAMETER Experiment Name: At_100uM_ABA_Mutants_cDNA_P Parameter: Treatment Value: 100uM ABA vs. No Treatment
atttgaacatggcatatcttataaagaaaaaaaattctcgttatgagattcattaaacttttctatttattttcaataatatcctacattttttttgttgattaaccaagttaagttttaaaagctaaatgtttctaaacaaaaggacaaaatttctactattgcgagcctttcgaaccaaaaagttggcgctaacatttaatcacatgatcagtttcattatcctgtagtgtataatacaactaagcgtgtttgtgtgtatgtttcaaacaaatgattagaaatggcatgcgtgggagggaaggattggtatttctacagccaaagagaccgaaaatacgcgacggggctgagaactaaccgagcaacggccaccggatattggaaagccaccggcaaagacagaaccattctaagaaagggtaagctagttgggatgaggaagacattggttttctatcaaggtcgagctcctcgaggccgtaaaaccgattgggtcatgcacgaattccgtctccaaggatctcatcatcctcccaatcattctctgagctctccaaaggaagactgggtcttgtgtagggtattccataagaatacggaaggagttatatgtagagacaacatgggaagctgttttgatgagacagcctctgcatcgcttcctccactgatggatccttacatcaactttgaccaagaaccctcttcttatctcagtgatgatcatcactacatcatcaatgagcacgtaccctgcttctccaatttgtcacagaaccaaaccttaaactcgaacctaaccaactcagtctctgaactcaagattccatgcaagaaccctaaccccttgtttactggtggttcagcctcagccacgctcacaggcctcgactcattctgttcttcagatcagatggttctcagagctctactcagtcagctcactaagattgatggaagcctcgggcctaaagaatcacagagttatggagaaggtagctcggagagcctcctgaccgacatcggtataccaagcactgtttggaattgctgatgatcgagtgtaacgagagttactattgctatattcctatccatgattggaacaattcttcggggggaaataacgtgtgcttgtctgattgtacaaacatttcctcactcttgtacccacggtagattcatgtaaaataccacttatgacgctagacatacatatatttcatcgc

SEQ ID NO: 24899 - protein, 257 aa, Arabidopsis thaliana
  peptide (1)..(257): Ceres Seq. ID no. 12324851
  misc_feature (1)..(79): Pfam Name: No apical meristem (NAM) protein Pfam Description: No apical meristem (NAM) protein
  misc_feature (1)..(248): Homolog of NCBI NO: 15240252 NR Description: NAM, no apical meristem, - like protein
  misc_feature (2)..(218): Homolog of NCBI NO: 30682054 NR Description: NAM (no apical meristem)-related protein
  misc_feature (2)..(218): Homolog of NCBI NO: 30682048 NR Description: NAM (no apical meristem)-related protein
  misc_feature (2)..(178): Homolog of NCBI NO: 21105757 NR Description: nam-like protein 14 [Petunia x hybrida]
  misc_feature (1)..(163): Homolog of NCBI NO: 38636961 NR Description: putative NAC domain protein NAC1
  misc_feature (1)..(178): Homolog of NCBI NO: 15795128 NR Description: NAM (no apical meristem) protein-like
  misc_feature (1)..(256): Homolog of NCBI NO: 15148912 NR Description: NAC domain protein NAC1 [Phaseolus vulgaris]
  misc_feature (14)..(257): Homolog of NCBI NO: 25404083 NR Description: hypothetical protein T6H22.19 [imported] -
  misc_feature (1)..(257): Homolog of NCBI NO: 30696045 NR Description: NAC1 / No apical meristem (NAM) protein family
  misc_feature (1)..(257): Homolog of NCBI NO: 15222818 NR Description: NAC1
MACVGGKDWYFYSQRDRKYATGLRTNRATATGYWKATGKDRTILRKGKLVGMRKTLVFYQGRAPRGRKTDWVMHEFRLQGSHHPPNHSLSSPKEDWVLCRVFHKNTEGVICRDNMGSCFDETASASLPPLMDPYINFDQEPSSYLSDDHHYIINEHVPCFSNLSQNQTLNSNLTNSVSELKIPCKNPNPLFTGGSASATLTGLDSFCSSDQMVLRALLSQLTKIDGSLGPKESQSYGEGSSESLLTDIGIPSTVWNC

SEQ ID NO: 24900 - protein, 206 aa, Arabidopsis thaliana
  peptide (1)..(206): Ceres Seq. ID no. 12324852
  misc_feature (1)..(197): Homolog of NCBI NO: 15240252 NR Description: NAM, no apical meristem, - like protein
  misc_feature (1)..(167): Homolog of NCBI NO: 30682054 NR Description: NAM (no apical meristem)-related protein
  misc_feature (1)..(167): Homolog of NCBI NO: 30682048 NR Description: NAM (no apical meristem)-related protein
  misc_feature (1)..(127): Homolog of NCBI NO: 21105757 NR Description: nam-like protein 14 [Petunia x hybrida]
  misc_feature (1)..(112): Homolog of NCBI NO: 38636961 NR Description: putative NAC domain protein NAC1
  misc_feature (1)..(127): Homolog of NCBI NO: 15795128 NR Description: NAM (no apical meristem) protein-like
  misc_feature (1)..(205): Homolog of NCBI NO: 15148912 NR Description: NAC domain protein NAC1 [Phaseolus vulgaris]
  misc_feature (1)..(206): Homolog of NCBI NO: 25404083 NR Description: hypothetical protein T6H22.19 [imported] -
  misc_feature (1)..(206): Homolog of NCBI NO: 30696045 NR Description: NAC1 / No apical meristem (NAM) protein family
  misc_feature (1)..(206): Homolog of NCBI NO: 15222818 NR Description: NAC1
MRKTLVFYQGRAPRGRKTDWVMHEFRLQGSHHPPNHSLSSPKEDWVLCRVFHKNTEGVICRDNMGSCFDETASASLPPLMDPYINFDQEPSSYLSDDHHYIINEHVPCFSNLSQNQTLNSNLTNSVSELKIPCKNPNPLFTGGSASATLTGLDSFCSSDQMVLRALLSQLTKIDGSLGPKESQSYGEGSSESLLTDIGIPSTVWNC

SEQ ID NO: 24901 - protein, 185 aa, Arabidopsis thaliana
  peptide (1)..(185): Ceres Seq. ID no. 12324853
  misc_feature (1)..(176): Homolog of NCBI NO: 15240252 NR Description: NAM, no apical meristem, - like protein
  misc_feature (1)..(146): Homolog of NCBI NO: 30682054 NR Description: NAM (no apical meristem)-related protein
  misc_feature (1)..(146): Homolog of NCBI NO: 30682048 NR Description: NAM (no apical meristem)-related protein
  misc_feature (1)..(106): Homolog of NCBI NO: 21105757 NR Description: nam-like protein 14 [Petunia x hybrida]
  misc_feature (1)..(91): Homolog of NCBI NO: 38636961 NR Description: putative NAC domain protein NAC1
  misc_feature (1)..(106): Homolog of NCBI NO: 15795128 NR Description: NAM (no apical meristem) protein-like
  misc_feature (1)..(184): Homolog of NCBI NO: 15148912 NR Description: NAC domain protein NAC1 [Phaseolus vulgaris]
  misc_feature (1)..(185): Homolog of NCBI NO: 25404083 NR Description: hypothetical protein T6H22.19 [imported] -
  misc_feature (1)..(185): Homolog of NCBI NO: 30696045 NR Description: NAC1 / No apical meristem (NAM) protein family
  misc_feature (1)..(185): Homolog of NCBI NO: 15222818 NR Description: NAC1
MHEFRLQGSHHPPNHSLSSPKEDWVLCRVFHKNTEGVICRDNMGSCFDETASASLPPLMDPYINFDQEPSSYLSDDHHYIINEHVPCFSNLSQNQTLNSNLTNSVSELKIPCKNPNPLFTGGSASATLTGLDSFCSSDQMVLRALLSQLTKIDGSLGPKESQSYGEGSSESLLTDIGIPSTVWNC

SEQ ID NO: 24902 - DNA, 1684 bp, Arabidopsis thaliana
  misc_feature (1)..(1684): Ceres Seq. ID no. 12331203
  misc_feature: MA Experiment ID: 108434 Result: Down-regulated in Transcription
  misc_feature: MA Experiment 108434 PARAMETER Experiment Name: At_Root_Tips_cDNA_P Parameter: Tissue Value: Root Tips
  misc_feature: MA Experiment ID: 108572 Result: Up-regulated in Transcription
  misc_feature: MA Experiment 108572 PARAMETER Experiment Name: At_Drought_cDNA_P Parameter: Timepoint (hr) Value: 1
  misc_feature: MA Experiment 108572 PARAMETER Experiment Name: At_Drought_cDNA_P Parameter: Tissue Value: Aerial
  misc_feature: MA Experiment 108572 PARAMETER Experiment Name: At_Drought_cDNA_P Parameter: Treatment Value: Drought vs. No Drought
  misc_feature: MA Experiment ID: 108573 Result: Up-regulated in Transcription
  misc_feature: MA Experiment 108573 PARAMETER Experiment Name: At_Drought_cDNA_P Parameter: Timepoint (hr) Value: 6
  misc_feature: MA Experiment 108573 PARAMETER Experiment Name: At_Drought_cDNA_P Parameter: Tissue Value: Aerial
  misc_feature: MA Experiment 108573 PARAMETER Experiment Name: At_Drought_cDNA_P Parameter: Treatment Value: Drought vs. No Drought
  misc_feature: MA Experiment ID: 108574 Result: Up-regulated in Transcription
  misc_feature: MA Experiment 108574 PARAMETER Experiment Name: At_Wounding__cDNA_P Parameter: Timepoint (hr) Value: 1
  misc_feature: MA Experiment 108574 PARAMETER Experiment Name: At_Wounding__cDNA_P Parameter: Tissue Value: Aerial
  misc_feature: MA Experiment 108574 PARAMETER Experiment Name: At_Wounding__cDNA_P Parameter: Treatment Value: Wounding vs. No Wounding
  misc_feature: MA Experiment ID: 108595 Result: Up-regulated in Transcription
  misc_feature: MA Experiment 108595 PARAMETER Experiment Name: At_Ler-pi_Ovule_cDNA_P Parameter: Plant Line Value: null
  misc_feature: MA Experiment ID: 108607 Result: Up-regulated in Transcription
  misc_feature: MA Experiment 108607 PARAMETER Experiment Name: At_100uM_ABA_cDNA_P Parameter: Timepoint (hr) Value: 4
  misc_feature: MA Experiment 108607 PARAMETER Experiment Name: At_100uM_ABA_cDNA_P Parameter: Tissue Value: Aerial
  misc_feature: MA Experiment 108607 PARAMETER Experiment Name: At_100uM_ABA_cDNA_P Parameter: Treatment Value: 100uM ABA vs. No Treatment
  misc_feature: MA Experiment ID: 108608 Result: Up-regulated in Transcription
  misc_feature: MA Experiment 108608 PARAMETER Experiment Name: At_100uM_ABA_cDNA_P Parameter: Timepoint (hr) Value: 1
  misc_feature: MA Experiment 108608 PARAMETER Experiment Name: At_100uM_ABA_cDNA_P Parameter: Tissue Value: Aerial
  misc_feature: MA Experiment 108608 PARAMETER Experiment Name: At_100uM_ABA_cDNA_P Parameter: Treatment Value: 100uM ABA vs. No Treatment
  misc_feature: MA Experiment ID: 20000069 Result: Up-regulated in Transcription
  misc_feature: MA Experiment 20000069 PARAMETER Experiment Name: At_100uM_ABA_Mutants_cDNA_P Parameter: Plant Line Value: CS23
  misc_feature: MA Experiment 20000069 PARAMETER Experiment Name: At_100uM_ABA_Mutants_cDNA_P Parameter: Timepoint (hr) Value: 6
  misc_feature: MA Experiment 20000069 PARAMETER Experiment Name: At_100uM_ABA_Mutants_cDNA_P Parameter: Tissue Value: Aerial
  misc_feature: MA Experiment 20000069 PARAMETER Experiment Name: At_100uM_ABA_Mutants_cDNA_P Parameter: Treatment Value: 100uM ABA vs. No Treatment
  misc_feature: MA Experiment ID: 20000070 Result: Up-regulated in Transcription
  misc_feature: MA Experiment 20000070 PARAMETER Experiment Name: At_100uM_ABA_Mutants_cDNA_P Parameter: Plant Line Value: CS24
  misc_feature: MA Experiment 20000070 PARAMETER Experiment Name: At_100uM_ABA_Mutants_cDNA_P Parameter: Timepoint (hr) Value: 6
  misc_feature: MA Experiment 20000070 PARAMETER Experiment Name: At_100uM_ABA_Mutants_cDNA_P Parameter: Tissue Value: Aerial
  misc_feature: MA Experiment 20000070 PARAMETER Experiment Name: At_100uM_ABA_Mutants_cDNA_P Parameter: Treatment Value: 100uM ABA vs. No Treatment
  misc_feature: MA Experiment ID: 20000111 Result: Up-regulated in Transcription
  misc_feature: MA Experiment 20000111 PARAMETER Experiment Name: At_42deg_Heat_cDNA_P Parameter: Temperature (deg C) Value: 42 vs. 22
  misc_feature: MA Experiment 20000111 PARAMETER Experiment Name: At_42deg_Heat_cDNA_P Parameter: Timepoint (hr) Value: 6
  misc_feature: MA Experiment 20000111 PARAMETER Experiment Name: At_42deg_Heat_cDNA_P Parameter: Tissue Value: Aerial
  misc_feature: MA Experiment ID: 20000112 Result: Up-regulated in Transcription
  misc_feature: MA Experiment 20000112 PARAMETER Experiment Name: At_42deg_Heat_cDNA_P Parameter: Temperature (deg C) Value: 42 vs. 22
  misc_feature: MA Experiment 20000112 PARAMETER Experiment Name: At_42deg_Heat_cDNA_P Parameter: Timepoint (hr) Value: 2
  misc_feature: MA Experiment 20000112 PARAMETER Experiment Name: At_42deg_Heat_cDNA_P Parameter: Tissue Value: Aerial
  misc_feature: MA Experiment ID: 20000113 Result: Up-regulated in Transcription
  misc_feature: MA Experiment 20000113 PARAMETER Experiment Name: At_42deg_Heat_cDNA_P Parameter: Temperature (deg C) Value: 42 vs. 22
  misc_feature: MA Experiment 20000113 PARAMETER Experiment Name: At_42deg_Heat_cDNA_P Parameter: Timepoint (hr) Value: 8
  misc_feature: MA Experiment 20000113 PARAMETER Experiment Name: At_42deg_Heat_cDNA_P Parameter: Tissue Value: Aerial
  misc_feature: MA Experiment ID: 20000166 Result: Up-regulated in Transcription
  misc_feature: MA Experiment 20000166 PARAMETER Experiment Name: At_100uM_ABA_P Parameter: Age (day) Value: 14
  misc_feature: MA Experiment 20000166 PARAMETER Experiment Name: At_100uM_ABA_P Parameter: Organism Value: A. thaliana
  misc_feature: MA Experiment 20000166 PARAMETER Experiment Name: At_100uM_ABA_P Parameter: Plant Line Value: WS
  misc_feature: MA Experiment 20000166 PARAMETER Experiment Name: At_100uM_ABA_P Parameter: Timepoint (hr) Value: 1
  misc_feature: MA Experiment 20000166 PARAMETER Experiment Name: At_100uM_ABA_P Parameter: Tissue Value: Aerial
  misc_feature: MA Experiment 20000166 PARAMETER Experiment Name: At_100uM_ABA_P Parameter: Treatment Value: 100uM ABA vs. No Treatment
  misc_feature: MA Experiment ID: 20000173 Result: Up-regulated in Transcription
  misc_feature: MA Experiment 20000173 PARAMETER Experiment Name: At_42deg_Heat_P Parameter: Age (day) Value: 14
  misc_feature: MA Experiment 20000173 PARAMETER Experiment Name: At_42deg_Heat_P Parameter: Organism Value: A. thaliana
  misc_feature: MA Experiment 20000173 PARAMETER Experiment Name: At_42deg_Heat_P Parameter: Plant Line Value: WS
  misc_feature: MA Experiment 20000173 PARAMETER Experiment Name: At_42deg_Heat_P Parameter: Temperature (deg C) Value: 42 vs. 22
  misc_feature: MA Experiment 20000173 PARAMETER Experiment Name: At_42deg_Heat_P Parameter: Timepoint (hr) Value: 6
  misc_feature: MA Experiment 20000173 PARAMETER Experiment Name: At_42deg_Heat_P Parameter: Tissue Value: Aerial
  misc_feature: MA Experiment ID: 20000184 Result: Down-regulated in Transcription
  misc_feature: MA Experiment 20000184 PARAMETER Experiment Name: At_Shoots__P Parameter: Age (day) Value: 7
  misc_feature: MA Experiment 20000184 PARAMETER Experiment Name: At_Shoots__P Parameter: Tissue Value: Shoots vs. Whole Plant
  misc_feature: MA Experiment ID: 20000437 Result: Up-regulated in Transcription
  misc_feature: MA Experiment 20000437 PARAMETER Experiment Name: At_Drought_P Parameter: Age (day) Value: 8
  misc_feature: MA Experiment 20000437 PARAMETER Experiment Name: At_Drought_P Parameter: Organism Value: A. thaliana
  misc_feature: MA Experiment 20000437 PARAMETER Experiment Name: At_Drought_P Parameter: Plant Line Value: WS
  misc_feature: MA Experiment 20000437 PARAMETER Experiment Name: At_Drought_P Parameter: Timepoint (hr) Value: 24
  misc_feature: MA Experiment 20000437 PARAMETER Experiment Name: At_Drought_P Parameter: Tissue Value: Whole Plant
  misc_feature: MA Experiment 20000437 PARAMETER Experiment Name: At_Drought_P Parameter: Treatment Value: Drought vs. No Drought
  misc_feature: MA Experiment ID: 20000439 Result: Up-regulated in Transcription
  misc_feature: MA Experiment 20000439 PARAMETER Experiment Name: At_Roots__P Parameter: Age (day) Value: 14 vs. 21
  misc_feature: MA Experiment 20000439 PARAMETER Experiment Name: At_Roots__P Parameter: Organism Value: A. thaliana
  misc_feature: MA Experiment 20000439 PARAMETER Experiment Name: At_Roots__P Parameter: Tissue Value: Roots vs. Whole Plant
  misc_feature: MA Experiment ID: 20001905 Result: Up-regulated in Transcription
  misc_feature: MA Experiment 20001905 PARAMETER Experiment Name: At_Drought_Reproduction_P Parameter: Age (day) Value: 40
  misc_feature: MA Experiment 20001905 PARAMETER Experiment Name: At_Drought_Reproduction_P Parameter: Organism Value: A. thaliana
  misc_feature: MA Experiment 20001905 PARAMETER Experiment Name: At_Drought_Reproduction_P Parameter: Plant Line Value: WS
  misc_feature: MA Experiment 20001905 PARAMETER Experiment Name: At_Drought_Reproduction_P Parameter: Timepoint (day) Value: 10
  misc_feature: MA Experiment 20001905 PARAMETER Experiment Name: At_Drought_Reproduction_P Parameter: Tissue Value: Rosettes
  misc_feature: MA Experiment 20001905 PARAMETER Experiment Name: At_Drought_Reproduction_P Parameter: Treatment Value: Drought vs. No Drought
gtttgtcactaagctctctctctctctccttctttttcgcaattcttctttcttcttcgacttttttttttcttcctctcttctctttggttttttggtgttgggttttatctgggttcctgatttcttcaacgaggaaggaaggaagaagaagagaaaagggacaagcgagaattactcttttctccttcaatttccgatgggttgtttcggatgcagtaagaaatcgagcaaacgatccgagactaacaaagatactgtcataaatagaaaaattgtcggtggtactacgagcgttgctaagagtgataagcgagacgatcagactcagcccagttcagattcaacaaaagtcagtccatatagagatgtaaacaatgaaggaggagttggtaaggaagatcagttatctttggatgtgaagggtttgaatctaaatgaccaagtcacagggaagaaagcacagacttttacttttcaagaacttgcagaagctacgggaaactttagatcggattgttttcttggtgaaggaggtttcggaaaagttttcaagggaactatagagaaattggatcaggttgttgcaatcaagcaacttgatcgtaatggggttcaaggaatcagggaatttgtggttgaggtattgactctaagtcttgctgaccatccgaatcttgtgaagcttattgggttttgtgctgagggtgatcagagactactggtgtacgagtatatgccgcaaggatcccttgaagatcatctacatgttctcccttctggtaaaaagcctcttgactggaacacccggatgaaaatagcagctggtgcagcaagaggtttagagtatctgcatgacagaatgacgccccctgtgatttaccgagatcttaaatgttcgaatattttgcttggtgaagactatcaaccgaaactatctgactttgggttggctaaagtaggaccaagcggggataaaacccatgtctcgacaagggttatgggaacgtacggatactgtgctcctgactacgctatgacgggtcagctcacatttaaatccgatatatacagttttggagtagtccttctcgagcttatcaccggaaggaaagcgattgacaatacaaaaacgcgtaaagatcagaatttggttggatgggcacgaccattgttcaaagacaggaggaacttcccaaaaatggttgatccattgcttcagggacaatacccagttagaggactgtaccaagcactagcaatatcagcaatgtgcgttcaagagcagcctaccatgagaccagtggtatctgatgtagtattggctctcaacttcttagcctcttctaaatatgatccgaatagccctagcagcagcagcgggaagaacccttcttttcacagagacagagatgatgaagagaaaagaccacacctcgtcaaggaaactgaatgtgaagggtcctcataggatatccaataagagagtggtaaaaaatcaaatctaattttggcttcaccaagaaattggggaaaaatataaaaccaactcaggtacatttttaacatctattgtggatgtaaatcttgactcggcttctttgtatgtagaatgtttctgttctgtagaaaaggagaaaaaaaaaaaccattttgttttgggacatatatacatatattgaac

SEQ ID NO: 24903 - protein, 489 aa, Arabidopsis thaliana
  peptide (1)..(489): Ceres Seq. ID no. 12331204
  misc_feature (154)..(453): Homolog of NCBI NO: 30679773 NR Description: protein kinase family [Arabidopsis thaliana]
  misc_feature (154)..(470): Homolog of NCBI NO: 11259782 NR Description: protein kinase-like - Arabidopsis thaliana
  misc_feature (102)..(455): Homolog of NCBI NO: 10445209 NR Description: protein serine/threonine kinase BNK1 [Brassica
  misc_feature (102)..(471): Homolog of NCBI NO: 34907210 NR Description: putative serine/threonine kinase PBS1 protein
  misc_feature (95)..(455): Homolog of NCBI NO: 34394036 NR Description: putative protein serine/threonine kinase BNK1
  misc_feature (115)..(472): Homolog of NCBI NO: 15238886 NR Description: protein kinase -like protein; protein id:
  misc_feature (67)..(475): Homolog of NCBI NO: 15226901 NR Description: putative protein kinase; protein id: At2g28590.1
  misc_feature (69)..(476): Homolog of NCBI NO: 7573598 NR Description: protein kinase 2 [Populus nigra]
  misc_feature (67)..(465): Homolog of NCBI NO: 7573596 NR Description: protein kinase 1 [Populus nigra]
  misc_feature (67)..(489): Homolog of NCBI NO: 15223024 NR Description: protein kinase, putative (fragment)
  misc_feature (154)..(453): Homolog of NCBI NO: 30679773 NR Description: protein kinase family [Arabidopsis thaliana]
  misc_feature (154)..(470): Homolog of NCBI NO: 11259782 NR Description: protein kinase-like - Arabidopsis thaliana
  misc_feature (102)..(455): Homolog of NCBI NO: 10445209 NR Description: protein serine/threonine kinase BNK1 [Brassica
  misc_feature (102)..(471): Homolog of NCBI NO: 34907210 NR Description: putative serine/threonine kinase PBS1 protein
  misc_feature (95)..(455): Homolog of NCBI NO: 34394036 NR Description: putative protein serine/threonine kinase BNK1
  misc_feature (115)..(472): Homolog of NCBI NO: 15238886 NR Description: protein kinase -like protein; protein id:
  misc_feature (67)..(475): Homolog of NCBI NO: 15226901 NR Description: putative protein kinase; protein id: At2g28590.1
  misc_feature (69)..(476): Homolog of NCBI NO: 7573598 NR Description: protein kinase 2 [Populus nigra]
  misc_feature (67)..(465): Homolog of NCBI NO: 7573596 NR Description: protein kinase 1 [Populus nigra]
  misc_feature (67)..(489): Homolog of NCBI NO: 15223024 NR Description: protein kinase, putative (fragment)
FVTKLSLSLLLFRNSSFFFDFFFSSSLLFGFLVLGFIWVPDFFNEEGRKKKRKGTSENYSFLLQFPMGCFGCSKKSSKRSETNKDTVINRKIVGGTTSVAKSDKRDDQTQPSSDSTKVSPYRDVNNEGGVGKEDQLSLDVKGLNLNDQVTGKKAQTFTFQELAEATGNFRSDCFLGEGGFGKVFKGTIEKLDQVVAIKQLDRNGVQGIREFVVEVLTLSLADHPNLVKLIGFCAEGDQRLLVYEYMPQGSLEDHLHVLPSGKKPLDWNTRMKIAAGAARGLEYLHDRMTPPVIYRDLKCSNILLGEDYQPKLSDFGLAKVGPSGDKTHVSTRVMGTYGYCAPDYAMTGQLTFKSDIYSFGVVLLELITGRKAIDNTKTRKDQNLVGWARPLFKDRRNFPKMVDPLLQGQYPVRGLYQALAISAMCVQEQPTMRPVVSDVVLALNFLASSKYDPNSPSSSSGKNPSFHRDRDDEEKRPHLVKETECEGSS

SEQ ID NO: 24904 - protein, 423 aa, Arabidopsis thaliana
  peptide (1)..(423): Ceres Seq. ID no. 12331205
  misc_feature (88)..(387): Homolog of NCBI NO: 30679773 NR Description: protein kinase family [Arabidopsis thaliana]
  misc_feature (88)..(404): Homolog of NCBI NO: 11259782 NR Description: protein kinase-like - Arabidopsis thaliana
  misc_feature (36)..(389): Homolog of NCBI NO: 10445209 NR Description: protein serine/threonine kinase BNK1 [Brassica
  misc_feature (36)..(405): Homolog of NCBI NO: 34907210 NR Description: putative serine/threonine kinase PBS1 protein
  misc_feature (29)..(389): Homolog of NCBI NO: 34394036 NR Description: putative protein serine/threonine kinase BNK1
  misc_feature (49)..(406): Homolog of NCBI NO: 15238886 NR Description: protein kinase -like protein; protein id:
  misc_feature (1)..(409): Homolog of NCBI NO: 15226901 NR Description: putative protein kinase; protein id: At2g28590.1
  misc_feature (3)..(410): Homolog of NCBI NO: 7573598 NR Description: protein kinase 2 [Populus nigra]
  misc_feature (1)..(399): Homolog of NCBI NO: 7573596 NR Description: protein kinase 1 [Populus nigra]
  misc_feature (1)..(423): Homolog of NCBI NO: 15223024 NR Description: protein kinase, putative (fragment)
  misc_feature (88)..(387): Homolog of NCBI NO: 30679773 NR Description: protein kinase family [Arabidopsis thaliana]
  misc_feature (88)..(404): Homolog of NCBI NO: 11259782 NR Description: protein kinase-like - Arabidopsis thaliana
  misc_feature (36)..(389): Homolog of NCBI NO: 10445209 NR Description: protein serine/threonine kinase BNK1 [Brassica
  misc_feature (36)..(405): Homolog of NCBI NO: 34907210 NR Description: putative serine/threonine kinase PBS1 protein
  misc_feature (29)..(389): Homolog of NCBI NO: 34394036 NR Description: putative protein serine/threonine kinase BNK1
  misc_feature (49)..(406): Homolog of NCBI NO: 15238886 NR Description: protein kinase -like protein; protein id:
  misc_feature (1)..(409): Homolog of NCBI NO: 15226901 NR Description: putative protein kinase; protein id: At2g28590.1
  misc_feature (3)..(410): Homolog of NCBI NO: 7573598 NR Description: protein kinase 2 [Populus nigra]
  misc_feature (1)..(399): Homolog of NCBI NO: 7573596 NR Description: protein kinase 1 [Populus nigra]
  misc_feature (1)..(423): Homolog of NCBI NO: 15223024 NR Description: protein kinase, putative (fragment)
MGCFGCSKKSSKRSETNKDTVINRKIVGGTTSVAKSDKRDDQTQPSSDSTKVSPYRDVNNEGGVGKEDQLSLDVKGLNLNDQVTGKKAQTFTFQELAEATGNFRSDCFLGEGGFGKVFKGTIEKLDQVVAIKQLDRNGVQGIREFVVEVLTLSLADHPNLVKLIGFCAEGDQRLLVYEYMPQGSLEDHLHVLPSGKKPLDWNTRMKIAAGAARGLEYLHDRMTPPVIYRDLKCSNILLGEDYQPKLSDFGLAKVGPSGDKTHVSTRVMGTYGYCAPDYAMTGQLTFKSDIYSFGVVLLELITGRKAIDNTKTRKDQNLVGWARPLFKDRRNFPKMVDPLLQGQYPVRGLYQALAISAMCVQEQPTMRPVVSDVVLALNFLASSKYDPNSPSSSSGKNPSFHRDRDDEEKRPHLVKETECEGSS

SEQ ID NO: 24905 - protein, 244 aa, Arabidopsis thaliana
  peptide (1)..(244): Ceres Seq. ID no. 12331206
  misc_feature (1)..(208): Homolog of NCBI NO: 30679773 NR Description: protein kinase family [Arabidopsis thaliana]
  misc_feature (1)..(225): Homolog of NCBI NO: 11259782 NR Description: protein kinase-like - Arabidopsis thaliana
  misc_feature (1)..(210): Homolog of NCBI NO: 10445209 NR Description: protein serine/threonine kinase BNK1 [Brassica
  misc_feature (1)..(226): Homolog of NCBI NO: 34907210 NR Description: putative serine/threonine kinase PBS1 protein
  misc_feature (1)..(210): Homolog of NCBI NO: 34394036 NR Description: putative protein serine/threonine kinase BNK1
  misc_feature (1)..(227): Homolog of NCBI NO: 15238886 NR Description: protein kinase -like protein; protein id:
  misc_feature (1)..(230): Homolog of NCBI NO: 15226901 NR Description: putative protein kinase; protein id: At2g28590.1
  misc_feature (1)..(231): Homolog of NCBI NO: 7573598 NR Description: protein kinase 2 [Populus nigra]
  misc_feature (1)..(220): Homolog of NCBI NO: 7573596 NR Description: protein kinase 1 [Populus nigra]
  misc_feature (1)..(244): Homolog of NCBI NO: 15223024 NR Description: protein kinase, putative (fragment)
  misc_feature (1)..(208): Homolog of NCBI NO: 30679773 NR Description: protein kinase family [Arabidopsis thaliana]
  misc_feature (1)..(225): Homolog of NCBI NO: 11259782 NR Description: protein kinase-like - Arabidopsis thaliana
  misc_feature (1)..(210): Homolog of NCBI NO: 10445209 NR Description: protein serine/threonine kinase BNK1 [Brassica
  misc_feature (1)..(226): Homolog of NCBI NO: 34907210 NR Description: putative serine/threonine kinase PBS1 protein
  misc_feature (1)..(210): Homolog of NCBI NO: 34394036 NR Description: putative protein serine/threonine kinase BNK1
  misc_feature (1)..(227): Homolog of NCBI NO: 15238886 NR Description: protein kinase -like protein; protein id:
  misc_feature (1)..(230): Homolog of NCBI NO: 15226901 NR Description: putative protein kinase; protein id: At2g28590.1
  misc_feature (1)..(231): Homolog of NCBI NO: 7573598 NR Description: protein kinase 2 [Populus nigra]
  misc_feature (1)..(220): Homolog of NCBI NO: 7573596 NR Description: protein kinase 1 [Populus nigra]
  misc_feature (1)..(244): Homolog of NCBI NO: 15223024 NR Description: protein kinase, putative (fragment)
MPQGSLEDHLHVLPSGKKPLDWNTRMKIAAGAARGLEYLHDRMTPPVIYRDLKCSNILLGEDYQPKLSDFGLAKVGPSGDKTHVSTRVMGTYGYCAPDYAMTGQLTFKSDIYSFGVVLLELITGRKAIDNTKTRKDQNLVGWARPLFKDRRNFPKMVDPLLQGQYPVRGLYQALAISAMCVQEQPTMRPVVSDVVLALNFLASSKYDPNSPSSSSGKNPSFHRDRDDEEKRPHLVKETECEGSS

SEQ ID NO: 24906 - DNA, 1381 bp, Arabidopsis thaliana
  misc_feature (1)..(1381): Ceres Seq. ID no. 12339948
  misc_feature: MA Experiment ID: 108462 Result: Up-regulated in Transcription
  misc_feature: MA Experiment 108462 PARAMETER Experiment Name: At_Germinating_Seeds_cDNA_P Parameter: Age (day) Value: 2 vs. 0
  misc_feature: MA Experiment 108462 PARAMETER Experiment Name: At_Germinating_Seeds_cDNA_P Parameter: Tissue Value: Germinating Seeds
  misc_feature: MA Experiment ID: 108463 Result: Up-regulated in Transcription
  misc_feature: MA Experiment 108463 PARAMETER Experiment Name: At_Germinating_Seeds_cDNA_P Parameter: Age (day) Value: 3 vs. 0
  misc_feature: MA Experiment 108463 PARAMETER Experiment Name: At_Germinating_Seeds_cDNA_P Parameter: Tissue Value: Germinating Seeds
  misc_feature: MA Experiment ID: 108501 Result: Down-regulated in Transcription
  misc_feature: MA Experiment 108501 PARAMETER Experiment Name: At_ap2_floral_buds_cDNA_P Parameter: Plant Line Value: ap2 (Ler.)
  misc_feature: MA Experiment 108501 PARAMETER Experiment Name: At_ap2_floral_buds_cDNA_P Parameter: Tissue Value: Closed Flower
  misc_feature: MA Experiment ID: 108595 Result: Up-regulated in Transcription
  misc_feature: MA Experiment 108595 PARAMETER Experiment Name: At_Ler-pi_Ovule_cDNA_P Parameter: Plant Line Value: null
  misc_feature: MA Experiment ID: 20000185 Result: Up-regulated in Transcription
  misc_feature: MA Experiment 20000185 PARAMETER Experiment Name: At_Roots__P Parameter: Age (day) Value: 7 vs. 21
  misc_feature: MA Experiment 20000185 PARAMETER Experiment Name: At_Roots__P Parameter: Organism Value: A. thaliana
  misc_feature: MA Experiment 20000185 PARAMETER Experiment Name: At_Roots__P Parameter: Tissue Value: Roots vs. Whole Plant
  misc_feature: MA Experiment ID: 20000227 Result: Down-regulated in Transcription
  misc_feature: MA Experiment 20000227 PARAMETER Experiment Name: At_Root-Tips-vs-Tops_P Parameter: Tissue Value: Root Tips vs. Root Tops
  misc_feature: MA Experiment ID: 20000235 Result: Up-regulated in Transcription
  misc_feature: MA Experiment 20000235 PARAMETER Experiment Name: At_Siliques_P Parameter: Age (day) Value: 21
  misc_feature: MA Experiment 20000235 PARAMETER Experiment Name: At_Siliques_P Parameter: Organism Value: A. thaliana
  misc_feature: MA Experiment 20000235 PARAMETER Experiment Name: At_Siliques_P Parameter: Plant Line Value: WS
  misc_feature: MA Experiment 20000235 PARAMETER Experiment Name: At_Siliques_P Parameter: Tissue Value: 5-10mm Siliques vs. Whole Plant
  misc_feature: MA Experiment ID: 20000436 Result: Up-regulated in Transcription
  misc_feature: MA Experiment 20000436 PARAMETER Experiment Name: At_Drought_P Parameter: Age (day) Value: 7
  misc_feature: MA Experiment 20000436 PARAMETER Experiment Name: At_Drought_P Parameter: Organism Value: A. thaliana
  misc_feature: MA Experiment 20000436 PARAMETER Experiment Name: At_Drought_P Parameter: Plant Line Value: WS
  misc_feature: MA Experiment 20000436 PARAMETER Experiment Name: At_Drought_P Parameter: Timepoint (hr) Value: 12
  misc_feature: MA Experiment 20000436 PARAMETER Experiment Name: At_Drought_P Parameter: Tissue Value: Whole Plant
  misc_feature: MA Experiment 20000436 PARAMETER Experiment Name: At_Drought_P Parameter: Treatment Value: Drought vs. No Drought
  misc_feature: MA Experiment ID: 20000438 Result: Down-regulated in Transcription
  misc_feature: MA Experiment 20000438 PARAMETER Experiment Name: At_Shoots__P Parameter: Age (day) Value: 14
  misc_feature: MA Experiment 20000438 PARAMETER Experiment Name: At_Shoots__P Parameter: Tissue Value: Shoots vs. Whole Plant
  misc_feature: MA Experiment ID: 20000439 Result: Up-regulated in Transcription
  misc_feature: MA Experiment 20000439 PARAMETER Experiment Name: At_Roots__P Parameter: Age (day) Value: 14 vs. 21
  misc_feature: MA Experiment 20000439 PARAMETER Experiment Name: At_Roots__P Parameter: Organism Value: A. thaliana
  misc_feature: MA Experiment 20000439 PARAMETER Experiment Name: At_Roots__P Parameter: Tissue Value: Roots vs. Whole Plant
  misc_feature: MA Experiment ID: 20000453 Result: Up-regulated in Transcription
  misc_feature: MA Experiment 20000453 PARAMETER Experiment Name: At_100uM_ABA_P Parameter: Age (day) Value: 15
  misc_feature: MA Experiment 20000453 PARAMETER Experiment Name: At_100uM_ABA_P Parameter: Organism Value: A. thaliana
  misc_feature: MA Experiment 20000453 PARAMETER Experiment Name: At_100uM_ABA_P Parameter: Plant Line Value: WS
  misc_feature: MA Experiment 20000453 PARAMETER Experiment Name: At_100uM_ABA_P Parameter: Timepoint (hr) Value: 24
  misc_feature: MA Experiment 20000453 PARAMETER Experiment Name: At_100uM_ABA_P Parameter: Tissue Value: Aerial
  misc_feature: MA Experiment 20000453 PARAMETER Experiment Name: At_100uM_ABA_P Parameter: Treatment Value: 100uM ABA vs. No Treatment
  misc_feature: MA Experiment ID: 20000460 Result: Down-regulated in Transcription
  misc_feature: MA Experiment 20000460 PARAMETER Experiment Name: At_10percent_PEG_P Parameter: Age (day) Value: 12
  misc_feature: MA Experiment 20000460 PARAMETER Experiment Name: At_10percent_PEG_P Parameter: Organism Value: A. thaliana
  misc_feature: MA Experiment 20000460 PARAMETER Experiment Name: At_10percent_PEG_P Parameter: Plant Line Value: WS
  misc_feature: MA Experiment 20000460 PARAMETER Experiment Name: At_10percent_PEG_P Parameter: Timepoint (day) Value: 12
  misc_feature: MA Experiment 20000460 PARAMETER Experiment Name: At_10percent_PEG_P Parameter: Tissue Value: Whole Plant
  misc_feature: MA Experiment 20000460 PARAMETER Experiment Name: At_10percent_PEG_P Parameter: Treatment Value: 10percent PEG vs. No Treatment
  misc_feature: MA Experiment ID: 20000794 Result: Up-regulated in Transcription
  misc_feature: MA Experiment 20000794 PARAMETER Experiment Name: At_Petals_P Parameter: Age (day) Value: 23-25 days
  misc_feature: MA Experiment 20000794 PARAMETER Experiment Name: At_Petals_P Parameter: Plant Line Value: WS
  misc_feature: MA Experiment 20000794 PARAMETER Experiment Name: At_Petals_P Parameter: Tissue Value: Petals vs. Whole plant
  misc_feature: MA Experiment ID: 20001248 Result: Down-regulated in Transcription
  misc_feature: MA Experiment 20001248 PARAMETER Experiment Name: At_Far-red-induction_P Parameter: Age (day) Value: 7
  misc_feature: MA Experiment 20001248 PARAMETER Experiment Name: At_Far-red-induction_P Parameter: Light Value: Far-red vs. White
  misc_feature: MA Experiment 20001248 PARAMETER Experiment Name: At_Far-red-induction_P Parameter: Organism Value: A. thaliana
  misc_feature: MA Experiment 20001248 PARAMETER Experiment Name: At_Far-red-induction_P Parameter: Plant Line Value: Columbia
  misc_feature: MA Experiment 20001248 PARAMETER Experiment Name: At_Far-red-induction_P Parameter: Timepoint (hr) Value: 4
  misc_feature: MA Experiment 20001248 PARAMETER Experiment Name: At_Far-red-induction_P Parameter: Tissue Value: Whole Plant
  misc_feature: MA Experiment ID: 20001556 Result: Down-regulated in Transcription
  misc_feature: MA Experiment 20001556 PARAMETER Experiment Name: At_Drought_Soil_Dry_P Parameter: Age (day) Value: 26
  misc_feature: MA Experiment 20001556 PARAMETER Experiment Name: At_Drought_Soil_Dry_P Parameter: Organism Value: A. thaliana
  misc_feature: MA Experiment 20001556 PARAMETER Experiment Name: At_Drought_Soil_Dry_P Parameter: Plant Line Value: WS
  misc_feature: MA Experiment 20001556 PARAMETER Experiment Name: At_Drought_Soil_Dry_P Parameter: Post Timepoint (hr) Value: None
  misc_feature: MA Experiment 20001556 PARAMETER Experiment Name: At_Drought_Soil_Dry_P Parameter: Post-Treatment Value: None
  misc_feature: MA Experiment 20001556 PARAMETER Experiment Name: At_Drought_Soil_Dry_P Parameter: Timepoint (day) Value: 12
  misc_feature: MA Experiment 20001556 PARAMETER Experiment Name: At_Drought_Soil_Dry_P Parameter: Treatment Value: Drought vs. No Drought
  misc_feature: MA Experiment ID: 20001558 Result: Down-regulated in Transcription
  misc_feature: MA Experiment 20001558 PARAMETER Experiment Name: At_Drought_Soil_Dry_P Parameter: Age (day) Value: 27
  misc_feature: MA Experiment 20001558 PARAMETER Experiment Name: At_Drought_Soil_Dry_P Parameter: Organism Value: A. thaliana
  misc_feature: MA Experiment 20001558 PARAMETER Experiment Name: At_Drought_Soil_Dry_P Parameter: Plant Line Value: WS
  misc_feature: MA Experiment 20001558 PARAMETER Experiment Name: At_Drought_Soil_Dry_P Parameter: Post Timepoint (hr) Value: 6
  misc_feature: MA Experiment 20001558 PARAMETER Experiment Name: At_Drought_Soil_Dry_P Parameter: Post-Treatment Value: Re-Water vs. No Drought
  misc_feature: MA Experiment 20001558 PARAMETER Experiment Name: At_Drought_Soil_Dry_P Parameter: Timepoint (day) Value: 13
  misc_feature: MA Experiment 20001558 PARAMETER Experiment Name: At_Drought_Soil_Dry_P Parameter: Treatment Value: Drought vs. No Drought
  misc_feature: MA Experiment ID: 20001773 Result: Up-regulated in Transcription
  misc_feature: MA Experiment 20001773 PARAMETER Experiment Name: At_Far-red-enriched-adult_P Parameter: Age (day) Value: 30
  misc_feature: MA Experiment 20001773 PARAMETER Experiment Name: At_Far-red-enriched-adult_P Parameter: Light Value: Far-red enriched vs. White
  misc_feature: MA Experiment 20001773 PARAMETER Experiment Name: At_Far-red-enriched-adult_P Parameter: Organism Value: A. thaliana
  misc_feature: MA Experiment 20001773 PARAMETER Experiment Name: At_Far-red-enriched-adult_P Parameter: Plant Line Value: Columbia
  misc_feature: MA Experiment 20001773 PARAMETER Experiment Name: At_Far-red-enriched-adult_P Parameter: Timepoint (hr) Value: 48
  misc_feature: MA Experiment 20001773 PARAMETER Experiment Name: At_Far-red-enriched-adult_P Parameter: Tissue Value: Aerial
  misc_feature: MA Experiment ID: 20001904 Result: Up-regulated in Transcription
  misc_feature: MA Experiment 20001904 PARAMETER Experiment Name: At_Drought_Reproduction_P Parameter: Age (day) Value: 37
  misc_feature: MA Experiment 20001904 PARAMETER Experiment Name: At_Drought_Reproduction_P Parameter: Organism Value: A. thaliana
  misc_feature: MA Experiment 20001904 PARAMETER Experiment Name: At_Drought_Reproduction_P Parameter: Plant Line Value: WS
  misc_feature: MA Experiment 20001904 PARAMETER Experiment Name: At_Drought_Reproduction_P Parameter: Timepoint (day) Value: 7
  misc_feature: MA Experiment 20001904 PARAMETER Experiment Name: At_Drought_Reproduction_P Parameter: Tissue Value: Rosettes
  misc_feature: MA Experiment 20001904 PARAMETER Experiment Name: At_Drought_Reproduction_P Parameter: Treatment Value: Drought vs. No Drought
  misc_feature: MA Experiment ID: 20001905 Result: Up-regulated in Transcription
  misc_feature: MA Experiment 20001905 PARAMETER Experiment Name: At_Drought_Reproduction_P Parameter: Age (day) Value: 40
  misc_feature: MA Experiment 20001905 PARAMETER Experiment Name: At_Drought_Reproduction_P Parameter: Organism Value: A. thaliana
  misc_feature: MA Experiment 20001905 PARAMETER Experiment Name: At_Drought_Reproduction_P Parameter: Plant Line Value: WS
  misc_feature: MA Experiment 20001905 PARAMETER Experiment Name: At_Drought_Reproduction_P Parameter: Timepoint (day) Value: 10
  misc_feature: MA Experiment 20001905 PARAMETER Experiment Name: At_Drought_Reproduction_P Parameter: Tissue Value: Rosettes
  misc_feature: MA Experiment 20001905 PARAMETER Experiment Name: At_Drought_Reproduction_P Parameter: Treatment Value: Drought vs. No Drought
  misc_feature: MA Experiment ID: 20001906 Result: Down-regulated in Transcription
  misc_feature: MA Experiment 20001906 PARAMETER Experiment Name: At_Drought_Reproduction_P Parameter: Age (day) Value: 35
  misc_feature: MA Experiment 20001906 PARAMETER Experiment Name: At_Drought_Reproduction_P Parameter: Organism Value: A. thaliana
  misc_feature: MA Experiment 20001906 PARAMETER Experiment Name: At_Drought_Reproduction_P Parameter: Plant Line Value: WS
  misc_feature: MA Experiment 20001906 PARAMETER Experiment Name: At_Drought_Reproduction_P Parameter: Timepoint (day) Value: 5
  misc_feature: MA Experiment 20001906 PARAMETER Experiment Name: At_Drought_Reproduction_P Parameter: Tissue Value: Siliques
  misc_feature: MA Experiment 20001906 PARAMETER Experiment Name: At_Drought_Reproduction_P Parameter: Treatment Value: Drought vs. No Drought
  misc_feature: MA Experiment ID: 20001908 Result: Down-regulated in Transcription
  misc_feature: MA Experiment 20001908 PARAMETER Experiment Name: At_Drought_Reproduction_P Parameter: Age (day) Value: 40
  misc_feature: MA Experiment 20001908 PARAMETER Experiment Name: At_Drought_Reproduction_P Parameter: Organism Value: A. thaliana
  misc_feature: MA Experiment 20001908 PARAMETER Experiment Name: At_Drought_Reproduction_P Parameter: Plant Line Value: WS
  misc_feature: MA Experiment 20001908 PARAMETER Experiment Name: At_Drought_Reproduction_P Parameter: Timepoint (day) Value: 10
  misc_feature: MA Experiment 20001908 PARAMETER Experiment Name: At_Drought_Reproduction_P Parameter: Tissue Value: Siliques
  misc_feature: MA Experiment 20001908 PARAMETER Experiment Name: At_Drought_Reproduction_P Parameter: Treatment Value: Drought vs. No Drought
atgtttaatctcggtttcatcgtcaagaagatcattaatcgaccgtactcttccgaaaaaccttccgagatccggttttcgattgagtcttcgacatgtggattccggtaaaaacctcaccaagatccaaaagattcagagagggattaaccgtggattccatagattaaacagattaggagctgtagctgttttagctgtagcctctaagcctgatgatactaataacattaaagcacctactcatggaggaagcggtgagtttcttatggagttgtctattggaaacccggcggttaaatactctgctattgttgataccggaagtgaccttatttggactcaatgcaagccttgcactgaatgttttgatcaaccaactccgatttttgacccggagaaatcttcctcttactcgaaagtaggatgctcttctggtctttgtaacgcattgcctcgatcaaactgtaacgaagataaagatgcttgtgagtatttgtatacttatggagattactcatctacaagaggggctcttggccacggaaacgttcactttcgaggacgagaactcgatttctggtatcgggtttgggtgtggggttgagaacgaaggcgacgggttctctcaagggtcaggtcttgtaggtcttggtcgcggaccgctctcgcttatttctcagctcaaagagactaagttttcttattgcttgacctcgattgaggatagtgaagcatctagctcgttgtttattggatctttagcctcgggtatcgtcaacaaaacaggtgcaagtttagatggtgaagtcaccaaaacgatgtctttgctacgaaatccagatcagccttcgttctattaccttgagttacaaggcatcaccgttggagcaaaacgcctttctgttgaaaagtctacttttgaactagccgaagatggaaccggaggtatgatcatagactcaggcacgaccatcacgtatctcgaggagaccgcgtttaaagtgttgaaggaagagtttacttctcggatgagtttaccagtagatgactctggatccacaggacttgacttgtgcttcaagttacctaatgcagccaagaatattgatgttcctaagctgatttttcattttaaaggtgctgattaggagcttcccggagagaactacatggtggcggataagcaccggcgttttgtgtttggccatgggaagttctaatgggatgtctattttcggaaatgttcaacagcagaattttaatgtacttcatgatcttgagaaagaaacggtgtcgtttgttcccacggaatgtggaaaattgtagatttttaatttgcttttttctcttattataaatgaaatttatactttgtggc

SEQ ID NO: 24907 - protein, 222 aa, Arabidopsis thaliana
  peptide (1)..(222): Ceres Seq. ID no. 12339949
  misc_feature (17)..(222): Pfam Name: Eukaryotic aspartyl protease Pfam Description: Eukaryotic aspartyl protease
  misc_feature (16)..(222): Homolog of NCBI NO: 34898756 NR Description: OJ1131_E05.2 [Oryza sativa (japonica
  misc_feature (16)..(222): Homolog of NCBI NO: 38344829 NR Description: OSJNBa0064H22.10 [Oryza sativa (japonica
  misc_feature (16)..(222): Homolog of NCBI NO: 15228618 NR Description: putative protein
  misc_feature (17)..(222): Homolog of NCBI NO: 21594980 NR Description: chloroplast nucleoid DNA binding protein,
  misc_feature (16)..(222): Homolog of NCBI NO: 15217764 NR Description: hypothetical protein; protein id: At1g64830.1
  misc_feature (17)..(222): Homolog of NCBI NO: 34898762 NR Description: OJ1131_E05.5 [Oryza sativa (japonica
  misc_feature (17)..(222): Homolog of NCBI NO: 15223368 NR Description: chloroplast nucleoid DNA binding protein, putative
  misc_feature (16)..(222): Homolog of NCBI NO: 15242803 NR Description: putative protein; protein id: At5g33340.1
  misc_feature (17)..(222): Homolog of NCBI NO: 20197342 NR Description: putative chloroplast nucleoid DNA binding protein
  misc_feature (17)..(222): Homolog of NCBI NO: 30678047 NR Description: chloroplast nucleoid DNA binding protein -related
MLVSICILMEITHLQEGLLATETFTFEDENSISGIGFGCGVENEGDGFSQGSGLVGLGRGPLSLISQLKETKFSYCLTSIEDSEASSSLFIGSLASGIVNKTGASLDGEVTKTMSLLRNPDQPSFYYLELQGITVGAKRLSVEKSTFELAEDGTGGMIIDSGTTITYLEETAFKVLKEEFTSRMSLPVDDSGSTGLDLCFKLPNAAKNIDVPKLIFHFKGAD

SEQ ID NO: 24908 - protein, 214 aa, Arabidopsis thaliana
  peptide (1)..(214): Ceres Seq. ID no. 12339950
  misc_feature (9)..(214): Pfam Name: Eukaryotic aspartyl protease Pfam Description: Eukaryotic aspartyl protease
  misc_feature (8)..(214): Homolog of NCBI NO: 15228618 NR Description: putative protein
  misc_feature (8)..(214): Homolog of NCBI NO: 15242803 NR Description: putative protein; protein id: At5g33340.1
  misc_feature (9)..(214): Homolog of NCBI NO: 21594980 NR Description: chloroplast nucleoid DNA binding protein,
  misc_feature (9)..(214): Homolog of NCBI NO: 15223368 NR Description: chloroplast nucleoid DNA binding protein, putative
  misc_feature (8)..(214): Homolog of NCBI NO: 15217764 NR Description: hypothetical protein; protein id: At1g64830.1
  misc_feature (9)..(214): Homolog of NCBI NO: 34898762 NR Description: OJ1131_E05.5 [Oryza sativa (japonica
  misc_feature (8)..(214): Homolog of NCBI NO: 34898756 NR Description: OJ1131_E05.2 [Oryza sativa (japonica
  misc_feature (8)..(214): Homolog of NCBI NO: 38344829 NR Description: OSJNBa0064H22.10 [Oryza sativa (japonica
  misc_feature (9)..(214): Homolog of NCBI NO: 20197342 NR Description: putative chloroplast nucleoid DNA binding protein
  misc_feature (9)..(214): Homolog of NCBI NO: 30678047 NR Description: chloroplast nucleoid DNA binding protein -related
MEITHLQEGLLATETFTFEDENSISGIGFGCGVENEGDGFSQGSGLVGLGRGPLSLISQLKETKFSYCLTSIEDSEASSSLFIGSLASGIVNKTGASLDGEVTKTMSLLRNPDQPSFYYLELQGITVGAKRLSVEKSTFELAEDGTGGMIIDSGTTITYLEETAFKVLKEEFTSRMSLPVDDSGSTGLDLCFKLPNAAKNIDVPKLIFHFKGAD

SEQ ID NO: 24909 - protein, 201 aa, Arabidopsis thaliana
  peptide (1)..(201): Ceres Seq. ID no. 12339951
  misc_feature (90)..(179): Pfam Name: Eukaryotic aspartyl protease Pfam Description: Eukaryotic aspartyl protease
  misc_feature (84)..(192): Homolog of NCBI NO: 15228618 NR Description: putative protein
  misc_feature (22)..(177): Homolog of NCBI NO: 15242803 NR Description: putative protein; protein id: At5g33340.1
  misc_feature (24)..(187): Homolog of NCBI NO: 21594980 NR Description: chloroplast nucleoid DNA binding protein,
  misc_feature (24)..(187): Homolog of NCBI NO: 15223368 NR Description: chloroplast nucleoid DNA binding protein, putative
  misc_feature (22)..(177): Homolog of NCBI NO: 15217764 NR Description: hypothetical protein; protein id: At1g64830.1
  misc_feature (25)..(192): Homolog of NCBI NO: 34898762 NR Description: OJ1131_E05.5 [Oryza sativa (japonica
  misc_feature (25)..(179): Homolog of NCBI NO: 34898756 NR Description: OJ1131_E05.2 [Oryza sativa (japonica
  misc_feature (25)..(179): Homolog of NCBI NO: 38344829 NR Description: OSJNBa0064H22.10 [Oryza sativa (japonica
  misc_feature (90)..(179): Homolog of NCBI NO: 20197342 NR Description: putative chloroplast nucleoid DNA binding protein
  misc_feature (1)..(179): Homolog of NCBI NO: 30678047 NR Description: chloroplast nucleoid DNA binding protein -related
CLISVSSSRRSLIDRTLPKNLPRSGFRLSLRHVDSGKNLTKIQKIQRGINRGFHRLNRLGAVAVLAVASKPDDTNNIKAPTHGGSGEFLMELSIGNPAVKYSAIVDTGSDLIWTQCKPCTECFDQPTPIFDPEKSSSYSKVGCSSGLCNALPRSNCNEDKDACEYLYTYGDYSSTRGALGHGNVHFRGRELDFWYRVWVWG

SEQ ID NO: 24910 - DNA, 1304 bp, Arabidopsis thaliana
  misc_feature (1)..(1304): Ceres Seq. ID no. 12602447
  misc_feature: MA Experiment ID: 108435 Result: Down-regulated in Transcription
  misc_feature: MA Experiment 108435 PARAMETER Experiment Name: At_stm_Mutants_cDNA_P Parameter: Plant Line Value: wt Landsburg vs stm
  misc_feature: MA Experiment 108435 PARAMETER Experiment Name: At_stm_Mutants_cDNA_P Parameter: Tissue Value: Shoot Apical Meristem Region
  misc_feature: MA Experiment ID: 108595 Result: Down-regulated in Transcription
  misc_feature: MA Experiment 108595 PARAMETER Experiment Name: At_Ler-pi_Ovule_cDNA_P Parameter: Plant Line Value: null
  misc_feature: MA Experiment ID: 20000069 Result: Down-regulated in Transcription
  misc_feature: MA Experiment 20000069 PARAMETER Experiment Name: At_100uM_ABA_Mutants_cDNA_P Parameter: Plant Line Value: CS23
  misc_feature: MA Experiment 20000069 PARAMETER Experiment Name: At_100uM_ABA_Mutants_cDNA_P Parameter: Timepoint (hr) Value: 6
  misc_feature: MA Experiment 20000069 PARAMETER Experiment Name: At_100uM_ABA_Mutants_cDNA_P Parameter: Tissue Value: Aerial
  misc_feature: MA Experiment 20000069 PARAMETER Experiment Name: At_100uM_ABA_Mutants_cDNA_P Parameter: Treatment Value: 100uM ABA vs. No Treatment
  misc_feature: MA Experiment ID: 20000086 Result: Down-regulated in Transcription
  misc_feature: MA Experiment 20000086 PARAMETER Experiment Name: At_100uM_ABA_Mutants_cDNA_P Parameter: Plant Line Value: CS22
  misc_feature: MA Experiment 20000086 PARAMETER Experiment Name: At_100uM_ABA_Mutants_cDNA_P Parameter: Timepoint (hr) Value: 6
  misc_feature: MA Experiment 20000086 PARAMETER Experiment Name: At_100uM_ABA_Mutants_cDNA_P Parameter: Tissue Value: Aerial
  misc_feature: MA Experiment 20000086 PARAMETER Experiment Name: At_100uM_ABA_Mutants_cDNA_P Parameter: Treatment Value: 100uM ABA vs. No Treatment
  misc_feature: MA Experiment ID: 20000180 Result: Up-regulated in Transcription
  misc_feature: MA Experiment 20000180 PARAMETER Experiment Name: At_Germinating_Seeds_P Parameter: Age (hr) Value: 24 vs. 0
  misc_feature: MA Experiment 20000180 PARAMETER Experiment Name: At_Germinating_Seeds_P Parameter: Tissue Value: Germinating Seeds
  misc_feature: MA Experiment ID: 20000184 Result: Up-regulated in Transcription
  misc_feature: MA Experiment 20000184 PARAMETER Experiment Name: At_Shoots__P Parameter: Age (day) Value: 7
  misc_feature: MA Experiment 20000184 PARAMETER Experiment Name: At_Shoots__P Parameter: Tissue Value: Shoots vs. Whole Plant
  misc_feature: MA Experiment ID: 20000439 Result: Down-regulated in Transcription
  misc_feature: MA Experiment 20000439 PARAMETER Experiment Name: At_Roots__P Parameter: Age (day) Value: 14 vs. 21
  misc_feature: MA Experiment 20000439 PARAMETER Experiment Name: At_Roots__P Parameter: Organism Value: A. thaliana
  misc_feature: MA Experiment 20000439 PARAMETER Experiment Name: At_Roots__P Parameter: Tissue Value: Roots vs. Whole Plant
  misc_feature: MA Experiment ID: 20001905 Result: Down-regulated in Transcription
  misc_feature: MA Experiment 20001905 PARAMETER Experiment Name: At_Drought_Reproduction_P Parameter: Age (day) Value: 40
  misc_feature: MA Experiment 20001905 PARAMETER Experiment Name: At_Drought_Reproduction_P Parameter: Organism Value: A. thaliana
  misc_feature: MA Experiment 20001905 PARAMETER Experiment Name: At_Drought_Reproduction_P Parameter: Plant Line Value: WS
  misc_feature: MA Experiment 20001905 PARAMETER Experiment Name: At_Drought_Reproduction_P Parameter: Timepoint (day) Value: 10
  misc_feature: MA Experiment 20001905 PARAMETER Experiment Name: At_Drought_Reproduction_P Parameter: Tissue Value: Rosettes
  misc_feature: MA Experiment 20001905 PARAMETER Experiment Name: At_Drought_Reproduction_P Parameter: Treatment Value: Drought vs. No Drought
  misc_feature: Phenotype: WHOLE PLANT Color-Yellow-Green Viable 1
  misc_feature: Phenotype: CAULINE LEAVES Size-Small
  misc_feature: Phenotype: WHOLE PLANT Color-Yellow-Green Viable 1
  misc_feature: Phenotype: CAULINE LEAVES Size-Small
  misc_feature: Phenotype: WHOLE PLANT Color-Yellow-Green Viable 1
  misc_feature: Phenotype: CAULINE LEAVES Size-Small
  misc_feature: Phenotype: WHOLE PLANT Color-Yellow-Green Viable 1
  misc_feature: Phenotype: CAULINE LEAVES Size-Small
  misc_feature: Phenotype: WHOLE PLANT Color-Yellow-Green Viable 1
  misc_feature: Phenotype: CAULINE LEAVES Size-Small
  misc_feature: Phenotype: FERTILITY Fertility-Reduced
atctcctctgctaccttaagctgagagagtcacagtctcgtctctatctctcctctttgcctttttccactcactacacgccaaacccgacgacatggcagctacctctctcactgcccctccttctttctccggtctccgccgcatttctcccaagctcgacgctgccgccgtctcctcccaccaatccttcttccaccgcgtcaattcctctacccgtctcgtttcttcctcttcttcttctcatcgctcccccagaggtgttgttgccatggctggatccggaaagtttttcgttggaggaaactggaagtgtaacgggactaaggactccatcgccaagcttatctccgatctcaacagtgcaaccttggaagcagatgtagatgttgttgtgtcacctccatttgtctacatcgaccaggtcaaatcctcgttgacagaccgtattgacatatcaggtcagaactcttgggttgggaaaggtggagccttcactggtgaaatcagcgtggaacagctcaaagaccttggctgcaagtgggtcattcttgggcattccgaacggagacatgtcatcggagaaaaagatgagtttatcgggaagaaagctgcatatgcattgagtgagggtcttggagtgatagcttgtattggggaaaagctagaagagagggaagcaggcaagacgtttgatgtttgcttcgcgcaactgaaggcgtttgctgatgctgtgcctagctgggacaatatagttgttgcatacgagcctgtatgggcaattggaactggtaaagttgcatctcctcagcaagcacaagaagtccatgtagctgtccgcggttggctaaagaagaatgtctctgaggaagttgcttccaaaacgagaatcatatatggaggttctgtcaatggaggcaacagtgcagagcttgccaaagaagaagacattgatggatttcttgttggtggtgcctccttgaagggtcctgagtttgcaaccattgtgaactcagtcacgtcgaagaaagttgctgcttgattgagaactatcagtaacggaaatcgctagtctccatggaacagatgagatgagaaataaaagggaggttagcgaccttgttgttgttgttgtgttcttacatcttcttcttgaactaataatggaaaacagaaagaaaaaaaatgattcgtgagctctggtttgacagagagagataaaagggtctttgattaaagatctttgtaactaagctgtgattctttttttcaatttgagtaagcttgactcacgagtttcttct

SEQ ID NO: 24911 - protein, 315 aa, Arabidopsis thaliana
  peptide (1)..(315): Ceres Seq. ID no. 12602448
  misc_feature (64)..(309): Pfam Name: Triosephosphate isomerase Pfam Description: Triosephosphate isomerase
  misc_feature (65)..(314): Homolog of NCBI NO: 1351279 NR Description: Triosephosphate isomerase, cytosolic (TIM)
  misc_feature (65)..(311): Homolog of NCBI NO: 34895792 NR Description: putative triose-phosphate isomerase
  misc_feature (65)..(314): Homolog of NCBI NO: 11270444 NR Description: triose-phosphate isomerase (EC 5.3.1.1),
  misc_feature (65)..(314): Homolog of NCBI NO: 15233272 NR Description: cytosolic triosephosphatisomerase
  misc_feature (65)..(311): Homolog of NCBI NO: 136063 NR Description: TRIOSEPHOSPHATE ISOMERASE, CYTOSOLIC (TIM)
  misc_feature (65)..(315): Homolog of NCBI NO: 1351282 NR Description: Triosephosphate isomerase, cytosolic (TIM)
  misc_feature (36)..(315): Homolog of NCBI NO: 1174745 NR Description: Triosephosphate isomerase, chloroplast precursor
  misc_feature (3)..(315): Homolog of NCBI NO: 13431949 NR Description: Triosephosphate isomerase, chloroplast precursor
  misc_feature (3)..(315): Homolog of NCBI NO: 1351271 NR Description: Triosephosphate isomerase, chloroplast precursor
  misc_feature (1)..(315): Homolog of NCBI NO: 15226479 NR Description: putative triosephosphate isomerase
MAATSLTAPPSFSGLRRISPKLDAAAVSSHQSFFHRVNSSTRLVSSSSSSHRSPRGVVAMAGSGKFFVGGNWKCNGTKDSIAKLISDLNSATLEADVDVVVSPPFVYIDQVKSSLTDRIDISGQNSWVGKGGAFTGEISVEQLKDLGCKWVILGHSERRHVIGEKDEFIGKKAAYALSEGLGVIACIGEKLEEREAGKTFDVCFAQLKAFADAVPSWDNIVVAYEPVWAIGTGKVASPQQAQEVHVAVRGWLKKNVSEEVASKTRIIYGGSVNGGNSAELAKEEDIDGFLVGGASLKGPEFATIVNSVTSKKVAA

SEQ ID NO: 24912 - protein, 256 aa, Arabidopsis thaliana
  peptide (1)..(256): Ceres Seq. ID no. 12602449
  misc_feature (5)..(250): Pfam Name: Triosephosphate isomerase Pfam Description: Triosephosphate isomerase
  misc_feature (6)..(255): Homolog of NCBI NO: 1351279 NR Description: Triosephosphate isomerase, cytosolic (TIM)
  misc_feature (6)..(252): Homolog of NCBI NO: 34895792 NR Description: putative triose-phosphate isomerase
  misc_feature (6)..(255): Homolog of NCBI NO: 11270444 NR Description: triose-phosphate isomerase (EC 5.3.1.1),
  misc_feature (6)..(255): Homolog of NCBI NO: 15233272 NR Description: cytosolic triosephosphatisomerase
  misc_feature (6)..(252): Homolog of NCBI NO: 136063 NR Description: TRIOSEPHOSPHATE ISOMERASE, CYTOSOLIC (TIM)
  misc_feature (6)..(256): Homolog of NCBI NO: 1351282 NR Description: Triosephosphate isomerase, cytosolic (TIM)
  misc_feature (1)..(256): Homolog of NCBI NO: 1174745 NR Description: Triosephosphate isomerase, chloroplast precursor
  misc_feature (1)..(256): Homolog of NCBI NO: 13431949 NR Description: Triosephosphate isomerase, chloroplast precursor
  misc_feature (1)..(256): Homolog of NCBI NO: 1351271 NR Description: Triosephosphate isomerase, chloroplast precursor
  misc_feature (1)..(256): Homolog of NCBI NO: 15226479 NR Description: putative triosephosphate isomerase
MAGSGKFFVGGNWKCNGTKDSIAKLISDLNSATLEADVDVVVSPPFVYIDQVKSSLTDRIDISGQNSWVGKGGAFTGEISVEQLKDLGCKWVILGHSERRHVIGEKDEFIGKKAAYALSEGLGVIACIGEKLEEREAGKTFDVCFAQLKAFADAVPSWDNIVVAYEPVWAIGTGKVASPQQAQEVHVAVRGWLKKNVSEEVASKTRIIYGGSVNGGNSAELAKEEDIDGFLVGGASLKGPEFATIVNSVTSKKVAA

SEQ ID NO: 24913 - DNA, 1249 bp, Arabidopsis thaliana
  misc_feature (1)..(1249): Ceres Seq. ID no. 12371882
  misc_feature: MA Experiment ID: 108434 Result: Down-regulated in Transcription
  misc_feature: MA Experiment 108434 PARAMETER Experiment Name: At_Root_Tips_cDNA_P Parameter: Tissue Value: Root Tips
  misc_feature: MA Experiment ID: 108569 Result: Up-regulated in Transcription
  misc_feature: MA Experiment 108569 PARAMETER Experiment Name: At_0.001%_MeJA__cDNA_P Parameter: Timepoint (hr) Value: 6
  misc_feature: MA Experiment 108569 PARAMETER Experiment Name: At_0.001%_MeJA__cDNA_P Parameter: Tissue Value: Aerial
  misc_feature: MA Experiment 108569 PARAMETER Experiment Name: At_0.001%_MeJA__cDNA_P Parameter: Treatment Value: 0.001% MeJA vs. No Treatment
  misc_feature: MA Experiment ID: 108605 Result: Up-regulated in Transcription
  misc_feature: MA Experiment 108605 PARAMETER Experiment Name: At_100uM_ABA_cDNA_P Parameter: Timepoint (hr) Value: 6
  misc_feature: MA Experiment 108605 PARAMETER Experiment Name: At_100uM_ABA_cDNA_P Parameter: Tissue Value: Aerial
  misc_feature: MA Experiment 108605 PARAMETER Experiment Name: At_100uM_ABA_cDNA_P Parameter: Treatment Value: 100uM ABA vs. No Treatment
  misc_feature: MA Experiment ID: 108609 Result: Up-regulated in Transcription
  misc_feature: MA Experiment 108609 PARAMETER Experiment Name: At_100uM_ABA_cDNA_P Parameter: Timepoint (hr) Value: 24
  misc_feature: MA Experiment 108609 PARAMETER Experiment Name: At_100uM_ABA_cDNA_P Parameter: Tissue Value: Aerial
  misc_feature: MA Experiment 108609 PARAMETER Experiment Name: At_100uM_ABA_cDNA_P Parameter: Treatment Value: 100uM ABA vs. No Treatment
  misc_feature: MA Experiment ID: 108668 Result: Down-regulated in Transcription
  misc_feature: MA Experiment 108668 PARAMETER Experiment Name: At_2mM_SA_cDNA_P Parameter: Plant Line Value: WS
  misc_feature: MA Experiment 108668 PARAMETER Experiment Name: At_2mM_SA_cDNA_P Parameter: Timepoint (hr) Value: 6
  misc_feature: MA Experiment 108668 PARAMETER Experiment Name: At_2mM_SA_cDNA_P Parameter: Treatment Value: 2mM SA vs. No Treatment
  misc_feature: MA Experiment ID: 20000090 Result: Down-regulated in Transcription
  misc_feature: MA Experiment ID: 20000113 Result: Down-regulated in Transcription
  misc_feature: MA Experiment 20000113 PARAMETER Experiment Name: At_42deg_Heat_cDNA_P Parameter: Temperature (deg C) Value: 42 vs. 22
  misc_feature: MA Experiment 20000113 PARAMETER Experiment Name: At_42deg_Heat_cDNA_P Parameter: Timepoint (hr) Value: 8
  misc_feature: MA Experiment 20000113 PARAMETER Experiment Name: At_42deg_Heat_cDNA_P Parameter: Tissue Value: Aerial
  misc_feature: MA Experiment ID: 20000180 Result: Up-regulated in Transcription
  misc_feature: MA Experiment 20000180 PARAMETER Experiment Name: At_Germinating_Seeds_P Parameter: Age (hr) Value: 24 vs. 0
  misc_feature: MA Experiment 20000180 PARAMETER Experiment Name: At_Germinating_Seeds_P Parameter: Tissue Value: Germinating Seeds
  misc_feature: MA Experiment ID: 20000182 Result: Down-regulated in Transcription
  misc_feature: MA Experiment 20000182 PARAMETER Experiment Name: At_2mM_SA_P Parameter: Age (day) Value: 14
  misc_feature: MA Experiment 20000182 PARAMETER Experiment Name: At_2mM_SA_P Parameter: Organism Value: A. thaliana
  misc_feature: MA Experiment 20000182 PARAMETER Experiment Name: At_2mM_SA_P Parameter: Plant Line Value: WS
  misc_feature: MA Experiment 20000182 PARAMETER Experiment Name: At_2mM_SA_P Parameter: Timepoint (hr) Value: 6
  misc_feature: MA Experiment 20000182 PARAMETER Experiment Name: At_2mM_SA_P Parameter: Tissue Value: Aerial
  misc_feature: MA Experiment 20000182 PARAMETER Experiment Name: At_2mM_SA_P Parameter: Treatment Value: 2mM SA vs. No Treatment
  misc_feature: MA Experiment ID: 20000185 Result: Down-regulated in Transcription
  misc_feature: MA Experiment 20000185 PARAMETER Experiment Name: At_Roots__P Parameter: Age (day) Value: 7 vs. 21
  misc_feature: MA Experiment 20000185 PARAMETER Experiment Name: At_Roots__P Parameter: Organism Value: A. thaliana
  misc_feature: MA Experiment 20000185 PARAMETER Experiment Name: At_Roots__P Parameter: Tissue Value: Roots vs. Whole Plant
  misc_feature: MA Experiment ID: 20000227 Result: Down-regulated in Transcription
  misc_feature: MA Experiment 20000227 PARAMETER Experiment Name: At_Root-Tips-vs-Tops_P Parameter: Tissue Value: Root Tips vs. Root Tops
  misc_feature: MA Experiment ID: 20000455 Result: Up-regulated in Transcription
  misc_feature: MA Experiment 20000455 PARAMETER Experiment Name: At_100uM_ABA_P Parameter: Age (day) Value: 16
  misc_feature: MA Experiment 20000455 PARAMETER Experiment Name: At_100uM_ABA_P Parameter: Organism Value: A. thaliana
  misc_feature: MA Experiment 20000455 PARAMETER Experiment Name: At_100uM_ABA_P Parameter: Plant Line Value: WS
  misc_feature: MA Experiment 20000455 PARAMETER Experiment Name: At_100uM_ABA_P Parameter: Timepoint (hr) Value: 48
  misc_feature: MA Experiment 20000455 PARAMETER Experiment Name: At_100uM_ABA_P Parameter: Tissue Value: Aerial
  misc_feature: MA Experiment 20000455 PARAMETER Experiment Name: At_100uM_ABA_P Parameter: Treatment Value: 100uM ABA vs. No Treatment
  misc_feature: MA Experiment ID: 20000794 Result: Down-regulated in Transcription
  misc_feature: MA Experiment 20000794 PARAMETER Experiment Name: At_Petals_P Parameter: Age (day) Value: 23-25 days
  misc_feature: MA Experiment 20000794 PARAMETER Experiment Name: At_Petals_P Parameter: Plant Line Value: WS
  misc_feature: MA Experiment 20000794 PARAMETER Experiment Name: At_Petals_P Parameter: Tissue Value: Petals vs. Whole plant
  misc_feature: MA Experiment ID: 20001248 Result: Down-regulated in Transcription
  misc_feature: MA Experiment 20001248 PARAMETER Experiment Name: At_Far-red-induction_P Parameter: Age (day) Value: 7
  misc_feature: MA Experiment 20001248 PARAMETER Experiment Name: At_Far-red-induction_P Parameter: Light Value: Far-red vs. White
  misc_feature: MA Experiment 20001248 PARAMETER Experiment Name: At_Far-red-induction_P Parameter: Organism Value: A. thaliana
  misc_feature: MA Experiment 20001248 PARAMETER Experiment Name: At_Far-red-induction_P Parameter: Plant Line Value: Columbia
  misc_feature: MA Experiment 20001248 PARAMETER Experiment Name: At_Far-red-induction_P Parameter: Timepoint (hr) Value: 4
  misc_feature: MA Experiment 20001248 PARAMETER Experiment Name: At_Far-red-induction_P Parameter: Tissue Value: Whole Plant
  misc_feature: MA Experiment ID: 20001450 Result: Down-regulated in Transcription
  misc_feature: MA Experiment 20001450 PARAMETER Experiment Name: At_Far-red-induction_P Parameter: Age (day) Value: 7
  misc_feature: MA Experiment 20001450 PARAMETER Experiment Name: At_Far-red-induction_P Parameter: Light Value: Far-red vs. White
  misc_feature: MA Experiment 20001450 PARAMETER Experiment Name: At_Far-red-induction_P Parameter: Organism Value: A. thaliana
  misc_feature: MA Experiment 20001450 PARAMETER Experiment Name: At_Far-red-induction_P Parameter: Plant Line Value: Columbia
  misc_feature: MA Experiment 20001450 PARAMETER Experiment Name: At_Far-red-induction_P Parameter: Timepoint (hr) Value: 8
  misc_feature: MA Experiment 20001450 PARAMETER Experiment Name: At_Far-red-induction_P Parameter: Tissue Value: Whole Plant
  misc_feature: MA Experiment ID: 20001451 Result: Down-regulated in Transcription
  misc_feature: MA Experiment 20001451 PARAMETER Experiment Name: At_Far-red-induction_P Parameter: Age (day) Value: 7
  misc_feature: MA Experiment 20001451 PARAMETER Experiment Name: At_Far-red-induction_P Parameter: Light Value: Far-red vs. White
  misc_feature: MA Experiment 20001451 PARAMETER Experiment Name: At_Far-red-induction_P Parameter: Organism Value: A. thaliana
  misc_feature: MA Experiment 20001451 PARAMETER Experiment Name: At_Far-red-induction_P Parameter: Plant Line Value: Columbia
  misc_feature: MA Experiment 20001451 PARAMETER Experiment Name: At_Far-red-induction_P Parameter: Timepoint (hr) Value: 24
  misc_feature: MA Experiment 20001451 PARAMETER Experiment Name: At_Far-red-induction_P Parameter: Tissue Value: Whole Plant
  misc_feature: MA Experiment ID: 20001555 Result: Up-regulated in Transcription
  misc_feature: MA Experiment 20001555 PARAMETER Experiment Name: At_Drought_Soil_Dry_P Parameter: Age (day) Value: 24
  misc_feature: MA Experiment 20001555 PARAMETER Experiment Name: At_Drought_Soil_Dry_P Parameter: Organism Value: A. thaliana
  misc_feature: MA Experiment 20001555 PARAMETER Experiment Name: At_Drought_Soil_Dry_P Parameter: Plant Line Value: WS
  misc_feature: MA Experiment 20001555 PARAMETER Experiment Name: At_Drought_Soil_Dry_P Parameter: Post Timepoint (hr) Value: None
  misc_feature: MA Experiment 20001555 PARAMETER Experiment Name: At_Drought_Soil_Dry_P Parameter: Post-Treatment Value: None
  misc_feature: MA Experiment 20001555 PARAMETER Experiment Name: At_Drought_Soil_Dry_P Parameter: Timepoint (day) Value: 10
  misc_feature: MA Experiment 20001555 PARAMETER Experiment Name: At_Drought_Soil_Dry_P Parameter: Treatment Value: Drought vs. No Drought
  misc_feature: MA Experiment ID: 20001557 Result: Down-regulated in Transcription
  misc_feature: MA Experiment 20001557 PARAMETER Experiment Name: At_Drought_Soil_Dry_P Parameter: Age (day) Value: 27
  misc_feature: MA Experiment 20001557 PARAMETER Experiment Name: At_Drought_Soil_Dry_P Parameter: Organism Value: A. thaliana
  misc_feature: MA Experiment 20001557 PARAMETER Experiment Name: At_Drought_Soil_Dry_P Parameter: Plant Line Value: WS
  misc_feature: MA Experiment 20001557 PARAMETER Experiment Name: At_Drought_Soil_Dry_P Parameter: Post Timepoint (hr) Value: 3
  misc_feature: MA Experiment 20001557 PARAMETER Experiment Name: At_Drought_Soil_Dry_P Parameter: Post-Treatment Value: Re-Water vs. No Drought
  misc_feature: MA Experiment 20001557 PARAMETER Experiment Name: At_Drought_Soil_Dry_P Parameter: Timepoint (day) Value: 13
  misc_feature: MA Experiment 20001557 PARAMETER Experiment Name: At_Drought_Soil_Dry_P Parameter: Treatment Value: Drought vs. No Drought
  misc_feature: MA Experiment ID: 20001560 Result: Up-regulated in Transcription
  misc_feature: MA Experiment 20001560 PARAMETER Experiment Name: At_Drought_Soil_Dry_P Parameter: Age (day) Value: 28
  misc_feature: MA Experiment 20001560 PARAMETER Experiment Name: At_Drought_Soil_Dry_P Parameter: Organism Value: A. thaliana
  misc_feature: MA Experiment 20001560 PARAMETER Experiment Name: At_Drought_Soil_Dry_P Parameter: Plant Line Value: WS
  misc_feature: MA Experiment 20001560 PARAMETER Experiment Name: At_Drought_Soil_Dry_P Parameter: Post Timepoint (hr) Value: None
  misc_feature: MA Experiment 20001560 PARAMETER Experiment Name: At_Drought_Soil_Dry_P Parameter: Post-Treatment Value: None
  misc_feature: MA Experiment 20001560 PARAMETER Experiment Name: At_Drought_Soil_Dry_P Parameter: Timepoint (day) Value: 14
  misc_feature: MA Experiment 20001560 PARAMETER Experiment Name: At_Drought_Soil_Dry_P Parameter: Treatment Value: Drought vs. No Drought
  misc_feature: MA Experiment ID: 20001905 Result: Down-regulated in Transcription
  misc_feature: MA Experiment 20001905 PARAMETER Experiment Name: At_Drought_Reproduction_P Parameter: Age (day) Value: 40
  misc_feature: MA Experiment 20001905 PARAMETER Experiment Name: At_Drought_Reproduction_P Parameter: Organism Value: A. thaliana
  misc_feature: MA Experiment 20001905 PARAMETER Experiment Name: At_Drought_Reproduction_P Parameter: Plant Line Value: WS
  misc_feature: MA Experiment 20001905 PARAMETER Experiment Name: At_Drought_Reproduction_P Parameter: Timepoint (day) Value: 10
  misc_feature: MA Experiment 20001905 PARAMETER Experiment Name: At_Drought_Reproduction_P Parameter: Tissue Value: Rosettes
  misc_feature: MA Experiment 20001905 PARAMETER Experiment Name: At_Drought_Reproduction_P Parameter: Treatment Value: Drought vs. No Drought
  misc_feature: MA Experiment ID: 20001911 Result: Down-regulated in Transcription
  misc_feature: MA Experiment 20001911 PARAMETER Experiment Name: At_Drought_Reproduction_P Parameter: Age (day) Value: 40
  misc_feature: MA Experiment 20001911 PARAMETER Experiment Name: At_Drought_Reproduction_P Parameter: Organism Value: A. thaliana
  misc_feature: MA Experiment 20001911 PARAMETER Experiment Name: At_Drought_Reproduction_P Parameter: Plant Line Value: WS
  misc_feature: MA Experiment 20001911 PARAMETER Experiment Name: At_Drought_Reproduction_P Parameter: Timepoint (day) Value: 10
  misc_feature: MA Experiment 20001911 PARAMETER Experiment Name: At_Drought_Reproduction_P Parameter: Tissue Value: Flowers
  misc_feature: MA Experiment 20001911 PARAMETER Experiment Name: At_Drought_Reproduction_P Parameter: Treatment Value: Drought vs. No Drought
acgattgatatatactgatctcttgtcttcttcactctccaacggttctgtactatcttcagagcttcgagaatgtcgatgttaatggcggccaaatccacttcactctttagctcaaaccctacaatttcagctaaaatagggcaaaaccctcgcggcgtcagatcggtttatccgacggtgagaatgcagtcacgtgttcaccgtctgattgaagagcaaggtgctgtgcttattcccggagtctacgacgcattatctgcggctattgtgcagcagaccggattctccgccgcattaatctccggttacgccctctccgccgtaactttgggaaaaccagatttcggtttgataacacctccggagatggcagcaacggcgagatcagtgtgtgctgcggctccaaagattccaatcattgcagatgcagatactggtggaggaaatgctctcaatgttcaaagaaccgtcaaggacttaatcgcagcaggtgctgctggttgcttccttgaggaccaggcatggccaaagaggtgtggacatatgcgtggcaaagaggtcatacctgcggaggaacacgctgctaaaatagcatcagcaagagacgctattggagatgctgacttttttctaatcgctaggactgatgctcgtgcactttccgcaaaaacaggactttcagacgccattgaccgtgctaatctttatatggaggcaggagctgatgcttcctttgttgaggcaccgagggacgatgacgagcttaaggaaatcggaaggcgcacaaaaggttacagactgtgtaacatgcttgaaggtggacgcacgccattgcatacgcctgatgagcttaaagaaatgggttttcacttgatcgcacacccacttacctcgctctatgcgtcgactcgagctcttgtcgatgttcttaagattctcaaggagaaaggaaccaccaaagaccacttagaaaagatgataactttcgaagagtttaaccgtttggtgaacttggattcatggtatgagctcgaaaccaagtactctaacctcagaaacgctcttggggaaacaaaataatgagattctgattactctgtccacaatcgaagctcttgcaatgtatcatcaataatgttatcttcttttttcacttgtttgtatcaatattcaataattgtgtgttttgacatgtaaaaactcaaaaaaagttctaatttatttggaaagcttgttcttgctgctt

SEQ ID NO: 24914 - protein, 336 aa, Arabidopsis thaliana
  peptide (1)..(336): Ceres Seq. ID no. 12371883
  misc_feature (115)..(193): Pfam Name: Isocitrate lyase family Pfam Description: Isocitrate lyase family
  misc_feature (41)..(326): Homolog of NCBI NO: 22985472 NR Description: hypothetical protein [Burkholderia fungorum]
  misc_feature (47)..(327): Homolog of NCBI NO: 18312827 NR Description: carboxyphosphonoenolpyruvate phosphonomutase
  misc_feature (42)..(327): Homolog of NCBI NO: 17229355 NR Description: carboxyphosphonoenolpyruvate phosphonomutase
  misc_feature (42)..(326): Homolog of NCBI NO: 23043034 NR Description: hypothetical protein [Trichodesmium erythraeum
  misc_feature (66)..(336): Homolog of NCBI NO: 25324627 NR Description: F24J8.7 protein - Arabidopsis thaliana
  misc_feature (16)..(327): Homolog of NCBI NO: 6831519 NR Description: PUTATIVE CARBOXYVINYL-CARBOXYPHOSPHONATE (CARBOXYPHOSPHONOENOLPYRUVATE PHOSPHONOMUTASE) (CPEP
  misc_feature (5)..(336): Homolog of NCBI NO: 6831518 NR Description: Putative carboxyvinyl-carboxyphosphonate (Carboxyphosphonoenolpyruvate phosphonomutase) (CPEP
  misc_feature (3)..(336): Homolog of NCBI NO: 18252195 NR Description: putative carboxyphosphonoenolpyruvate mutase
  misc_feature (1)..(336): Homolog of NCBI NO: 18411340 NR Description: carboxyphosphonoenolpyruvate mutase, putative
  misc_feature (1)..(336): Homolog of NCBI NO: 30687359 NR Description: expressed protein [Arabidopsis thaliana]
MSMLMAAKSTSLFSSNPTISAKIGQNPRGVRSVYPTVRMQSRVHRLIEEQGAVLIPGVYDALSAAIVQQTGFSAALISGYALSAVTLGKPDFGLITPPEMAATARSVCAAAPKIPIIADADTGGGNALNVQRTVKDLIAAGAAGCFLEDQAWPKRCGHMRGKEVIPAEEHAAKIASARDAIGDADFFLIARTDARALSAKTGLSDAIDRANLYMEAGADASFVEAPRDDDELKEIGRRTKGYRLCNMLEGGRTPLHTPDELKEMGFHLIAHPLTSLYASTRALVDVLKILKEKGTTKDHLEKMITFEEFNRLVNLDSWYELETKYSNLRNALGETK

SEQ ID NO: 24915 - protein, 334 aa, Arabidopsis thaliana
  peptide (1)..(334): Ceres Seq. ID no. 12371884
  misc_feature (113)..(191): Pfam Name: Isocitrate lyase family Pfam Description: Isocitrate lyase family
  misc_feature (39)..(324): Homolog of NCBI NO: 22985472 NR Description: hypothetical protein [Burkholderia fungorum]
  misc_feature (45)..(325): Homolog of NCBI NO: 18312827 NR Description: carboxyphosphonoenolpyruvate phosphonomutase
  misc_feature (40)..(325): Homolog of NCBI NO: 17229355 NR Description: carboxyphosphonoenolpyruvate phosphonomutase
  misc_feature (40)..(324): Homolog of NCBI NO: 23043034 NR Description: hypothetical protein [Trichodesmium erythraeum
  misc_feature (64)..(334): Homolog of NCBI NO: 25324627 NR Description: F24J8.7 protein - Arabidopsis thaliana
  misc_feature (14)..(325): Homolog of NCBI NO: 6831519 NR Description: PUTATIVE CARBOXYVINYL-CARBOXYPHOSPHONATE (CARBOXYPHOSPHONOENOLPYRUVATE PHOSPHONOMUTASE) (CPEP
  misc_feature (3)..(334): Homolog of NCBI NO: 6831518 NR Description: Putative carboxyvinyl-carboxyphosphonate (Carboxyphosphonoenolpyruvate phosphonomutase) (CPEP
  misc_feature (1)..(334): Homolog of NCBI NO: 18252195 NR Description: putative carboxyphosphonoenolpyruvate mutase
  misc_feature (1)..(334): Homolog of NCBI NO: 18411340 NR Description: carboxyphosphonoenolpyruvate mutase, putative
  misc_feature (1)..(334): Homolog of NCBI NO: 30687359 NR Description: expressed protein [Arabidopsis thaliana]
MLMAAKSTSLFSSNPTISAKIGQNPRGVRSVYPTVRMQSRVHRLIEEQGAVLIPGVYDALSAAIVQQTGFSAALISGYALSAVTLGKPDFGLITPPEMAATARSVCAAAPKIPIIADADTGGGNALNVQRTVKDLIAAGAAGCFLEDQAWPKRCGHMRGKEVIPAEEHAAKIASARDAIGDADFFLIARTDARALSAKTGLSDAIDRANLYMEAGADASFVEAPRDDDELKEIGRRTKGYRLCNMLEGGRTPLHTPDELKEMGFHLIAHPLTSLYASTRALVDVLKILKEKGTTKDHLEKMITFEEFNRLVNLDSWYELETKYSNLRNALGETK

SEQ ID NO: 24916 - protein, 332 aa, Arabidopsis thaliana
  peptide (1)..(332): Ceres Seq. ID no. 12371885
  misc_feature (111)..(189): Pfam Name: Isocitrate lyase family Pfam Description: Isocitrate lyase family
  misc_feature (1)..(332): Homolog of NCBI NO: 18252195 NR Description: putative carboxyphosphonoenolpyruvate mutase
  misc_feature (1)..(332): Homolog of NCBI NO: 18411340 NR Description: carboxyphosphonoenolpyruvate mutase, putative
  misc_feature (43)..(323): Homolog of NCBI NO: 18312827 NR Description: carboxyphosphonoenolpyruvate phosphonomutase
  misc_feature (38)..(322): Homolog of NCBI NO: 23043034 NR Description: hypothetical protein [Trichodesmium erythraeum
  misc_feature (12)..(323): Homolog of NCBI NO: 6831519 NR Description: PUTATIVE CARBOXYVINYL-CARBOXYPHOSPHONATE (CARBOXYPHOSPHONOENOLPYRUVATE PHOSPHONOMUTASE) (CPEP
  misc_feature (1)..(332): Homolog of NCBI NO: 6831518 NR Description: Putative carboxyvinyl-carboxyphosphonate (Carboxyphosphonoenolpyruvate phosphonomutase) (CPEP
  misc_feature (62)..(332): Homolog of NCBI NO: 25324627 NR Description: F24J8.7 protein - Arabidopsis thaliana
  misc_feature (38)..(323): Homolog of NCBI NO: 17229355 NR Description: carboxyphosphonoenolpyruvate phosphonomutase
  misc_feature (37)..(322): Homolog of NCBI NO: 22985472 NR Description: hypothetical protein [Burkholderia fungorum]
  misc_feature (1)..(332): Homolog of NCBI NO: 30687359 NR Description: expressed protein [Arabidopsis thaliana]
MAAKSTSLFSSNPTISAKIGQNPRGVRSVYPTVRMQSRVHRLIEEQGAVLIPGVYDALSAAIVQQTGFSAALISGYALSAVTLGKPDFGLITPPEMAATARSVCAAAPKIPIIADADTGGGNALNVQRTVKDLIAAGAAGCFLEDQAWPKRCGHMRGKEVIPAEEHAAKIASARDAIGDADFFLIARTDARALSAKTGLSDAIDRANLYMEAGADASFVEAPRDDDELKEIGRRTKGYRLCNMLEGGRTPLHTPDELKEMGFHLIAHPLTSLYASTRALVDVLKILKEKGTTKDHLEKMITFEEFNRLVNLDSWYELETKYSNLRNALGETK

SEQ ID NO: 24917 - DNA, 1832 bp, Arabidopsis thaliana
  misc_feature (1)..(1832): Ceres Seq. ID no. 13494160
  misc_feature: MA Experiment ID: 108434 Result: Up-regulated in Transcription
  misc_feature: MA Experiment 108434 PARAMETER Experiment Name: At_Root_Tips_cDNA_P Parameter: Tissue Value: Root Tips
  misc_feature: MA Experiment ID: 20000179 Result: Up-regulated in Transcription
  misc_feature: MA Experiment 20000179 PARAMETER Experiment Name: At_Germinating_Seeds_P Parameter: Age (hr) Value: 6 vs. 0
  misc_feature: MA Experiment 20000179 PARAMETER Experiment Name: At_Germinating_Seeds_P Parameter: Tissue Value: Germinating Seeds
  misc_feature: MA Experiment ID: 20000184 Result: Down-regulated in Transcription
  misc_feature: MA Experiment 20000184 PARAMETER Experiment Name: At_Shoots__P Parameter: Age (day) Value: 7
  misc_feature: MA Experiment 20000184 PARAMETER Experiment Name: At_Shoots__P Parameter: Tissue Value: Shoots vs. Whole Plant
  misc_feature: MA Experiment ID: 20000495 Result: Up-regulated in Transcription
  misc_feature: MA Experiment 20000495 PARAMETER Experiment Name: At_Guard_Cells_P Parameter: Harvest Date Value: 8/2/2002
  misc_feature: MA Experiment 20000495 PARAMETER Experiment Name: At_Guard_Cells_P Parameter: Organism Value: A. thaliana
  misc_feature: MA Experiment 20000495 PARAMETER Experiment Name: At_Guard_Cells_P Parameter: Tissue Value: Guard Cells vs. Leaves
  misc_feature: MA Experiment ID: 20001451 Result: Up-regulated in Transcription
  misc_feature: MA Experiment 20001451 PARAMETER Experiment Name: At_Far-red-induction_P Parameter: Age (day) Value: 7
  misc_feature: MA Experiment 20001451 PARAMETER Experiment Name: At_Far-red-induction_P Parameter: Light Value: Far-red vs. White
  misc_feature: MA Experiment 20001451 PARAMETER Experiment Name: At_Far-red-induction_P Parameter: Organism Value: A. thaliana
  misc_feature: MA Experiment 20001451 PARAMETER Experiment Name: At_Far-red-induction_P Parameter: Plant Line Value: Columbia
  misc_feature: MA Experiment 20001451 PARAMETER Experiment Name: At_Far-red-induction_P Parameter: Timepoint (hr) Value: 24
  misc_feature: MA Experiment 20001451 PARAMETER Experiment Name: At_Far-red-induction_P Parameter: Tissue Value: Whole Plant
actttttttcttcttcttccatttttttgttctcacgtcgctctctctttttttcgagattcagctgtaaaaccctaactagcgccatagccaaggaagctttcctcagatcgtctctccgaaattttccggttaatcgtcagttaaggggaaaattaggctatggcgatgttaggtgcacagcaagttccagcagcagcttgtactccagatatggttgggaatgcttttgtgccccagtattatcacatattgcatcaatcacctgagcatgttcacagattttaccaagagattagcaagttaggtcgtcctgaagagaatggtttaatgagcatcacttctaccttgcaagctattgacaagaagataatggcgcttggttacggtgtaatcagtgcagagatagctactgtggacacacaagaatctcatggaggtggttatattgtactggtgactgggtatttgacgggaaaagacagtgtcaggaggacgtttagtcagaccttcttccttgctccacaggagacaggatactttgtcttgaatgatatgtttcgattcattgatgaaggcactgtcgtacatggaaatcagattccagtgaacaacgtccaagctcctgtcaacacttaccaggacacagctgctgcgaaggaaattccagatgactttgttcaggagaaatatgtccaagagaatcatgctgttaagcaaaccgaggtgttgtccaagagcattaatgagcctgaaaaagtgttcacgccctctgaagatgaacaagtatcagctgcagaagaagctctggtgactgaaacagttaatgaagcaccaattgaagtgcaaaaggttggagaatctgattctaggactggcgaaattccaaagagatcttatgcatcaattgtgaaggttatgaaagaaaatgctgcaccaatgtctgcttcgagaactccaacaaaggtggaaccaaagaaacaagaagatcaagccattcatatccctctaccaacaccattgtctgagaaatcagattcaggagcaaatgttgctgtaaatgagaacaatcaagagaatgaaagagctctaggtccatccatctatctaaagggtttaccccttgatgcaacacctgccttgcttgagaatgagttccagaaatttggacttattaggaccaatggaattcaagtgagaagccagaagggattctgttttggttttgttgagtttgaatccgcaagttccatgcaaagcgctatcgaggcatcacctgtcatgctcaatggacacaaagttgttgtggaggaaaagcgatctaccgcaagagggaactatagaggacgttcgacgtttggtgtaaacacaggctacagaaacgaaggaggaaggggtcgtgggagctttggaggtggaagaggaggatatggccggaccgatttcaacggatatggtaataacaggggaaacaatagaggcggatacgcaaaccgagcaaatggtgatggtggtgggttcccgagggccaatggtaacaatggacgagtaagacgtggtggcggaaatgatgctaacagagctacgaaacccgtggatgatgctccccgtgtgtctgttgctgcgtaaatgtgcttttgaaacaaaaagctctattggttttagagagtttaggcgtagagcaatggcaaaaaaaaacactattattttcttttcactgtgtcgccattttattaattggagtcaaaacttgagagcaagagagagtttcgtcggttcttgcttgtctattttttcttcactgctaatgaaatctctttcttcatgtggcc

SEQ ID NO: 24918 - protein, 488 aa, Arabidopsis thaliana
  peptide (1)..(488): Ceres Seq. ID no. 13494161
  misc_feature (19)..(135): Pfam Name: Nuclear transport factor 2 (NTF2) domain Pfam Description: Nuclear transport factor 2 (NTF2) domain
  misc_feature (19)..(452): Homolog of NCBI NO: 15240057 NR Description: NTF2-containing RNA-binding protein, putative
  misc_feature (1)..(472): Homolog of NCBI NO: 34394922 NR Description: putative Ras-GTPase activating protein SH3
  misc_feature (16)..(441): Homolog of NCBI NO: 10177355 NR Description: RNA-binding protein-like [Arabidopsis thaliana]
  misc_feature (16)..(437): Homolog of NCBI NO: 30695510 NR Description: NTF2-containing RNA-binding protein, putative
  misc_feature (10)..(488): Homolog of NCBI NO: 31126693 NR Description: putative GAP SH3 binding protein
  misc_feature (6)..(469): Homolog of NCBI NO: 21553535 NR Description: ras-GTPase-activating protein SH3-domain binding
  misc_feature (6)..(469): Homolog of NCBI NO: 30697455 NR Description: NTF2-containing RNA-binding protein, putative
  misc_feature (6)..(469): Homolog of NCBI NO: 30697452 NR Description: NTF2-containing RNA-binding protein, putative
  misc_feature (19)..(488): Homolog of NCBI NO: 9294171 NR Description: RNA-binding protein-like [Arabidopsis thaliana]
  misc_feature (1)..(488): Homolog of NCBI NO: 30687772 NR Description: NTF2-containing RNA-binding protein, putative
MAMLGAQQVPAAACTPDMVGNAFVPQYYHILHQSPEHVHRFYQEISKLGRPEENGLMSITSTLQAIDKKIMALGYGVISAEIATVDTQESHGGGYIVLVTGYLTGKDSVRRTFSQTFFLAPQETGYFVLNDMFRFIDEGTVVHGNQIPVNNVQAPVNTYQDTAAAKEIPDDFVQEKYVQENHAVKQTEVLSKSINEPEKVFTPSEDEQVSAAEEALVTETVNEAPIEVQKVGESDSRTGEIPKRSYASIVKVMKENAAPMSASRTPTKVEPKKQEDQAIHIPLPTPLSEKSDSGANVAVNENNQENERALGPSIYLKGLPLDATPALLENEFQKFGLIRTNGIQVRSQKGFCFGFVEFESASSMQSAIEASPVMLNGHKVVVEEKRSTARGNYRGRSTFGVNTGYRNEGGRGRGSFGGGRGGYGRTDFNGYGNNRGNNRGGYANRANGDGGGFPRANGNNGRVRRGGGNDANRATKPVDDAPRVSVAA

SEQ ID NO: 24919 - protein, 486 aa, Arabidopsis thaliana
  peptide (1)..(486): Ceres Seq. ID no. 13494162
  misc_feature (17)..(133): Pfam Name: Nuclear transport factor 2 (NTF2) domain Pfam Description: Nuclear transport factor 2 (NTF2) domain
  misc_feature (17)..(450): Homolog of NCBI NO: 15240057 NR Description: NTF2-containing RNA-binding protein, putative
  misc_feature (1)..(470): Homolog of NCBI NO: 34394922 NR Description: putative Ras-GTPase activating protein SH3
  misc_feature (14)..(439): Homolog of NCBI NO: 10177355 NR Description: RNA-binding protein-like [Arabidopsis thaliana]
  misc_feature (14)..(435): Homolog of NCBI NO: 30695510 NR Description: NTF2-containing RNA-binding protein, putative
  misc_feature (8)..(486): Homolog of NCBI NO: 31126693 NR Description: putative GAP SH3 binding protein
  misc_feature (4)..(467): Homolog of NCBI NO: 21553535 NR Description: ras-GTPase-activating protein SH3-domain binding
  misc_feature (4)..(467): Homolog of NCBI NO: 30697455 NR Description: NTF2-containing RNA-binding protein, putative
  misc_feature (4)..(467): Homolog of NCBI NO: 30697452 NR Description: NTF2-containing RNA-binding protein, putative
  misc_feature (17)..(486): Homolog of NCBI NO: 9294171 NR Description: RNA-binding protein-like [Arabidopsis thaliana]
  misc_feature (1)..(486): Homolog of NCBI NO: 30687772 NR Description: NTF2-containing RNA-binding protein, putative
MLGAQQVPAAACTPDMVGNAFVPQYYHILHQSPEHVHRFYQEISKLGRPEENGLMSITSTLQAIDKKIMALGYGVISAEIATVDTQESHGGGYIVLVTGYLTGKDSVRRTFSQTFFLAPQETGYFVLNDMFRFIDEGTVVHGNQIPVNNVQAPVNTYQDTAAAKEIPDDFVQEKYVQENHAVKQTEVLSKSINEPEKVFTPSEDEQVSAAEEALVTETVNEAPIEVQKVGESDSRTGEIPKRSYASIVKVMKENAAPMSASRTPTKVEPKKQEDQAIHIPLPTPLSEKSDSGANVAVNENNQENERALGPSIYLKGLPLDATPALLENEFQKFGLIRTNGIQVRSQKGFCFGFVEFESASSMQSAIEASPVMLNGHKVVVEEKRSTARGNYRGRSTFGVNTGYRNEGGRGRGSFGGGRGGYGRTDFNGYGNNRGNNRGGYANRANGDGGGFPRANGNNGRVRRGGGNDANRATKPVDDAPRVSVAA

SEQ ID NO: 24920 - protein, 471 aa, Arabidopsis thaliana
  peptide (1)..(471): Ceres Seq. ID no. 13494163
  misc_feature (2)..(118): Pfam Name: Nuclear transport factor 2 (NTF2) domain Pfam Description: Nuclear transport factor 2 (NTF2) domain
  misc_feature (2)..(435): Homolog of NCBI NO: 15240057 NR Description: NTF2-containing RNA-binding protein, putative
  misc_feature (1)..(455): Homolog of NCBI NO: 34394922 NR Description: putative Ras-GTPase activating protein SH3
  misc_feature (1)..(424): Homolog of NCBI NO: 10177355 NR Description: RNA-binding protein-like [Arabidopsis thaliana]
  misc_feature (1)..(420): Homolog of NCBI NO: 30695510 NR Description: NTF2-containing RNA-binding protein, putative
  misc_feature (1)..(471): Homolog of NCBI NO: 31126693 NR Description: putative GAP SH3 binding protein
  misc_feature (1)..(452): Homolog of NCBI NO: 21553535 NR Description: ras-GTPase-activating protein SH3-domain binding
  misc_feature (1)..(452): Homolog of NCBI NO: 30697455 NR Description: NTF2-containing RNA-binding protein, putative
  misc_feature (1)..(452): Homolog of NCBI NO: 30697452 NR Description: NTF2-containing RNA-binding protein, putative
  misc_feature (2)..(471): Homolog of NCBI NO: 9294171 NR Description: RNA-binding protein-like [Arabidopsis thaliana]
  misc_feature (1)..(471): Homolog of NCBI NO: 30687772 NR Description: NTF2-containing RNA-binding protein, putative
MVGNAFVPQYYHILHQSPEHVHRFYQEISKLGRPEENGLMSITSTLQAIDKKIMALGYGVISAEIATVDTQESHGGGYIVLVTGYLTGKDSVRRTFSQTFFLAPQETGYFVLNDMFRFIDEGTVVHGNQIPVNNVQAPVNTYQDTAAAKEIPDDFVQEKYVQENHAVKQTEVLSKSINEPEKVFTPSEDEQVSAAEEALVTETVNEAPIEVQKVGESDSRTGEIPKRSYASIVKVMKENAAPMSASRTPTKVEPKKQEDQAIHIPLPTPLSEKSDSGANVAVNENNQENERALGPSIYLKGLPLDATPALLENEFQKFGLIRTNGIQVRSQKGFCFGFVEFESASSMQSAIEASPVMLNGHKVVVEEKRSTARGNYRGRSTFGVNTGYRNEGGRGRGSFGGGRGGYGRTDFNGYGNNRGNNRGGYANRANGDGGGFPRANGNNGRVRRGGGNDANRATKPVDDAPRVSVAA

SEQ ID NO: 24921 - DNA, 1122 bp, Arabidopsis thaliana
  misc_feature (1)..(1122): Ceres Seq. ID no. 12327371
  misc_feature: MA Experiment ID: 108569 Result: Down-regulated in Transcription
  misc_feature: MA Experiment 108569 PARAMETER Experiment Name: At_0.001%_MeJA__cDNA_P Parameter: Timepoint (hr) Value: 6
  misc_feature: MA Experiment 108569 PARAMETER Experiment Name: At_0.001%_MeJA__cDNA_P Parameter: Tissue Value: Aerial
  misc_feature: MA Experiment 108569 PARAMETER Experiment Name: At_0.001%_MeJA__cDNA_P Parameter: Treatment Value: 0.001% MeJA vs. No Treatment
  misc_feature: MA Experiment ID: 108577 Result: Down-regulated in Transcription
  misc_feature: MA Experiment 108577 PARAMETER Experiment Name: At_42deg_Heat_cDNA_P Parameter: Temperature (deg C) Value: 42 vs. 22
  misc_feature: MA Experiment 108577 PARAMETER Experiment Name: At_42deg_Heat_cDNA_P Parameter: Timepoint (hr) Value: 6
  misc_feature: MA Experiment 108577 PARAMETER Experiment Name: At_42deg_Heat_cDNA_P Parameter: Tissue Value: Aerial
  misc_feature: MA Experiment ID: 108595 Result: Up-regulated in Transcription
  misc_feature: MA Experiment 108595 PARAMETER Experiment Name: At_Ler-pi_Ovule_cDNA_P Parameter: Plant Line Value: null
  misc_feature: MA Experiment ID: 20000166 Result: Up-regulated in Transcription
  misc_feature: MA Experiment 20000166 PARAMETER Experiment Name: At_100uM_ABA_P Parameter: Age (day) Value: 14
  misc_feature: MA Experiment 20000166 PARAMETER Experiment Name: At_100uM_ABA_P Parameter: Organism Value: A. thaliana
  misc_feature: MA Experiment 20000166 PARAMETER Experiment Name: At_100uM_ABA_P Parameter: Plant Line Value: WS
  misc_feature: MA Experiment 20000166 PARAMETER Experiment Name: At_100uM_ABA_P Parameter: Timepoint (hr) Value: 1
  misc_feature: MA Experiment 20000166 PARAMETER Experiment Name: At_100uM_ABA_P Parameter: Tissue Value: Aerial
  misc_feature: MA Experiment 20000166 PARAMETER Experiment Name: At_100uM_ABA_P Parameter: Treatment Value: 100uM ABA vs. No Treatment
  misc_feature: MA Experiment ID: 20000169 Result: Up-regulated in Transcription
  misc_feature: MA Experiment 20000169 PARAMETER Experiment Name: At_100uM_ABA_P Parameter: Age (day) Value: 14
  misc_feature: MA Experiment 20000169 PARAMETER Experiment Name: At_100uM_ABA_P Parameter: Organism Value: A. thaliana
  misc_feature: MA Experiment 20000169 PARAMETER Experiment Name: At_100uM_ABA_P Parameter: Plant Line Value: WS
  misc_feature: MA Experiment 20000169 PARAMETER Experiment Name: At_100uM_ABA_P Parameter: Timepoint (hr) Value: 6
  misc_feature: MA Experiment 20000169 PARAMETER Experiment Name: At_100uM_ABA_P Parameter: Tissue Value: Aerial
  misc_feature: MA Experiment 20000169 PARAMETER Experiment Name: At_100uM_ABA_P Parameter: Treatment Value: 100uM ABA vs. No Treatment
  misc_feature: MA Experiment ID: 20000173 Result: Down-regulated in Transcription
  misc_feature: MA Experiment 20000173 PARAMETER Experiment Name: At_42deg_Heat_P Parameter: Age (day) Value: 14
  misc_feature: MA Experiment 20000173 PARAMETER Experiment Name: At_42deg_Heat_P Parameter: Organism Value: A. thaliana
  misc_feature: MA Experiment 20000173 PARAMETER Experiment Name: At_42deg_Heat_P Parameter: Plant Line Value: WS
  misc_feature: MA Experiment 20000173 PARAMETER Experiment Name: At_42deg_Heat_P Parameter: Temperature (deg C) Value: 42 vs. 22
  misc_feature: MA Experiment 20000173 PARAMETER Experiment Name: At_42deg_Heat_P Parameter: Timepoint (hr) Value: 6
  misc_feature: MA Experiment 20000173 PARAMETER Experiment Name: At_42deg_Heat_P Parameter: Tissue Value: Aerial
  misc_feature: MA Experiment ID: 20000179 Result: Down-regulated in Transcription
  misc_feature: MA Experiment 20000179 PARAMETER Experiment Name: At_Germinating_Seeds_P Parameter: Age (hr) Value: 6 vs. 0
  misc_feature: MA Experiment 20000179 PARAMETER Experiment Name: At_Germinating_Seeds_P Parameter: Tissue Value: Germinating Seeds
  misc_feature: MA Experiment ID: 20000234 Result: Down-regulated in Transcription
  misc_feature: MA Experiment 20000234 PARAMETER Experiment Name: At_Siliques_P Parameter: Age (day) Value: 21
  misc_feature: MA Experiment 20000234 PARAMETER Experiment Name: At_Siliques_P Parameter: Organism Value: A. thaliana
  misc_feature: MA Experiment 20000234 PARAMETER Experiment Name: At_Siliques_P Parameter: Plant Line Value: WS
  misc_feature: MA Experiment 20000234 PARAMETER Experiment Name: At_Siliques_P Parameter: Tissue Value: Less Than 5mm Siliques vs. Whole Plant
  misc_feature: MA Experiment ID: 20000235 Result: Down-regulated in Transcription
  misc_feature: MA Experiment 20000235 PARAMETER Experiment Name: At_Siliques_P Parameter: Age (day) Value: 21
  misc_feature: MA Experiment 20000235 PARAMETER Experiment Name: At_Siliques_P Parameter: Organism Value: A. thaliana
  misc_feature: MA Experiment 20000235 PARAMETER Experiment Name: At_Siliques_P Parameter: Plant Line Value: WS
  misc_feature: MA Experiment 20000235 PARAMETER Experiment Name: At_Siliques_P Parameter: Tissue Value: 5-10mm Siliques vs. Whole Plant
  misc_feature: MA Experiment ID: 20000264 Result: Down-regulated in Transcription
  misc_feature: MA Experiment 20000264 PARAMETER Experiment Name: At_Open_Flower_P Parameter: Age (day) Value: 21
  misc_feature: MA Experiment 20000264 PARAMETER Experiment Name: At_Open_Flower_P Parameter: Plant Line Value: WS
  misc_feature: MA Experiment 20000264 PARAMETER Experiment Name: At_Open_Flower_P Parameter: Tissue Value: Open Flower vs. Whole Plant
  misc_feature: MA Experiment ID: 20000265 Result: Down-regulated in Transcription
  misc_feature: MA Experiment 20000265 PARAMETER Experiment Name: At_Open_Flower_P Parameter: Age (day) Value: 21
  misc_feature: MA Experiment 20000265 PARAMETER Experiment Name: At_Open_Flower_P Parameter: Plant Line Value: WS
  misc_feature: MA Experiment 20000265 PARAMETER Experiment Name: At_Open_Flower_P Parameter: Tissue Value: Closed Flower vs. Whole Plant
  misc_feature: MA Experiment ID: 20000268 Result: Down-regulated in Transcription
  misc_feature: MA Experiment 20000268 PARAMETER Experiment Name: At_100mM_NaCl__P Parameter: Age (day) Value: 14
  misc_feature: MA Experiment 20000268 PARAMETER Experiment Name: At_100mM_NaCl__P Parameter: Organism Value: A. thaliana
  misc_feature: MA Experiment 20000268 PARAMETER Experiment Name: At_100mM_NaCl__P Parameter: Plant Line Value: WS
  misc_feature: MA Experiment 20000268 PARAMETER Experiment Name: At_100mM_NaCl__P Parameter: Timepoint (hr) Value: 6
  misc_feature: MA Experiment 20000268 PARAMETER Experiment Name: At_100mM_NaCl__P Parameter: Tissue Value: Whole Plant
  misc_feature: MA Experiment 20000268 PARAMETER Experiment Name: At_100mM_NaCl__P Parameter: Treatment Value: 100mM NaCl vs. No Treatment
  misc_feature: MA Experiment ID: 20000286 Result: Down-regulated in Transcription
  misc_feature: MA Experiment 20000286 PARAMETER Experiment Name: At_Open_Flower_P Parameter: Age (day) Value: 21
  misc_feature: MA Experiment 20000286 PARAMETER Experiment Name: At_Open_Flower_P Parameter: Plant Line Value: WS
  misc_feature: MA Experiment 20000286 PARAMETER Experiment Name: At_Open_Flower_P Parameter: Tissue Value: Half Open vs. Whole Plant
  misc_feature: MA Experiment ID: 20000308 Result: Down-regulated in Transcription
  misc_feature: MA Experiment 20000308 PARAMETER Experiment Name: At_100mM_NaCl__P Parameter: Age (day) Value: 17
  misc_feature: MA Experiment 20000308 PARAMETER Experiment Name: At_100mM_NaCl__P Parameter: Organism Value: A. thaliana
  misc_feature: MA Experiment 20000308 PARAMETER Experiment Name: At_100mM_NaCl__P Parameter: Plant Line Value: WS
  misc_feature: MA Experiment 20000308 PARAMETER Experiment Name: At_100mM_NaCl__P Parameter: Timepoint (hr) Value: 72
  misc_feature: MA Experiment 20000308 PARAMETER Experiment Name: At_100mM_NaCl__P Parameter: Tissue Value: Whole Plant
  misc_feature: MA Experiment 20000308 PARAMETER Experiment Name: At_100mM_NaCl__P Parameter: Treatment Value: 100mM NaCl vs. No Treatment
  misc_feature: MA Experiment ID: 20000438 Result: Down-regulated in Transcription
  misc_feature: MA Experiment 20000438 PARAMETER Experiment Name: At_Shoots__P Parameter: Age (day) Value: 14
  misc_feature: MA Experiment 20000438 PARAMETER Experiment Name: At_Shoots__P Parameter: Tissue Value: Shoots vs. Whole Plant
  misc_feature: MA Experiment ID: 20000439 Result: Down-regulated in Transcription
  misc_feature: MA Experiment 20000439 PARAMETER Experiment Name: At_Roots__P Parameter: Age (day) Value: 14 vs. 21
  misc_feature: MA Experiment 20000439 PARAMETER Experiment Name: At_Roots__P Parameter: Organism Value: A. thaliana
  misc_feature: MA Experiment 20000439 PARAMETER Experiment Name: At_Roots__P Parameter: Tissue Value: Roots vs. Whole Plant
  misc_feature: MA Experiment ID: 20000441 Result: Up-regulated in Transcription
  misc_feature: MA Experiment 20000441 PARAMETER Experiment Name: At_1uM_BR-BRZ__P Parameter: Tissue Value: Shoot Apices
  misc_feature: MA Experiment 20000441 PARAMETER Experiment Name: At_1uM_BR-BRZ__P Parameter: Treatment Value: 1uM BR vs. No Treatment
  misc_feature: MA Experiment ID: 20000456 Result: Down-regulated in Transcription
  misc_feature: MA Experiment 20000456 PARAMETER Experiment Name: At_100uM_BA_P Parameter: Age (day) Value: 14
  misc_feature: MA Experiment 20000456 PARAMETER Experiment Name: At_100uM_BA_P Parameter: Organism Value: A. thaliana
  misc_feature: MA Experiment 20000456 PARAMETER Experiment Name: At_100uM_BA_P Parameter: Plant Line Value: WS
  misc_feature: MA Experiment 20000456 PARAMETER Experiment Name: At_100uM_BA_P Parameter: Timepoint (hr) Value: 6
  misc_feature: MA Experiment 20000456 PARAMETER Experiment Name: At_100uM_BA_P Parameter: Tissue Value: Aerial
  misc_feature: MA Experiment 20000456 PARAMETER Experiment Name: At_100uM_BA_P Parameter: Treatment Value: 100uM BA vs. No Treatment
  misc_feature: MA Experiment ID: 20000460 Result: Up-regulated in Transcription
  misc_feature: MA Experiment 20000460 PARAMETER Experiment Name: At_10percent_PEG_P Parameter: Age (day) Value: 12
  misc_feature: MA Experiment 20000460 PARAMETER Experiment Name: At_10percent_PEG_P Parameter: Organism Value: A. thaliana
  misc_feature: MA Experiment 20000460 PARAMETER Experiment Name: At_10percent_PEG_P Parameter: Plant Line Value: WS
  misc_feature: MA Experiment 20000460 PARAMETER Experiment Name: At_10percent_PEG_P Parameter: Timepoint (day) Value: 12
  misc_feature: MA Experiment 20000460 PARAMETER Experiment Name: At_10percent_PEG_P Parameter: Tissue Value: Whole Plant
  misc_feature: MA Experiment 20000460 PARAMETER Experiment Name: At_10percent_PEG_P Parameter: Treatment Value: 10percent PEG vs. No Treatment
  misc_feature: MA Experiment ID: 20000495 Result: Down-regulated in Transcription
  misc_feature: MA Experiment 20000495 PARAMETER Experiment Name: At_Guard_Cells_P Parameter: Harvest Date Value: 8/2/2002
  misc_feature: MA Experiment 20000495 PARAMETER Experiment Name: At_Guard_Cells_P Parameter: Organism Value: A. thaliana
  misc_feature: MA Experiment 20000495 PARAMETER Experiment Name: At_Guard_Cells_P Parameter: Tissue Value: Guard Cells vs. Leaves
  misc_feature: MA Experiment ID: 20000527 Result: Up-regulated in Transcription
  misc_feature: MA Experiment 20000527 PARAMETER Experiment Name: At_10percent_PEG_P Parameter: Age (day) Value: 20
  misc_feature: MA Experiment 20000527 PARAMETER Experiment Name: At_10percent_PEG_P Parameter: Organism Value: A. thaliana
  misc_feature: MA Experiment 20000527 PARAMETER Experiment Name: At_10percent_PEG_P Parameter: Plant Line Value: WS
  misc_feature: MA Experiment 20000527 PARAMETER Experiment Name: At_10percent_PEG_P Parameter: Timepoint (day) Value: 20
  misc_feature: MA Experiment 20000527 PARAMETER Experiment Name: At_10percent_PEG_P Parameter: Tissue Value: Whole Plant
  misc_feature: MA Experiment 20000527 PARAMETER Experiment Name: At_10percent_PEG_P Parameter: Treatment Value: 10percent PEG vs. No Treatment
  misc_feature: MA Experiment ID: 20000573 Result: Down-regulated in Transcription
  misc_feature: MA Experiment 20000573 PARAMETER Experiment Name: At_100uM_ABA_Mutants__P Parameter: Organism Value: A. thaliana
  misc_feature: MA Experiment 20000573 PARAMETER Experiment Name: At_100uM_ABA_Mutants__P Parameter: Plant Line Value: CS22 vs. Ler wt
  misc_feature: MA Experiment 20000573 PARAMETER Experiment Name: At_100uM_ABA_Mutants__P Parameter: Timepoint (hr) Value: N/A
  misc_feature: MA Experiment 20000573 PARAMETER Experiment Name: At_100uM_ABA_Mutants__P Parameter: Tissue Value: Whole Plant
  misc_feature: MA Experiment 20000573 PARAMETER Experiment Name: At_100uM_ABA_Mutants__P Parameter: Treatment Value: None
  misc_feature: MA Experiment ID: 20000574 Result: Down-regulated in Transcription
  misc_feature: MA Experiment 20000574 PARAMETER Experiment Name: At_100uM_ABA_Mutants__P Parameter: Organism Value: A. thaliana
  misc_feature: MA Experiment 20000574 PARAMETER Experiment Name: At_100uM_ABA_Mutants__P Parameter: Plant Line Value: CS23 vs. Ler wt
  misc_feature: MA Experiment 20000574 PARAMETER Experiment Name: At_100uM_ABA_Mutants__P Parameter: Timepoint (hr) Value: N/A
  misc_feature: MA Experiment 20000574 PARAMETER Experiment Name: At_100uM_ABA_Mutants__P Parameter: Tissue Value: Whole Plant
  misc_feature: MA Experiment 20000574 PARAMETER Experiment Name: At_100uM_ABA_Mutants__P Parameter: Treatment Value: None
  misc_feature: MA Experiment ID: 20001247 Result: Up-regulated in Transcription
  misc_feature: MA Experiment 20001247 PARAMETER Experiment Name: At_Far-red-induction_P Parameter: Age (day) Value: 7
  misc_feature: MA Experiment 20001247 PARAMETER Experiment Name: At_Far-red-induction_P Parameter: Light Value: Far-red vs. White
  misc_feature: MA Experiment 20001247 PARAMETER Experiment Name: At_Far-red-induction_P Parameter: Organism Value: A. thaliana
  misc_feature: MA Experiment 20001247 PARAMETER Experiment Name: At_Far-red-induction_P Parameter: Plant Line Value: Columbia
  misc_feature: MA Experiment 20001247 PARAMETER Experiment Name: At_Far-red-induction_P Parameter: Timepoint (hr) Value: 1
  misc_feature: MA Experiment 20001247 PARAMETER Experiment Name: At_Far-red-induction_P Parameter: Tissue Value: Whole Plant
  misc_feature: MA Experiment ID: 20001248 Result: Up-regulated in Transcription
  misc_feature: MA Experiment 20001248 PARAMETER Experiment Name: At_Far-red-induction_P Parameter: Age (day) Value: 7
  misc_feature: MA Experiment 20001248 PARAMETER Experiment Name: At_Far-red-induction_P Parameter: Light Value: Far-red vs. White
  misc_feature: MA Experiment 20001248 PARAMETER Experiment Name: At_Far-red-induction_P Parameter: Organism Value: A. thaliana
  misc_feature: MA Experiment 20001248 PARAMETER Experiment Name: At_Far-red-induction_P Parameter: Plant Line Value: Columbia
  misc_feature: MA Experiment 20001248 PARAMETER Experiment Name: At_Far-red-induction_P Parameter: Timepoint (hr) Value: 4
  misc_feature: MA Experiment 20001248 PARAMETER Experiment Name: At_Far-red-induction_P Parameter: Tissue Value: Whole Plant
  misc_feature: MA Experiment ID: 20001450 Result: Up-regulated in Transcription
  misc_feature: MA Experiment 20001450 PARAMETER Experiment Name: At_Far-red-induction_P Parameter: Age (day) Value: 7
  misc_feature: MA Experiment 20001450 PARAMETER Experiment Name: At_Far-red-induction_P Parameter: Light Value: Far-red vs. White
  misc_feature: MA Experiment 20001450 PARAMETER Experiment Name: At_Far-red-induction_P Parameter: Organism Value: A. thaliana
  misc_feature: MA Experiment 20001450 PARAMETER Experiment Name: At_Far-red-induction_P Parameter: Plant Line Value: Columbia
  misc_feature: MA Experiment 20001450 PARAMETER Experiment Name: At_Far-red-induction_P Parameter: Timepoint (hr) Value: 8
  misc_feature: MA Experiment 20001450 PARAMETER Experiment Name: At_Far-red-induction_P Parameter: Tissue Value: Whole Plant
  misc_feature: MA Experiment ID: 20001451 Result: Up-regulated in Transcription
  misc_feature: MA Experiment 20001451 PARAMETER Experiment Name: At_Far-red-induction_P Parameter: Age (day) Value: 7
  misc_feature: MA Experiment 20001451 PARAMETER Experiment Name: At_Far-red-induction_P Parameter: Light Value: Far-red vs. White
  misc_feature: MA Experiment 20001451 PARAMETER Experiment Name: At_Far-red-induction_P Parameter: Organism Value: A. thaliana
  misc_feature: MA Experiment 20001451 PARAMETER Experiment Name: At_Far-red-induction_P Parameter: Plant Line Value: Columbia
  misc_feature: MA Experiment 20001451 PARAMETER Experiment Name: At_Far-red-induction_P Parameter: Timepoint (hr) Value: 24
  misc_feature: MA Experiment 20001451 PARAMETER Experiment Name: At_Far-red-induction_P Parameter: Tissue Value: Whole Plant
  misc_feature: MA Experiment ID: 20001555 Result: Down-regulated in Transcription
  misc_feature: MA Experiment 20001555 PARAMETER Experiment Name: At_Drought_Soil_Dry_P Parameter: Age (day) Value: 24
  misc_feature: MA Experiment 20001555 PARAMETER Experiment Name: At_Drought_Soil_Dry_P Parameter: Organism Value: A. thaliana
  misc_feature: MA Experiment 20001555 PARAMETER Experiment Name: At_Drought_Soil_Dry_P Parameter: Plant Line Value: WS
  misc_feature: MA Experiment 20001555 PARAMETER Experiment Name: At_Drought_Soil_Dry_P Parameter: Post Timepoint (hr) Value: None
  misc_feature: MA Experiment 20001555 PARAMETER Experiment Name: At_Drought_Soil_Dry_P Parameter: Post-Treatment Value: None
  misc_feature: MA Experiment 20001555 PARAMETER Experiment Name: At_Drought_Soil_Dry_P Parameter: Timepoint (day) Value: 10
  misc_feature: MA Experiment 20001555 PARAMETER Experiment Name: At_Drought_Soil_Dry_P Parameter: Treatment Value: Drought vs. No Drought
  misc_feature: MA Experiment ID: 20001556 Result: Down-regulated in Transcription
  misc_feature: MA Experiment 20001556 PARAMETER Experiment Name: At_Drought_Soil_Dry_P Parameter: Age (day) Value: 26
  misc_feature: MA Experiment 20001556 PARAMETER Experiment Name: At_Drought_Soil_Dry_P Parameter: Organism Value: A. thaliana
  misc_feature: MA Experiment 20001556 PARAMETER Experiment Name: At_Drought_Soil_Dry_P Parameter: Plant Line Value: WS
  misc_feature: MA Experiment 20001556 PARAMETER Experiment Name: At_Drought_Soil_Dry_P Parameter: Post Timepoint (hr) Value: None
  misc_feature: MA Experiment 20001556 PARAMETER Experiment Name: At_Drought_Soil_Dry_P Parameter: Post-Treatment Value: None
  misc_feature: MA Experiment 20001556 PARAMETER Experiment Name: At_Drought_Soil_Dry_P Parameter: Timepoint (day) Value: 12
  misc_feature: MA Experiment 20001556 PARAMETER Experiment Name: At_Drought_Soil_Dry_P Parameter: Treatment Value: Drought vs. No Drought
  misc_feature: MA Experiment ID: 20001757 Result: Down-regulated in Transcription
  misc_feature: MA Experiment 20001757 PARAMETER Experiment Name: At_50mM_NH4NO3_L-to-H_P Parameter: Timepoint (hr) Value: 6
  misc_feature: MA Experiment 20001757 PARAMETER Experiment Name: At_50mM_NH4NO3_L-to-H_P Parameter: Tissue Value: Leaf
  misc_feature: MA Experiment 20001757 PARAMETER Experiment Name: At_50mM_NH4NO3_L-to-H_P Parameter: Treatment Value: 50mM NH4NO3 vs 100mM Mannitol
  misc_feature: MA Experiment ID: 20001774 Result: Down-regulated in Transcription
  misc_feature: MA Experiment 20001774 PARAMETER Experiment Name: At_Far-red-enriched-adult_P Parameter: Age (day) Value: 31
  misc_feature: MA Experiment 20001774 PARAMETER Experiment Name: At_Far-red-enriched-adult_P Parameter: Light Value: Far-red enriched vs. White
  misc_feature: MA Experiment 20001774 PARAMETER Experiment Name: At_Far-red-enriched-adult_P Parameter: Organism Value: A. thaliana
  misc_feature: MA Experiment 20001774 PARAMETER Experiment Name: At_Far-red-enriched-adult_P Parameter: Plant Line Value: Columbia
  misc_feature: MA Experiment 20001774 PARAMETER Experiment Name: At_Far-red-enriched-adult_P Parameter: Timepoint (hr) Value: 72
  misc_feature: MA Experiment 20001774 PARAMETER Experiment Name: At_Far-red-enriched-adult_P Parameter: Tissue Value: Aerial
  misc_feature: MA Experiment ID: 20001904 Result: Down-regulated in Transcription
  misc_feature: MA Experiment 20001904 PARAMETER Experiment Name: At_Drought_Reproduction_P Parameter: Age (day) Value: 37
  misc_feature: MA Experiment 20001904 PARAMETER Experiment Name: At_Drought_Reproduction_P Parameter: Organism Value: A. thaliana
  misc_feature: MA Experiment 20001904 PARAMETER Experiment Name: At_Drought_Reproduction_P Parameter: Plant Line Value: WS
  misc_feature: MA Experiment 20001904 PARAMETER Experiment Name: At_Drought_Reproduction_P Parameter: Timepoint (day) Value: 7
  misc_feature: MA Experiment 20001904 PARAMETER Experiment Name: At_Drought_Reproduction_P Parameter: Tissue Value: Rosettes
  misc_feature: MA Experiment 20001904 PARAMETER Experiment Name: At_Drought_Reproduction_P Parameter: Treatment Value: Drought vs. No Drought
  misc_feature: MA Experiment ID: 20001906 Result: Down-regulated in Transcription
  misc_feature: MA Experiment 20001906 PARAMETER Experiment Name: At_Drought_Reproduction_P Parameter: Age (day) Value: 35
  misc_feature: MA Experiment 20001906 PARAMETER Experiment Name: At_Drought_Reproduction_P Parameter: Organism Value: A. thaliana
  misc_feature: MA Experiment 20001906 PARAMETER Experiment Name: At_Drought_Reproduction_P Parameter: Plant Line Value: WS
  misc_feature: MA Experiment 20001906 PARAMETER Experiment Name: At_Drought_Reproduction_P Parameter: Timepoint (day) Value: 5
  misc_feature: MA Experiment 20001906 PARAMETER Experiment Name: At_Drought_Reproduction_P Parameter: Tissue Value: Siliques
  misc_feature: MA Experiment 20001906 PARAMETER Experiment Name: At_Drought_Reproduction_P Parameter: Treatment Value: Drought vs. No Drought
aaccaaaaagcttttcttcccaacacacacaaaaaaaaaactgtaacgaccaaaaaaaaagaggacgcgttagaagaaaaaaaagaacaatccgataaaaagatccggcgatgtcaaacccgacccgtaagaatatggagaggattaaaggtccatggagtccagaagaagatgatctgttgcagaggcttgttcagaaacatggtccgaggaactggtctttgattagcaaatcaatccctggacgttccggcaaatcttgtcgtctccggtggtgtaaccagctatctccggaggtagagcaccgtgctttttcgcaggaagaagacgagacgattattcgagctcacgctcggtttggtaacaagtgggctacgatctctcgtcttctcaatggacgaaccgataacgctatcaagaatcattggaactcgacgctgaagcgaaaatgcagcgtcgaagggcaaagttgtgattttggtggtaatggagggtatgatggtaatttaggagaagagcaaccgttgaaacgtacggcgagtggtggtggtggtgtctcgactggcttgtatatgagtcccggaagtccatcgggatctgacgtcagcgagcaatctagtggtggtgcacacgtgtttaaaccaacggttagatctgaggttacagcgtcatcgtctggtgaagatcctccaacttatcttagtttgtctcttccttggactgacgagacggttcgagtcaacgagccggttcaacttaaccagaatacggttatggacggtggttatacggcggagctgtttccggttagaaaggaagagcaagtggaagtagaagaagaagaagcgaaagggatatctggtggattcggtggtgagttcatgacggtggttcaggagatgataaggacggaggtgaggagttacatggcggatttacagcgaggaaacgtcggtggtagtagttctggcggcggaggtggcggttcgtgtatgccacaaagtgtaaacagccgtcgtgttgggtttagagagtttatagtgaaccaaatcggaattgggaagatggagtagagtgataagaacaagttttccctctgtttctcgggaaaataaaagtttc

SEQ ID NO: 24922 - protein, 320 aa, Arabidopsis thaliana
  peptide (1)..(320): Ceres Seq. ID no. 12327372
  misc_feature (13)..(59): Pfam Name: Myb-like DNA-binding domain Pfam Description: Myb-like DNA-binding domain
  misc_feature (10)..(292): Homolog of NCBI NO: 2129647 NR Description: myb-related protein, 33.2K - Arabidopsis thaliana
  misc_feature (10)..(292): Homolog of NCBI NO: 2832406 NR Description: R2R3-MYB transcription factor [Arabidopsis
  misc_feature (10)..(298): Homolog of NCBI NO: 2129648 NR Description: myb-related protein, 33.3K - Arabidopsis thaliana
  misc_feature (10)..(298): Homolog of NCBI NO: 21592897 NR Description: myb-related protein, 33.3K [Arabidopsis thaliana]
  misc_feature (10)..(298): Homolog of NCBI NO: 15450393 NR Description: AT5g67300/K8K14_2 [Arabidopsis thaliana]
  misc_feature (10)..(298): Homolog of NCBI NO: 15240708 NR Description: myb family transcription factor
  misc_feature (1)..(320): Homolog of NCBI NO: 15227806 NR Description: MYB family transcription factor
  misc_feature (1)..(320): Homolog of NCBI NO: 21593586 NR Description: putative MYB family transcription factor
  misc_feature (53)..(320): Homolog of NCBI NO: 11358558 NR Description: myb-related transcription factor MYB73
  misc_feature (1)..(320): Homolog of NCBI NO: 15235484 NR Description: myb DNA-binding protein (AtMYB73)
MSNPTRKNMERIKGPWSPEEDDLLQRLVQKHGPRNWSLISKSIPGRSGKSCRLRWCNQLSPEVEHRAFSQEEDETIIRAHARFGNKWATISRLLNGRTDNAIKNHWNSTLKRKCSVEGQSCDFGGNGGYDGNLGEEQPLKRTASGGGGVSTGLYMSPGSPSGSDVSEQSSGGAHVFKPTVRSEVTASSSGEDPPTYLSLSLPWTDETVRVNEPVQLNQNTVMDGGYTAELFPVRKEEQVEVEEEEAKGISGGFGGEFMTVVQEMIRTEVRSYMADLQRGNVGGSSSGGGGGGSCMPQSVNSRRVGFREFIVNQIGIGKME

SEQ ID NO: 24923 - protein, 312 aa, Arabidopsis thaliana
  peptide (1)..(312): Ceres Seq. ID no. 12327373
  misc_feature (5)..(51): Pfam Name: Myb-like DNA-binding domain Pfam Description: Myb-like DNA-binding domain
  misc_feature (2)..(284): Homolog of NCBI NO: 2129647 NR Description: myb-related protein, 33.2K - Arabidopsis thaliana
  misc_feature (2)..(284): Homolog of NCBI NO: 2832406 NR Description: R2R3-MYB transcription factor [Arabidopsis
  misc_feature (2)..(290): Homolog of NCBI NO: 2129648 NR Description: myb-related protein, 33.3K - Arabidopsis thaliana
  misc_feature (2)..(290): Homolog of NCBI NO: 21592897 NR Description: myb-related protein, 33.3K [Arabidopsis thaliana]
  misc_feature (2)..(290): Homolog of NCBI NO: 15450393 NR Description: AT5g67300/K8K14_2 [Arabidopsis thaliana]
  misc_feature (2)..(290): Homolog of NCBI NO: 15240708 NR Description: myb family transcription factor
  misc_feature (1)..(312): Homolog of NCBI NO: 15227806 NR Description: MYB family transcription factor
  misc_feature (1)..(312): Homolog of NCBI NO: 21593586 NR Description: putative MYB family transcription factor
  misc_feature (45)..(312): Homolog of NCBI NO: 11358558 NR Description: myb-related transcription factor MYB73
  misc_feature (1)..(312): Homolog of NCBI NO: 15235484 NR Description: myb DNA-binding protein (AtMYB73)
MERIKGPWSPEEDDLLQRLVQKHGPRNWSLISKSIPGRSGKSCRLRWCNQLSPEVEHRAFSQEEDETIIRAHARFGNKWATISRLLNGRTDNAIKNHWNSTLKRKCSVEGQSCDFGGNGGYDGNLGEEQPLKRTASGGGGVSTGLYMSPGSPSGSDVSEQSSGGAHVFKPTVRSEVTASSSGEDPPTYLSLSLPWTDETVRVNEPVQLNQNTVMDGGYTAELFPVRKEEQVEVEEEEAKGISGGFGGEFMTVVQEMIRTEVRSYMADLQRGNVGGSSSGGGGGGSCMPQSVNSRRVGFREFIVNQIGIGKME

SEQ ID NO: 24924 - protein, 166 aa, Arabidopsis thaliana
  peptide (1)..(166): Ceres Seq. ID no. 12327374
  misc_feature (1)..(138): Homolog of NCBI NO: 2129647 NR Description: myb-related protein, 33.2K - Arabidopsis thaliana
  misc_feature (1)..(138): Homolog of NCBI NO: 2832406 NR Description: R2R3-MYB transcription factor [Arabidopsis
  misc_feature (1)..(144): Homolog of NCBI NO: 2129648 NR Description: myb-related protein, 33.3K - Arabidopsis thaliana
  misc_feature (1)..(144): Homolog of NCBI NO: 21592897 NR Description: myb-related protein, 33.3K [Arabidopsis thaliana]
  misc_feature (1)..(144): Homolog of NCBI NO: 15450393 NR Description: AT5g67300/K8K14_2 [Arabidopsis thaliana]
  misc_feature (1)..(144): Homolog of NCBI NO: 15240708 NR Description: myb family transcription factor
  misc_feature (1)..(166): Homolog of NCBI NO: 15227806 NR Description: MYB family transcription factor
  misc_feature (1)..(166): Homolog of NCBI NO: 21593586 NR Description: putative MYB family transcription factor
  misc_feature (1)..(166): Homolog of NCBI NO: 11358558 NR Description: myb-related transcription factor MYB73
  misc_feature (1)..(166): Homolog of NCBI NO: 15235484 NR Description: myb DNA-binding protein (AtMYB73)
MSPGSPSGSDVSEQSSGGAHVFKPTVRSEVTASSSGEDPPTYLSLSLPWTDETVRVNEPVQLNQNTVMDGGYTAELFPVRKEEQVEVEEEEAKGISGGFGGEFMTVVQEMIRTEVRSYMADLQRGNVGGSSSGGGGGGSCMPQSVNSRRVGFREFIVNQIGIGKME

SEQ ID NO: 24925 - DNA, 1045 bp, Arabidopsis thaliana
  misc_feature (1)..(1045): Ceres Seq. ID no. 12397017
  misc_feature: MA Experiment ID: 20000169 Result: Up-regulated in Transcription
  misc_feature: MA Experiment 20000169 PARAMETER Experiment Name: At_100uM_ABA_P Parameter: Age (day) Value: 14
  misc_feature: MA Experiment 20000169 PARAMETER Experiment Name: At_100uM_ABA_P Parameter: Organism Value: A. thaliana
  misc_feature: MA Experiment 20000169 PARAMETER Experiment Name: At_100uM_ABA_P Parameter: Plant Line Value: WS
  misc_feature: MA Experiment 20000169 PARAMETER Experiment Name: At_100uM_ABA_P Parameter: Timepoint (hr) Value: 6
  misc_feature: MA Experiment 20000169 PARAMETER Experiment Name: At_100uM_ABA_P Parameter: Tissue Value: Aerial
  misc_feature: MA Experiment 20000169 PARAMETER Experiment Name: At_100uM_ABA_P Parameter: Treatment Value: 100uM ABA vs. No Treatment
  misc_feature: MA Experiment ID: 20000179 Result: Up-regulated in Transcription
  misc_feature: MA Experiment 20000179 PARAMETER Experiment Name: At_Germinating_Seeds_P Parameter: Age (hr) Value: 6 vs. 0
  misc_feature: MA Experiment 20000179 PARAMETER Experiment Name: At_Germinating_Seeds_P Parameter: Tissue Value: Germinating Seeds
  misc_feature: MA Experiment ID: 20000180 Result: Up-regulated in Transcription
  misc_feature: MA Experiment 20000180 PARAMETER Experiment Name: At_Germinating_Seeds_P Parameter: Age (hr) Value: 24 vs. 0
  misc_feature: MA Experiment 20000180 PARAMETER Experiment Name: At_Germinating_Seeds_P Parameter: Tissue Value: Germinating Seeds
  misc_feature: MA Experiment ID: 20000184 Result: Down-regulated in Transcription
  misc_feature: MA Experiment 20000184 PARAMETER Experiment Name: At_Shoots__P Parameter: Age (day) Value: 7
  misc_feature: MA Experiment 20000184 PARAMETER Experiment Name: At_Shoots__P Parameter: Tissue Value: Shoots vs. Whole Plant
  misc_feature: MA Experiment ID: 20000185 Result: Down-regulated in Transcription
  misc_feature: MA Experiment 20000185 PARAMETER Experiment Name: At_Roots__P Parameter: Age (day) Value: 7 vs. 21
  misc_feature: MA Experiment 20000185 PARAMETER Experiment Name: At_Roots__P Parameter: Organism Value: A. thaliana
  misc_feature: MA Experiment 20000185 PARAMETER Experiment Name: At_Roots__P Parameter: Tissue Value: Roots vs. Whole Plant
  misc_feature: MA Experiment ID: 20000234 Result: Down-regulated in Transcription
  misc_feature: MA Experiment 20000234 PARAMETER Experiment Name: At_Siliques_P Parameter: Age (day) Value: 21
  misc_feature: MA Experiment 20000234 PARAMETER Experiment Name: At_Siliques_P Parameter: Organism Value: A. thaliana
  misc_feature: MA Experiment 20000234 PARAMETER Experiment Name: At_Siliques_P Parameter: Plant Line Value: WS
  misc_feature: MA Experiment 20000234 PARAMETER Experiment Name: At_Siliques_P Parameter: Tissue Value: Less Than 5mm Siliques vs. Whole Plant
  misc_feature: MA Experiment ID: 20000235 Result: Down-regulated in Transcription
  misc_feature: MA Experiment 20000235 PARAMETER Experiment Name: At_Siliques_P Parameter: Age (day) Value: 21
  misc_feature: MA Experiment 20000235 PARAMETER Experiment Name: At_Siliques_P Parameter: Organism Value: A. thaliana
  misc_feature: MA Experiment 20000235 PARAMETER Experiment Name: At_Siliques_P Parameter: Plant Line Value: WS
  misc_feature: MA Experiment 20000235 PARAMETER Experiment Name: At_Siliques_P Parameter: Tissue Value: 5-10mm Siliques vs. Whole Plant
  misc_feature: MA Experiment ID: 20000264 Result: Up-regulated in Transcription
  misc_feature: MA Experiment 20000264 PARAMETER Experiment Name: At_Open_Flower_P Parameter: Age (day) Value: 21
  misc_feature: MA Experiment 20000264 PARAMETER Experiment Name: At_Open_Flower_P Parameter: Plant Line Value: WS
  misc_feature: MA Experiment 20000264 PARAMETER Experiment Name: At_Open_Flower_P Parameter: Tissue Value: Open Flower vs. Whole Plant
  misc_feature: MA Experiment ID: 20000265 Result: Down-regulated in Transcription
  misc_feature: MA Experiment 20000265 PARAMETER Experiment Name: At_Open_Flower_P Parameter: Age (day) Value: 21
  misc_feature: MA Experiment 20000265 PARAMETER Experiment Name: At_Open_Flower_P Parameter: Plant Line Value: WS
  misc_feature: MA Experiment 20000265 PARAMETER Experiment Name: At_Open_Flower_P Parameter: Tissue Value: Closed Flower vs. Whole Plant
  misc_feature: MA Experiment ID: 20000268 Result: Down-regulated in Transcription
  misc_feature: MA Experiment 20000268 PARAMETER Experiment Name: At_100mM_NaCl__P Parameter: Age (day) Value: 14
  misc_feature: MA Experiment 20000268 PARAMETER Experiment Name: At_100mM_NaCl__P Parameter: Organism Value: A. thaliana
  misc_feature: MA Experiment 20000268 PARAMETER Experiment Name: At_100mM_NaCl__P Parameter: Plant Line Value: WS
  misc_feature: MA Experiment 20000268 PARAMETER Experiment Name: At_100mM_NaCl__P Parameter: Timepoint (hr) Value: 6
  misc_feature: MA Experiment 20000268 PARAMETER Experiment Name: At_100mM_NaCl__P Parameter: Tissue Value: Whole Plant
  misc_feature: MA Experiment 20000268 PARAMETER Experiment Name: At_100mM_NaCl__P Parameter: Treatment Value: 100mM NaCl vs. No Treatment
  misc_feature: MA Experiment ID: 20000286 Result: Down-regulated in Transcription
  misc_feature: MA Experiment 20000286 PARAMETER Experiment Name: At_Open_Flower_P Parameter: Age (day) Value: 21
  misc_feature: MA Experiment 20000286 PARAMETER Experiment Name: At_Open_Flower_P Parameter: Plant Line Value: WS
  misc_feature: MA Experiment 20000286 PARAMETER Experiment Name: At_Open_Flower_P Parameter: Tissue Value: Half Open vs. Whole Plant
  misc_feature: MA Experiment ID: 20000436 Result: Down-regulated in Transcription
  misc_feature: MA Experiment 20000436 PARAMETER Experiment Name: At_Drought_P Parameter: Age (day) Value: 7
  misc_feature: MA Experiment 20000436 PARAMETER Experiment Name: At_Drought_P Parameter: Organism Value: A. thaliana
  misc_feature: MA Experiment 20000436 PARAMETER Experiment Name: At_Drought_P Parameter: Plant Line Value: WS
  misc_feature: MA Experiment 20000436 PARAMETER Experiment Name: At_Drought_P Parameter: Timepoint (hr) Value: 12
  misc_feature: MA Experiment 20000436 PARAMETER Experiment Name: At_Drought_P Parameter: Tissue Value: Whole Plant
  misc_feature: MA Experiment 20000436 PARAMETER Experiment Name: At_Drought_P Parameter: Treatment Value: Drought vs. No Drought
  misc_feature: MA Experiment ID: 20000437 Result: Down-regulated in Transcription
  misc_feature: MA Experiment 20000437 PARAMETER Experiment Name: At_Drought_P Parameter: Age (day) Value: 8
  misc_feature: MA Experiment 20000437 PARAMETER Experiment Name: At_Drought_P Parameter: Organism Value: A. thaliana
  misc_feature: MA Experiment 20000437 PARAMETER Experiment Name: At_Drought_P Parameter: Plant Line Value: WS
  misc_feature: MA Experiment 20000437 PARAMETER Experiment Name: At_Drought_P Parameter: Timepoint (hr) Value: 24
  misc_feature: MA Experiment 20000437 PARAMETER Experiment Name: At_Drought_P Parameter: Tissue Value: Whole Plant
  misc_feature: MA Experiment 20000437 PARAMETER Experiment Name: At_Drought_P Parameter: Treatment Value: Drought vs. No Drought
  misc_feature: MA Experiment ID: 20000438 Result: Down-regulated in Transcription
  misc_feature: MA Experiment 20000438 PARAMETER Experiment Name: At_Shoots__P Parameter: Age (day) Value: 14
  misc_feature: MA Experiment 20000438 PARAMETER Experiment Name: At_Shoots__P Parameter: Tissue Value: Shoots vs. Whole Plant
  misc_feature: MA Experiment ID: 20000441 Result: Up-regulated in Transcription
  misc_feature: MA Experiment 20000441 PARAMETER Experiment Name: At_1uM_BR-BRZ__P Parameter: Tissue Value: Shoot Apices
  misc_feature: MA Experiment 20000441 PARAMETER Experiment Name: At_1uM_BR-BRZ__P Parameter: Treatment Value: 1uM BR vs. No Treatment
  misc_feature: MA Experiment ID: 20000443 Result: Up-regulated in Transcription
  misc_feature: MA Experiment 20000443 PARAMETER Experiment Name: At_1uM_BR-BRZ__P Parameter: Tissue Value: Shoot Apices
  misc_feature: MA Experiment 20000443 PARAMETER Experiment Name: At_1uM_BR-BRZ__P Parameter: Treatment Value: 1uM BRZ vs. No Treatment
  misc_feature: MA Experiment ID: 20000453 Result: Up-regulated in Transcription
  misc_feature: MA Experiment 20000453 PARAMETER Experiment Name: At_100uM_ABA_P Parameter: Age (day) Value: 15
  misc_feature: MA Experiment 20000453 PARAMETER Experiment Name: At_100uM_ABA_P Parameter: Organism Value: A. thaliana
  misc_feature: MA Experiment 20000453 PARAMETER Experiment Name: At_100uM_ABA_P Parameter: Plant Line Value: WS
  misc_feature: MA Experiment 20000453 PARAMETER Experiment Name: At_100uM_ABA_P Parameter: Timepoint (hr) Value: 24
  misc_feature: MA Experiment 20000453 PARAMETER Experiment Name: At_100uM_ABA_P Parameter: Tissue Value: Aerial
  misc_feature: MA Experiment 20000453 PARAMETER Experiment Name: At_100uM_ABA_P Parameter: Treatment Value: 100uM ABA vs. No Treatment
  misc_feature: MA Experiment ID: 20000495 Result: Down-regulated in Transcription
  misc_feature: MA Experiment 20000495 PARAMETER Experiment Name: At_Guard_Cells_P Parameter: Harvest Date Value: 8/2/2002
  misc_feature: MA Experiment 20000495 PARAMETER Experiment Name: At_Guard_Cells_P Parameter: Organism Value: A. thaliana
  misc_feature: MA Experiment 20000495 PARAMETER Experiment Name: At_Guard_Cells_P Parameter: Tissue Value: Guard Cells vs. Leaves
  misc_feature: MA Experiment ID: 20000573 Result: Up-regulated in Transcription
  misc_feature: MA Experiment 20000573 PARAMETER Experiment Name: At_100uM_ABA_Mutants__P Parameter: Organism Value: A. thaliana
  misc_feature: MA Experiment 20000573 PARAMETER Experiment Name: At_100uM_ABA_Mutants__P Parameter: Plant Line Value: CS22 vs. Ler wt
  misc_feature: MA Experiment 20000573 PARAMETER Experiment Name: At_100uM_ABA_Mutants__P Parameter: Timepoint (hr) Value: N/A
  misc_feature: MA Experiment 20000573 PARAMETER Experiment Name: At_100uM_ABA_Mutants__P Parameter: Tissue Value: Whole Plant
  misc_feature: MA Experiment 20000573 PARAMETER Experiment Name: At_100uM_ABA_Mutants__P Parameter: Treatment Value: None
  misc_feature: MA Experiment ID: 20000574 Result: Up-regulated in Transcription
  misc_feature: MA Experiment 20000574 PARAMETER Experiment Name: At_100uM_ABA_Mutants__P Parameter: Organism Value: A. thaliana
  misc_feature: MA Experiment 20000574 PARAMETER Experiment Name: At_100uM_ABA_Mutants__P Parameter: Plant Line Value: CS23 vs. Ler wt
  misc_feature: MA Experiment 20000574 PARAMETER Experiment Name: At_100uM_ABA_Mutants__P Parameter: Timepoint (hr) Value: N/A
  misc_feature: MA Experiment 20000574 PARAMETER Experiment Name: At_100uM_ABA_Mutants__P Parameter: Tissue Value: Whole Plant
  misc_feature: MA Experiment 20000574 PARAMETER Experiment Name: At_100uM_ABA_Mutants__P Parameter: Treatment Value: None
  misc_feature: MA Experiment ID: 20000794 Result: Up-regulated in Transcription
  misc_feature: MA Experiment 20000794 PARAMETER Experiment Name: At_Petals_P Parameter: Age (day) Value: 23-25 days
  misc_feature: MA Experiment 20000794 PARAMETER Experiment Name: At_Petals_P Parameter: Plant Line Value: WS
  misc_feature: MA Experiment 20000794 PARAMETER Experiment Name: At_Petals_P Parameter: Tissue Value: Petals vs. Whole plant
  misc_feature: MA Experiment ID: 20001248 Result: Up-regulated in Transcription
  misc_feature: MA Experiment 20001248 PARAMETER Experiment Name: At_Far-red-induction_P Parameter: Age (day) Value: 7
  misc_feature: MA Experiment 20001248 PARAMETER Experiment Name: At_Far-red-induction_P Parameter: Light Value: Far-red vs. White
  misc_feature: MA Experiment 20001248 PARAMETER Experiment Name: At_Far-red-induction_P Parameter: Organism Value: A. thaliana
  misc_feature: MA Experiment 20001248 PARAMETER Experiment Name: At_Far-red-induction_P Parameter: Plant Line Value: Columbia
  misc_feature: MA Experiment 20001248 PARAMETER Experiment Name: At_Far-red-induction_P Parameter: Timepoint (hr) Value: 4
  misc_feature: MA Experiment 20001248 PARAMETER Experiment Name: At_Far-red-induction_P Parameter: Tissue Value: Whole Plant
  misc_feature: MA Experiment ID: 20001450 Result: Up-regulated in Transcription
  misc_feature: MA Experiment 20001450 PARAMETER Experiment Name: At_Far-red-induction_P Parameter: Age (day) Value: 7
  misc_feature: MA Experiment 20001450 PARAMETER Experiment Name: At_Far-red-induction_P Parameter: Light Value: Far-red vs. White
  misc_feature: MA Experiment 20001450 PARAMETER Experiment Name: At_Far-red-induction_P Parameter: Organism Value: A. thaliana
  misc_feature: MA Experiment 20001450 PARAMETER Experiment Name: At_Far-red-induction_P Parameter: Plant Line Value: Columbia
  misc_feature: MA Experiment 20001450 PARAMETER Experiment Name: At_Far-red-induction_P Parameter: Timepoint (hr) Value: 8
  misc_feature: MA Experiment 20001450 PARAMETER Experiment Name: At_Far-red-induction_P Parameter: Tissue Value: Whole Plant
  misc_feature: MA Experiment ID: 20001451 Result: Up-regulated in Transcription
  misc_feature: MA Experiment 20001451 PARAMETER Experiment Name: At_Far-red-induction_P Parameter: Age (day) Value: 7
  misc_feature: MA Experiment 20001451 PARAMETER Experiment Name: At_Far-red-induction_P Parameter: Light Value: Far-red vs. White
  misc_feature: MA Experiment 20001451 PARAMETER Experiment Name: At_Far-red-induction_P Parameter: Organism Value: A. thaliana
  misc_feature: MA Experiment 20001451 PARAMETER Experiment Name: At_Far-red-induction_P Parameter: Plant Line Value: Columbia
  misc_feature: MA Experiment 20001451 PARAMETER Experiment Name: At_Far-red-induction_P Parameter: Timepoint (hr) Value: 24
  misc_feature: MA Experiment 20001451 PARAMETER Experiment Name: At_Far-red-induction_P Parameter: Tissue Value: Whole Plant
  misc_feature: MA Experiment ID: 20001554 Result: Down-regulated in Transcription
  misc_feature: MA Experiment 20001554 PARAMETER Experiment Name: At_Drought_Soil_Dry_P Parameter: Age (day) Value: 21
  misc_feature: MA Experiment 20001554 PARAMETER Experiment Name: At_Drought_Soil_Dry_P Parameter: Organism Value: A. thaliana
  misc_feature: MA Experiment 20001554 PARAMETER Experiment Name: At_Drought_Soil_Dry_P Parameter: Plant Line Value: WS
  misc_feature: MA Experiment 20001554 PARAMETER Experiment Name: At_Drought_Soil_Dry_P Parameter: Post Timepoint (hr) Value: None
  misc_feature: MA Experiment 20001554 PARAMETER Experiment Name: At_Drought_Soil_Dry_P Parameter: Post-Treatment Value: None
  misc_feature: MA Experiment 20001554 PARAMETER Experiment Name: At_Drought_Soil_Dry_P Parameter: Timepoint (day) Value: 7
  misc_feature: MA Experiment 20001554 PARAMETER Experiment Name: At_Drought_Soil_Dry_P Parameter: Treatment Value: Drought vs. No Drought
  misc_feature: MA Experiment ID: 20001555 Result: Down-regulated in Transcription
  misc_feature: MA Experiment 20001555 PARAMETER Experiment Name: At_Drought_Soil_Dry_P Parameter: Age (day) Value: 24
  misc_feature: MA Experiment 20001555 PARAMETER Experiment Name: At_Drought_Soil_Dry_P Parameter: Organism Value: A. thaliana
  misc_feature: MA Experiment 20001555 PARAMETER Experiment Name: At_Drought_Soil_Dry_P Parameter: Plant Line Value: WS
  misc_feature: MA Experiment 20001555 PARAMETER Experiment Name: At_Drought_Soil_Dry_P Parameter: Post Timepoint (hr) Value: None
  misc_feature: MA Experiment 20001555 PARAMETER Experiment Name: At_Drought_Soil_Dry_P Parameter: Post-Treatment Value: None
  misc_feature: MA Experiment 20001555 PARAMETER Experiment Name: At_Drought_Soil_Dry_P Parameter: Timepoint (day) Value: 10
  misc_feature: MA Experiment 20001555 PARAMETER Experiment Name: At_Drought_Soil_Dry_P Parameter: Treatment Value: Drought vs. No Drought
  misc_feature: MA Experiment ID: 20001556 Result: Down-regulated in Transcription
  misc_feature: MA Experiment 20001556 PARAMETER Experiment Name: At_Drought_Soil_Dry_P Parameter: Age (day) Value: 26
  misc_feature: MA Experiment 20001556 PARAMETER Experiment Name: At_Drought_Soil_Dry_P Parameter: Organism Value: A. thaliana
  misc_feature: MA Experiment 20001556 PARAMETER Experiment Name: At_Drought_Soil_Dry_P Parameter: Plant Line Value: WS
  misc_feature: MA Experiment 20001556 PARAMETER Experiment Name: At_Drought_Soil_Dry_P Parameter: Post Timepoint (hr) Value: None
  misc_feature: MA Experiment 20001556 PARAMETER Experiment Name: At_Drought_Soil_Dry_P Parameter: Post-Treatment Value: None
  misc_feature: MA Experiment 20001556 PARAMETER Experiment Name: At_Drought_Soil_Dry_P Parameter: Timepoint (day) Value: 12
  misc_feature: MA Experiment 20001556 PARAMETER Experiment Name: At_Drought_Soil_Dry_P Parameter: Treatment Value: Drought vs. No Drought
  misc_feature: MA Experiment ID: 20001557 Result: Down-regulated in Transcription
  misc_feature: MA Experiment 20001557 PARAMETER Experiment Name: At_Drought_Soil_Dry_P Parameter: Age (day) Value: 27
  misc_feature: MA Experiment 20001557 PARAMETER Experiment Name: At_Drought_Soil_Dry_P Parameter: Organism Value: A. thaliana
  misc_feature: MA Experiment 20001557 PARAMETER Experiment Name: At_Drought_Soil_Dry_P Parameter: Plant Line Value: WS
  misc_feature: MA Experiment 20001557 PARAMETER Experiment Name: At_Drought_Soil_Dry_P Parameter: Post Timepoint (hr) Value: 3
  misc_feature: MA Experiment 20001557 PARAMETER Experiment Name: At_Drought_Soil_Dry_P Parameter: Post-Treatment Value: Re-Water vs. No Drought
  misc_feature: MA Experiment 20001557 PARAMETER Experiment Name: At_Drought_Soil_Dry_P Parameter: Timepoint (day) Value: 13
  misc_feature: MA Experiment 20001557 PARAMETER Experiment Name: At_Drought_Soil_Dry_P Parameter: Treatment Value: Drought vs. No Drought
  misc_feature: MA Experiment ID: 20001559 Result: Down-regulated in Transcription
  misc_feature: MA Experiment 20001559 PARAMETER Experiment Name: At_Drought_Soil_Dry_P Parameter: Age (day) Value: 28
  misc_feature: MA Experiment 20001559 PARAMETER Experiment Name: At_Drought_Soil_Dry_P Parameter: Organism Value: A. thaliana
  misc_feature: MA Experiment 20001559 PARAMETER Experiment Name: At_Drought_Soil_Dry_P Parameter: Plant Line Value: WS
  misc_feature: MA Experiment 20001559 PARAMETER Experiment Name: At_Drought_Soil_Dry_P Parameter: Post Timepoint (hr) Value: 29
  misc_feature: MA Experiment 20001559 PARAMETER Experiment Name: At_Drought_Soil_Dry_P Parameter: Post-Treatment Value: Re-Water vs. No Drought
  misc_feature: MA Experiment 20001559 PARAMETER Experiment Name: At_Drought_Soil_Dry_P Parameter: Timepoint (day) Value: 14
  misc_feature: MA Experiment 20001559 PARAMETER Experiment Name: At_Drought_Soil_Dry_P Parameter: Treatment Value: Drought vs. No Drought
  misc_feature: MA Experiment ID: 20001904 Result: Down-regulated in Transcription
  misc_feature: MA Experiment 20001904 PARAMETER Experiment Name: At_Drought_Reproduction_P Parameter: Age (day) Value: 37
  misc_feature: MA Experiment 20001904 PARAMETER Experiment Name: At_Drought_Reproduction_P Parameter: Organism Value: A. thaliana
  misc_feature: MA Experiment 20001904 PARAMETER Experiment Name: At_Drought_Reproduction_P Parameter: Plant Line Value: WS
  misc_feature: MA Experiment 20001904 PARAMETER Experiment Name: At_Drought_Reproduction_P Parameter: Timepoint (day) Value: 7
  misc_feature: MA Experiment 20001904 PARAMETER Experiment Name: At_Drought_Reproduction_P Parameter: Tissue Value: Rosettes
  misc_feature: MA Experiment 20001904 PARAMETER Experiment Name: At_Drought_Reproduction_P Parameter: Treatment Value: Drought vs. No Drought
  misc_feature: MA Experiment ID: 20001905 Result: Down-regulated in Transcription
  misc_feature: MA Experiment 20001905 PARAMETER Experiment Name: At_Drought_Reproduction_P Parameter: Age (day) Value: 40
  misc_feature: MA Experiment 20001905 PARAMETER Experiment Name: At_Drought_Reproduction_P Parameter: Organism Value: A. thaliana
  misc_feature: MA Experiment 20001905 PARAMETER Experiment Name: At_Drought_Reproduction_P Parameter: Plant Line Value: WS
  misc_feature: MA Experiment 20001905 PARAMETER Experiment Name: At_Drought_Reproduction_P Parameter: Timepoint (day) Value: 10
  misc_feature: MA Experiment 20001905 PARAMETER Experiment Name: At_Drought_Reproduction_P Parameter: Tissue Value: Rosettes
  misc_feature: MA Experiment 20001905 PARAMETER Experiment Name: At_Drought_Reproduction_P Parameter: Treatment Value: Drought vs. No Drought
  misc_feature: MA Experiment ID: 20001906 Result: Down-regulated in Transcription
  misc_feature: MA Experiment 20001906 PARAMETER Experiment Name: At_Drought_Reproduction_P Parameter: Age (day) Value: 35
  misc_feature: MA Experiment 20001906 PARAMETER Experiment Name: At_Drought_Reproduction_P Parameter: Organism Value: A. thaliana
  misc_feature: MA Experiment 20001906 PARAMETER Experiment Name: At_Drought_Reproduction_P Parameter: Plant Line Value: WS
  misc_feature: MA Experiment 20001906 PARAMETER Experiment Name: At_Drought_Reproduction_P Parameter: Timepoint (day) Value: 5
  misc_feature: MA Experiment 20001906 PARAMETER Experiment Name: At_Drought_Reproduction_P Parameter: Tissue Value: Siliques
  misc_feature: MA Experiment 20001906 PARAMETER Experiment Name: At_Drought_Reproduction_P Parameter: Treatment Value: Drought vs. No Drought
  misc_feature: MA Experiment ID: 20001907 Result: Down-regulated in Transcription
  misc_feature: MA Experiment 20001907 PARAMETER Experiment Name: At_Drought_Reproduction_P Parameter: Age (day) Value: 37
  misc_feature: MA Experiment 20001907 PARAMETER Experiment Name: At_Drought_Reproduction_P Parameter: Organism Value: A. thaliana
  misc_feature: MA Experiment 20001907 PARAMETER Experiment Name: At_Drought_Reproduction_P Parameter: Plant Line Value: WS
  misc_feature: MA Experiment 20001907 PARAMETER Experiment Name: At_Drought_Reproduction_P Parameter: Timepoint (day) Value: 7
  misc_feature: MA Experiment 20001907 PARAMETER Experiment Name: At_Drought_Reproduction_P Parameter: Tissue Value: Siliques
  misc_feature: MA Experiment 20001907 PARAMETER Experiment Name: At_Drought_Reproduction_P Parameter: Treatment Value: Drought vs. No Drought
  misc_feature: MA Experiment ID: 20001908 Result: Down-regulated in Transcription
  misc_feature: MA Experiment 20001908 PARAMETER Experiment Name: At_Drought_Reproduction_P Parameter: Age (day) Value: 40
  misc_feature: MA Experiment 20001908 PARAMETER Experiment Name: At_Drought_Reproduction_P Parameter: Organism Value: A. thaliana
  misc_feature: MA Experiment 20001908 PARAMETER Experiment Name: At_Drought_Reproduction_P Parameter: Plant Line Value: WS
  misc_feature: MA Experiment 20001908 PARAMETER Experiment Name: At_Drought_Reproduction_P Parameter: Timepoint (day) Value: 10
  misc_feature: MA Experiment 20001908 PARAMETER Experiment Name: At_Drought_Reproduction_P Parameter: Tissue Value: Siliques
  misc_feature: MA Experiment 20001908 PARAMETER Experiment Name: At_Drought_Reproduction_P Parameter: Treatment Value: Drought vs. No Drought
  misc_feature: MA Experiment ID: 20001910 Result: Down-regulated in Transcription
  misc_feature: MA Experiment 20001910 PARAMETER Experiment Name: At_Drought_Reproduction_P Parameter: Age (day) Value: 37
  misc_feature: MA Experiment 20001910 PARAMETER Experiment Name: At_Drought_Reproduction_P Parameter: Organism Value: A. thaliana
  misc_feature: MA Experiment 20001910 PARAMETER Experiment Name: At_Drought_Reproduction_P Parameter: Plant Line Value: WS
  misc_feature: MA Experiment 20001910 PARAMETER Experiment Name: At_Drought_Reproduction_P Parameter: Timepoint (day) Value: 7
  misc_feature: MA Experiment 20001910 PARAMETER Experiment Name: At_Drought_Reproduction_P Parameter: Tissue Value: Flowers
  misc_feature: MA Experiment 20001910 PARAMETER Experiment Name: At_Drought_Reproduction_P Parameter: Treatment Value: Drought vs. No Drought
  misc_feature: MA Experiment ID: 20001911 Result: Down-regulated in Transcription
  misc_feature: MA Experiment 20001911 PARAMETER Experiment Name: At_Drought_Reproduction_P Parameter: Age (day) Value: 40
  misc_feature: MA Experiment 20001911 PARAMETER Experiment Name: At_Drought_Reproduction_P Parameter: Organism Value: A. thaliana
  misc_feature: MA Experiment 20001911 PARAMETER Experiment Name: At_Drought_Reproduction_P Parameter: Plant Line Value: WS
  misc_feature: MA Experiment 20001911 PARAMETER Experiment Name: At_Drought_Reproduction_P Parameter: Timepoint (day) Value: 10
  misc_feature: MA Experiment 20001911 PARAMETER Experiment Name: At_Drought_Reproduction_P Parameter: Tissue Value: Flowers
  misc_feature: MA Experiment 20001911 PARAMETER Experiment Name: At_Drought_Reproduction_P Parameter: Treatment Value: Drought vs. No Drought
ctcacattcctcaccaaaccctctccaaaacacacccacacgtacgcacacacacaaagacaatgtctcctttcaaaatattcttcttcacgactcttctcgtggcggcgttttcagtgtcggctgctgatttcaacactgacgtcaacgtagctttgggaaatggccgtgggaagatactcaacaacggccagcttcttactctctccttagacaaatcctctggttccggttttcaatccaaaacagagtatttgtttggaaagattgatatgcagattaagcttgttcctggtaactctgcaggaacagtcacaactttttacctaaaatccgaaggatccacttgggatgagattgattttgagttcttgggtaatatgagtggagatccttatactttacacactaatgtttacactcaaggtaaaggtgacaaagagcaacaattccatctctggttcgacccaaccgccaatttccacacttactcaatcctctggaaccctcaaagaatcatattgaccgtcgatgacacacccattagagagtttaaaaactatgagtctctcggtgtcttgtttccaaagaacaagccgatgaggatgtacgcgagtttatggaacgcagacgattgggcaacaagaggcggtcttgttaaaactgattggtctaaagctccattcatggcttcttacagaaacattaagattgactcgaaaccaaactccaattggtacactcaagaaatggattcaacaagccaagctagactcaaatgggttcagaagaattacatgatctacaattattgtactgaccataggaggtttccacagggagctcctaaggaatgcacaacaagctcatagaatctcaaattatattctatttatttatctacacttcctctctttcttttatgtgaaaattgtgaatgctctgtttctagcttgtctattatgtccgagaatttctttttctgtttttgattcttttcgttgtatatctttgtccaataaaggaaatgatgtgtctttactcc

SEQ ID NO: 24926 - protein, 289 aa, Arabidopsis thaliana
  peptide (1)..(289): Ceres Seq. ID no. 12397018
  misc_feature (44)..(225): Pfam Name: Glycosyl hydrolases family 16 Pfam Description: Glycosyl hydrolases family 16
  misc_feature (245)..(285): Homolog of NCBI NO: 29500893 NR Description: putative xyloglucan endotransglycosylase [Cucumis
  misc_feature (22)..(234): Homolog of NCBI NO: 29500893 NR Description: putative xyloglucan endotransglycosylase [Cucumis
  misc_feature (29)..(285): Homolog of NCBI NO: 29500891 NR Description: putative xyloglucan endotransglycosylase [Cucumis
  misc_feature (223)..(285): Homolog of NCBI NO: 15242781 NR Description: xyloglucan endotransglycosylase (TCH4)
  misc_feature (29)..(244): Homolog of NCBI NO: 15242781 NR Description: xyloglucan endotransglycosylase (TCH4)
  misc_feature (21)..(289): Homolog of NCBI NO: 21553999 NR Description: xyloglucan endo-1,4-beta-D-glucanase precursor
  misc_feature (21)..(289): Homolog of NCBI NO: 15234678 NR Description: xyloglucan endotransglycosylase (meri5B)
HIPHQTLSKTHPHVRTHTKTMSPFKIFFFTTLLVAAFSVSAADFNTDVNVALGNGRGKILNNGQLLTLSLDKSSGSGFQSKTEYLFGKIDMQIKLVPGNSAGTVTTFYLKSEGSTWDEIDFEFLGNMSGDPYTLHTNVYTQGKGDKEQQFHLWFDPTANFHTYSILWNPQRIILTVDDTPIREFKNYESLGVLFPKNKPMRMYASLWNADDWATRGGLVKTDWSKAPFMASYRNIKIDSKPNSNWYTQEMDSTSQARLKWVQKNYMIYNYCTDHRRFPQGAPKECTTSS

SEQ ID NO: 24927 - protein, 269 aa, Arabidopsis thaliana
  peptide (1)..(269): Ceres Seq. ID no. 12397019
  misc_feature (24)..(205): Pfam Name: Glycosyl hydrolases family 16 Pfam Description: Glycosyl hydrolases family 16
  misc_feature (9)..(224): Homolog of NCBI NO: 15242781 NR Description: xyloglucan endotransglycosylase (TCH4)
  misc_feature (1)..(269): Homolog of NCBI NO: 21553999 NR Description: xyloglucan endo-1,4-beta-D-glucanase precursor
  misc_feature (2)..(214): Homolog of NCBI NO: 29500893 NR Description: putative xyloglucan endotransglycosylase [Cucumis
  misc_feature (203)..(265): Homolog of NCBI NO: 15242781 NR Description: xyloglucan endotransglycosylase (TCH4)
  misc_feature (9)..(265): Homolog of NCBI NO: 29500891 NR Description: putative xyloglucan endotransglycosylase [Cucumis
  misc_feature (225)..(265): Homolog of NCBI NO: 29500893 NR Description: putative xyloglucan endotransglycosylase [Cucumis
  misc_feature (1)..(269): Homolog of NCBI NO: 15234678 NR Description: xyloglucan endotransglycosylase (meri5B)
MSPFKIFFFTTLLVAAFSVSAADFNTDVNVALGNGRGKILNNGQLLTLSLDKSSGSGFQSKTEYLFGKIDMQIKLVPGNSAGTVTTFYLKSEGSTWDEIDFEFLGNMSGDPYTLHTNVYTQGKGDKEQQFHLWFDPTANFHTYSILWNPQRIILTVDDTPIREFKNYESLGVLFPKNKPMRMYASLWNADDWATRGGLVKTDWSKAPFMASYRNIKIDSKPNSNWYTQEMDSTSQARLKWVQKNYMIYNYCTDHRRFPQGAPKECTTSS

SEQ ID NO: 24928 - protein, 199 aa, Arabidopsis thaliana; identical to SEQ ID NO: 21035
  peptide (1)..(199): Ceres Seq. ID no. 12397020
  misc_feature (1)..(135): Pfam Name: Glycosyl hydrolases family 16 Pfam Description: Glycosyl hydrolases family 16
  misc_feature (155)..(195): Homolog of NCBI NO: 29500893 NR Description: putative xyloglucan endotransglycosylase [Cucumis
  misc_feature (1)..(144): Homolog of NCBI NO: 29500893 NR Description: putative xyloglucan endotransglycosylase [Cucumis
  misc_feature (1)..(195): Homolog of NCBI NO: 29500891 NR Description: putative xyloglucan endotransglycosylase [Cucumis
  misc_feature (133)..(195): Homolog of NCBI NO: 15242781 NR Description: xyloglucan endotransglycosylase (TCH4)
  misc_feature (1)..(154): Homolog of NCBI NO: 15242781 NR Description: xyloglucan endotransglycosylase (TCH4)
  misc_feature (1)..(199): Homolog of NCBI NO: 21553999 NR Description: xyloglucan endo-1,4-beta-D-glucanase precursor
  misc_feature (1)..(199): Homolog of NCBI NO: 15234678 NR Description: xyloglucan endotransglycosylase (meri5B)

SEQ ID NO: 24929 - DNA, 834 bp, Arabidopsis thaliana
  misc_feature (1)..(834): Ceres Seq. ID no. 12488276
  misc_feature: MA Experiment ID: 108434 Result: Up-regulated in Transcription
  misc_feature: MA Experiment 108434 PARAMETER Experiment Name: At_Root_Tips_cDNA_P Parameter: Tissue Value: Root Tips
  misc_feature: MA Experiment ID: 108462 Result: Down-regulated in Transcription
  misc_feature: MA Experiment 108462 PARAMETER Experiment Name: At_Germinating_Seeds_cDNA_P Parameter: Age (day) Value: 2 vs. 0
  misc_feature: MA Experiment 108462 PARAMETER Experiment Name: At_Germinating_Seeds_cDNA_P Parameter: Tissue Value: Germinating Seeds
  misc_feature: MA Experiment ID: 108463 Result: Down-regulated in Transcription
  misc_feature: MA Experiment 108463 PARAMETER Experiment Name: At_Germinating_Seeds_cDNA_P Parameter: Age (day) Value: 3 vs. 0
  misc_feature: MA Experiment 108463 PARAMETER Experiment Name: At_Germinating_Seeds_cDNA_P Parameter: Tissue Value: Germinating Seeds
  misc_feature: MA Experiment ID: 108464 Result: Down-regulated in Transcription
  misc_feature: MA Experiment 108464 PARAMETER Experiment Name: At_Germinating_Seeds_cDNA_P Parameter: Age (day) Value: 4 vs. 0
  misc_feature: MA Experiment 108464 PARAMETER Experiment Name: At_Germinating_Seeds_cDNA_P Parameter: Tissue Value: Germinating Seeds
  misc_feature: MA Experiment ID: 20000111 Result: Up-regulated in Transcription
  misc_feature: MA Experiment 20000111 PARAMETER Experiment Name: At_42deg_Heat_cDNA_P Parameter: Temperature (deg C) Value: 42 vs. 22
  misc_feature: MA Experiment 20000111 PARAMETER Experiment Name: At_42deg_Heat_cDNA_P Parameter: Timepoint (hr) Value: 6
  misc_feature: MA Experiment 20000111 PARAMETER Experiment Name: At_42deg_Heat_cDNA_P Parameter: Tissue Value: Aerial
  misc_feature: MA Experiment ID: 20000117 Result: Down-regulated in Transcription
  misc_feature: MA Experiment 20000117 PARAMETER Experiment Name: At_100uM_ABA_Mutants_cDNA_P Parameter: Plant Line Value: Columbia
  misc_feature: MA Experiment 20000117 PARAMETER Experiment Name: At_100uM_ABA_Mutants_cDNA_P Parameter: Timepoint (hr) Value: 6
  misc_feature: MA Experiment 20000117 PARAMETER Experiment Name: At_100uM_ABA_Mutants_cDNA_P Parameter: Tissue Value: Aerial
  misc_feature: MA Experiment 20000117 PARAMETER Experiment Name: At_100uM_ABA_Mutants_cDNA_P Parameter: Treatment Value: 100uM ABA vs. No Treatment
  misc_feature: MA Experiment ID: 20000224 Result: Down-regulated in Transcription
  misc_feature: MA Experiment ID: 20000234 Result: Up-regulated in Transcription
  misc_feature: MA Experiment 20000234 PARAMETER Experiment Name: At_Siliques_P Parameter: Age (day) Value: 21
  misc_feature: MA Experiment 20000234 PARAMETER Experiment Name: At_Siliques_P Parameter: Organism Value: A. thaliana
  misc_feature: MA Experiment 20000234 PARAMETER Experiment Name: At_Siliques_P Parameter: Plant Line Value: WS
  misc_feature: MA Experiment 20000234 PARAMETER Experiment Name: At_Siliques_P Parameter: Tissue Value: Less Than 5mm Siliques vs. Whole Plant
  misc_feature: MA Experiment ID: 20000437 Result: Down-regulated in Transcription
  misc_feature: MA Experiment 20000437 PARAMETER Experiment Name: At_Drought_P Parameter: Age (day) Value: 8
  misc_feature: MA Experiment 20000437 PARAMETER Experiment Name: At_Drought_P Parameter: Organism Value: A. thaliana
  misc_feature: MA Experiment 20000437 PARAMETER Experiment Name: At_Drought_P Parameter: Plant Line Value: WS
  misc_feature: MA Experiment 20000437 PARAMETER Experiment Name: At_Drought_P Parameter: Timepoint (hr) Value: 24
  misc_feature: MA Experiment 20000437 PARAMETER Experiment Name: At_Drought_P Parameter: Tissue Value: Whole Plant
  misc_feature: MA Experiment 20000437 PARAMETER Experiment Name: At_Drought_P Parameter: Treatment Value: Drought vs. No Drought
  misc_feature: MA Experiment ID: 20000794 Result: Down-regulated in Transcription
  misc_feature: MA Experiment 20000794 PARAMETER Experiment Name: At_Petals_P Parameter: Age (day) Value: 23-25 days
  misc_feature: MA Experiment 20000794 PARAMETER Experiment Name: At_Petals_P Parameter: Plant Line Value: WS
  misc_feature: MA Experiment 20000794 PARAMETER Experiment Name: At_Petals_P Parameter: Tissue Value: Petals vs. Whole plant
  misc_feature: MA Experiment ID: 20001558 Result: Up-regulated in Transcription
  misc_feature: MA Experiment 20001558 PARAMETER Experiment Name: At_Drought_Soil_Dry_P Parameter: Age (day) Value: 27
  misc_feature: MA Experiment 20001558 PARAMETER Experiment Name: At_Drought_Soil_Dry_P Parameter: Organism Value: A. thaliana
  misc_feature: MA Experiment 20001558 PARAMETER Experiment Name: At_Drought_Soil_Dry_P Parameter: Plant Line Value: WS
  misc_feature: MA Experiment 20001558 PARAMETER Experiment Name: At_Drought_Soil_Dry_P Parameter: Post Timepoint (hr) Value: 6
  misc_feature: MA Experiment 20001558 PARAMETER Experiment Name: At_Drought_Soil_Dry_P Parameter: Post-Treatment Value: Re-Water vs. No Drought
  misc_feature: MA Experiment 20001558 PARAMETER Experiment Name: At_Drought_Soil_Dry_P Parameter: Timepoint (day) Value: 13
  misc_feature: MA Experiment 20001558 PARAMETER Experiment Name: At_Drought_Soil_Dry_P Parameter: Treatment Value: Drought vs. No Drought
  misc_feature: MA Experiment ID: 20001560 Result: Up-regulated in Transcription
  misc_feature: MA Experiment 20001560 PARAMETER Experiment Name: At_Drought_Soil_Dry_P Parameter: Age (day) Value: 28
  misc_feature: MA Experiment 20001560 PARAMETER Experiment Name: At_Drought_Soil_Dry_P Parameter: Organism Value: A. thaliana
  misc_feature: MA Experiment 20001560 PARAMETER Experiment Name: At_Drought_Soil_Dry_P Parameter: Plant Line Value: WS
  misc_feature: MA Experiment 20001560 PARAMETER Experiment Name: At_Drought_Soil_Dry_P Parameter: Post Timepoint (hr) Value: None
  misc_feature: MA Experiment 20001560 PARAMETER Experiment Name: At_Drought_Soil_Dry_P Parameter: Post-Treatment Value: None
  misc_feature: MA Experiment 20001560 PARAMETER Experiment Name: At_Drought_Soil_Dry_P Parameter: Timepoint (day) Value: 14
  misc_feature: MA Experiment 20001560 PARAMETER Experiment Name: At_Drought_Soil_Dry_P Parameter: Treatment Value: Drought vs. No Drought
  misc_feature: MA Experiment ID: 20001757 Result: Up-regulated in Transcription
  misc_feature: MA Experiment 20001757 PARAMETER Experiment Name: At_50mM_NH4NO3_L-to-H_P Parameter: Timepoint (hr) Value: 6
  misc_feature: MA Experiment 20001757 PARAMETER Experiment Name: At_50mM_NH4NO3_L-to-H_P Parameter: Tissue Value: Leaf
  misc_feature: MA Experiment 20001757 PARAMETER Experiment Name: At_50mM_NH4NO3_L-to-H_P Parameter: Treatment Value: 50mM NH4NO3 vs 100mM Mannitol
cattcgtctctttcgttcctctctgcgtgccctagttattcagatcgccgaatttgcagtaaggagacgaaaatatggtgcacgtttgctactaccgcaactatggaaagaccttcaagggaccacgtcgtccttacgagaaggagcgtcttgattctgaattgaagctggttggtgagtatggtctgcgtaacaagcgtgagctctggagagtgcagtactctcttagccgtatccgtaatgctgctagagatcttttgactcttgatgagaagagtccaagaaggatctttgaaggtgaggctttgctccgtaggatgaaccgttacgggcttcttgatgagagccagaacaagctcgattacgtcttggctttgactgttgagaactttcttgagcgtcgtcttcagactattgtgttcaagtctggtatggctaagtctatccatcactctcgtgtcctcatcaggcagaggcatatcagggttggaaagcaattggtgaacattccatcattcatggtgagacttgattcacagaagcacattgactttgccctcaccagtcccttcggtggtggccgtccaggaagagtgaagagaaggaacgagaagtctgcctccaagaaagcctcaggtggcggtgatgcagacggtgatgacgaagagtaaatctgaagtcgcaccgttttagctatgaatcaatctgctttttgatattttgtagtaagcaactttgttgttcgttttcagaggattgttttatggtttctttcttttactctcgagattgctaaacctttgggttatcatctatttctcacaattatctttt

SEQ ID NO: 24930 - protein, 198 aa, Arabidopsis thaliana
  peptide (1)..(198): Ceres Seq. ID no. 12488277
  misc_feature (6)..(108): Pfam Name: Ribosomal protein S4/S9 N-terminal domain Pfam Description: Ribosomal protein S4/S9 N-terminal domain
  misc_feature (6)..(108): Pfam Name: Ribosomal protein S4/S9 N-terminal domain Pfam Description: Ribosomal protein S4/S9 N-terminal domain
  misc_feature (6)..(108): Pfam Name: Ribosomal protein S4/S9 N-terminal domain Pfam Description: Ribosomal protein S4/S9 N-terminal domain
  misc_feature (12)..(196): Homolog of NCBI NO: 15294029 NR Description: 40S ribosomal protein S9 [Ictalurus punctatus]
  misc_feature (10)..(198): Homolog of NCBI NO: 24661707 NR Description: Ribosomal protein S9 CG3395-PA
  misc_feature (12)..(198): Homolog of NCBI NO: 27735416 NR Description: Similar to ribosomal protein S9 [Xenopus laevis]
  misc_feature (12)..(198): Homolog of NCBI NO: 13592067 NR Description: ribosomal protein S9 [Rattus norvegicus]
  misc_feature (12)..(198): Homolog of NCBI NO: 14141193 NR Description: ribosomal protein S9; 40S ribosomal protein S9
  misc_feature (12)..(196): Homolog of NCBI NO: 15294029 NR Description: 40S ribosomal protein S9 [Ictalurus punctatus]
  misc_feature (12)..(198): Homolog of NCBI NO: 27735416 NR Description: Similar to ribosomal protein S9 [Xenopus laevis]
  misc_feature (12)..(198): Homolog of NCBI NO: 14141193 NR Description: ribosomal protein S9; 40S ribosomal protein S9
  misc_feature (12)..(198): Homolog of NCBI NO: 13592067 NR Description: ribosomal protein S9 [Rattus norvegicus]
  misc_feature (12)..(198): Homolog of NCBI NO: 27735416 NR Description: Similar to ribosomal protein S9 [Xenopus laevis]
  misc_feature (10)..(198): Homolog of NCBI NO: 24661707 NR Description: Ribosomal protein S9 CG3395-PA
  misc_feature (12)..(196): Homolog of NCBI NO: 15294029 NR Description: 40S ribosomal protein S9 [Ictalurus punctatus]
  misc_feature (1)..(198): Homolog of NCBI NO: 15242241 NR Description: 40S ribosomal protein - like; protein id:
  misc_feature (1)..(198): Homolog of NCBI NO: 15242498 NR Description: 40S ribosomal protein S9-like
  misc_feature (1)..(198): Homolog of NCBI NO: 6440857 NR Description: 40S ribosomal protein S9 [Chlamydomonas sp. HS-5]
  misc_feature (8)..(198): Homolog of NCBI NO: 40741183 NR Description: RS9_PODAN 40S ribosomal protein S9 (S7)
  misc_feature (8)..(197): Homolog of NCBI NO: 1710780 NR Description: 40S ribosomal protein S9 (S7)
  misc_feature (1)..(198): Homolog of NCBI NO: 15242241 NR Description: 40S ribosomal protein - like; protein id:
  misc_feature (1)..(198): Homolog of NCBI NO: 15242498 NR Description: 40S ribosomal protein S9-like
  misc_feature (1)..(198): Homolog of NCBI NO: 6440857 NR Description: 40S ribosomal protein S9 [Chlamydomonas sp. HS-5]
  misc_feature (8)..(198): Homolog of NCBI NO: 40741183 NR Description: RS9_PODAN 40S ribosomal protein S9 (S7)
  misc_feature (8)..(197): Homolog of NCBI NO: 1710780 NR Description: 40S ribosomal protein S9 (S7)
  misc_feature (12)..(198): Homolog of NCBI NO: 14141193 NR Description: ribosomal protein S9; 40S ribosomal protein S9
  misc_feature (12)..(198): Homolog of NCBI NO: 13592067 NR Description: ribosomal protein S9 [Rattus norvegicus]
  misc_feature (10)..(198): Homolog of NCBI NO: 24661707 NR Description: Ribosomal protein S9 CG3395-PA
  misc_feature (8)..(197): Homolog of NCBI NO: 1710780 NR Description: 40S ribosomal protein S9 (S7)
  misc_feature (8)..(198): Homolog of NCBI NO: 40741183 NR Description: RS9_PODAN 40S ribosomal protein S9 (S7)
  misc_feature (1)..(198): Homolog of NCBI NO: 6440857 NR Description: 40S ribosomal protein S9 [Chlamydomonas sp. HS-5]
  misc_feature (1)..(198): Homolog of NCBI NO: 15242498 NR Description: 40S ribosomal protein S9-like
  misc_feature (1)..(198): Homolog of NCBI NO: 15242241 NR Description: 40S ribosomal protein - like; protein id:
MVHVCYYRNYGKTFKGPRRPYEKERLDSELKLVGEYGLRNKRELWRVQYSLSRIRNAARDLLTLDEKSPRRIFEGEALLRRMNRYGLLDESQNKLDYVLALTVENFLERRLQTIVFKSGMAKSIHHSRVLIRQRHIRVGKQLVNIPSFMVRLDSQKHIDFALTSPFGGGRPGRVKRRNEKSASKKASGGGDADGDDEE

SEQ ID NO: 24931 - protein, 117 aa, Arabidopsis thaliana
  peptide (1)..(117): Ceres Seq. ID no. 12488278
  misc_feature (28)..(75): Pfam Name: S4 domain Pfam Description: S4 domain
  misc_feature (28)..(75): Pfam Name: S4 domain Pfam Description: S4 domain
  misc_feature (28)..(75): Pfam Name: S4 domain Pfam Description: S4 domain
  misc_feature (1)..(115): Homolog of NCBI NO: 15294029 NR Description: 40S ribosomal protein S9 [Ictalurus punctatus]
  misc_feature (1)..(117): Homolog of NCBI NO: 24661707 NR Description: Ribosomal protein S9 CG3395-PA
  misc_feature (1)..(117): Homolog of NCBI NO: 27735416 NR Description: Similar to ribosomal protein S9 [Xenopus laevis]
  misc_feature (1)..(117): Homolog of NCBI NO: 13592067 NR Description: ribosomal protein S9 [Rattus norvegicus]
  misc_feature (1)..(117): Homolog of NCBI NO: 14141193 NR Description: ribosomal protein S9; 40S ribosomal protein S9
  misc_feature (1)..(115): Homolog of NCBI NO: 15294029 NR Description: 40S ribosomal protein S9 [Ictalurus punctatus]
  misc_feature (1)..(117): Homolog of NCBI NO: 27735416 NR Description: Similar to ribosomal protein S9 [Xenopus laevis]
  misc_feature (1)..(117): Homolog of NCBI NO: 14141193 NR Description: ribosomal protein S9; 40S ribosomal protein S9
  misc_feature (1)..(117): Homolog of NCBI NO: 13592067 NR Description: ribosomal protein S9 [Rattus norvegicus]
  misc_feature (1)..(117): Homolog of NCBI NO: 27735416 NR Description: Similar to ribosomal protein S9 [Xenopus laevis]
  misc_feature (1)..(117): Homolog of NCBI NO: 24661707 NR Description: Ribosomal protein S9 CG3395-PA
  misc_feature (1)..(115): Homolog of NCBI NO: 15294029 NR Description: 40S ribosomal protein S9 [Ictalurus punctatus]
  misc_feature (1)..(117): Homolog of NCBI NO: 15242241 NR Description: 40S ribosomal protein - like; protein id:
  misc_feature (1)..(117): Homolog of NCBI NO: 15242498 NR Description: 40S ribosomal protein S9-like
  misc_feature (1)..(117): Homolog of NCBI NO: 6440857 NR Description: 40S ribosomal protein S9 [Chlamydomonas sp. HS-5]
  misc_feature (1)..(117): Homolog of NCBI NO: 40741183 NR Description: RS9_PODAN 40S ribosomal protein S9 (S7)
  misc_feature (1)..(116): Homolog of NCBI NO: 1710780 NR Description: 40S ribosomal protein S9 (S7)
  misc_feature (1)..(117): Homolog of NCBI NO: 15242241 NR Description: 40S ribosomal protein - like; protein id:
  misc_feature (1)..(117): Homolog of NCBI NO: 15242498 NR Description: 40S ribosomal protein S9-like
  misc_feature (1)..(117): Homolog of NCBI NO: 6440857 NR Description: 40S ribosomal protein S9 [Chlamydomonas sp. HS-5]
  misc_feature (1)..(117): Homolog of NCBI NO: 40741183 NR Description: RS9_PODAN 40S ribosomal protein S9 (S7)
  misc_feature (1)..(116): Homolog of NCBI NO: 1710780 NR Description: 40S ribosomal protein S9 (S7)
  misc_feature (1)..(117): Homolog of NCBI NO: 14141193 NR Description: ribosomal protein S9; 40S ribosomal protein S9
  misc_feature (1)..(117): Homolog of NCBI NO: 13592067 NR Description: ribosomal protein S9 [Rattus norvegicus]
  misc_feature (1)..(117): Homolog of NCBI NO: 24661707 NR Description: Ribosomal protein S9 CG3395-PA
  misc_feature (1)..(116): Homolog of NCBI NO: 1710780 NR Description: 40S ribosomal protein S9 (S7)
  misc_feature (1)..(117): Homolog of NCBI NO: 40741183 NR Description: RS9_PODAN 40S ribosomal protein S9 (S7)
  misc_feature (1)..(117): Homolog of NCBI NO: 6440857 NR Description: 40S ribosomal protein S9 [Chlamydomonas sp. HS-5]
  misc_feature (1)..(117): Homolog of NCBI NO: 15242498 NR Description: 40S ribosomal protein S9-like
  misc_feature (1)..(117): Homolog of NCBI NO: 15242241 NR Description: 40S ribosomal protein - like; protein id:
MNRYGLLDESQNKLDYVLALTVENFLERRLQTIVFKSGMAKSIHHSRVLIRQRHIRVGKQLVNIPSFMVRLDSQKHIDFALTSPFGGGRPGRVKRRNEKSASKKASGGGDADGDDEE
